United States Patent Application Publication US 2014/0057251 A1 - sequence listing, part 66

SEQ ID NO: 104522 - DNA, 1882 bp, Cannabis sativa
tgttagacaaccttcaaaaaacgcattgtagtaatgtcccattccaacttgccaagcataatctagatcttcatttccatacaaattaaaatccaacaagaaattaagttaggccaacatgtggttttgatataagaactagtaattaggaagaaaaatcataataaatatatatattttatattaaggtctcacctttcaaattagctagaaactcttgctttgagattgatgacttgtgcaactctttgccaatgaggttctcccaaacttgaacaacttctctttgggacaaaatattcttaggtggcctaagatacacagtcttattcatagttcgaggatcatctatggttttgattgtatactttgctatgtcatcttcatccacatatattgctgccatatatatacattaggtattaggtattagtaacatgtaatacatatttacttagagttgtattagagtagcttttgcctagttattaatttaaataataataataaaattaaatctaatacaattcaattatattttttaaatatataaaatttaatctaattttaaatttatttataaaaaatatttctaactaattttattaaacaataaaataagtaaataataagtttagatatttaattaaaaaacgttgaaattgctctgctagggcatcgacccagtcttgaactgaagccatggcaggtcgaggtcgcccgcgcaagccaattttccatggatctggagttcgaactgctactgatggaggagttgctaggaaacggaaagtgaaggtgaagaagaaaggaccaacgtcatctaacttggttctcaaaacgaagtcaatggcagattgaagatgaaatggaaaaatagaggagtttgactgagccaactagaaagattgaagatgttgctaaggtggtttcacctagatcgactctaaccctgctgctacagaagcaatgagttcaggaagactatgggagttttttggaagcaaccaaacaatgtgaacttcatgtgagtactagtaagaatcaatctccacctttcttcattcgaatctagttcagaatttgagtggtaagtttgatgctagtaaaagccctaagaaaaatccagtagttaagattgatatggtggatgtggaagaagaaattttgtactggatatcatgaatggtatatgttatgtgctcggggctaatccccccttggtccttttgaaggctttgcaaggagaatttggaaagacaagggggtggataaggttggtgtgcttaaactagggatgaaaccatgggagccgtatcaggactatgacaaggaagatgttagctcgtatctgatttggattcagctacatggattagaattaaggtattggggggaaagatcattattcaaagttgttggacaattagggtgccctctgatgttggatgaagtcaataagaataaagagtggcttaactttccaagggtgcttattcaagttcaaatgctactgaaattatctcatgcactaatgagatatcacaagatattgaattgaaggtgaaatatgaatggcatagtggcgtgtggtcatttttcatgaatgggacatacttctagggtttgtaggaagaaggaagtcaataaaaaagtaaaacctaagaagatataggttgctaaaaagaccactaatgtgattgggaatgagcaaaaagggaaggagataatagtagatgaaggagggtttcaaaaggtgattaaaggtggcaaaaatattacaacaatgtctcttataatagtaacataaaatgctttccaagttcttgaagagctagccaggggagaaagagatagatggagacagcaaaatgcttaagga

SEQ ID NO: 104523 - DNA, 937 bp, Cannabis sativa
  modified_base (900)..(900): a, c, t, g, unknown or other
cccatgtttgtcggtgagggtcgagaaacaagcggggttgcatacaccctgaccgaggtttctcggtcacttgtagggtgatgctcgcacgggtgttgtttgaagggaccgtgactgagatccaaataggggacacggacagatttccttccttgttcgagtgccttcacacatggtgctcgaggaatggcagccaatgcatcaaattttcaaaacctcatatctctctctcgtttttaatcggaatctagttcaaaattgcttaatttttttttttaaggaatccaaattaaatattttcaaaacgaaaaaaaactatttttcaaagaaaatttcataattcacaattcaatcatcaattaacacataaaccaacatgaacacgtctaaatcaatcaaacattattttaaatccatatttcatgaaaataaatcattattatggttttgaggtctgttgttggaacttattttacaaggatttagatttactaacatgtattttttttaattataattccataatctaacatcctaaatatgaatttcctacaataatgaaataaacacataggagattaaaaaatccttacattgatggcggcaaaatataatgactccttcaattcagatctctagcccttaattcttttctgtagcagagcattatcaagatctgaacctggattttctctccttcaattcggttagacataatcttcctcactatgctaggtattgctttgacatgagtagacatactcttaatcaccaaggcttcaaaaattttgaggaagaaaaagaaggaattcgaaatagatagtagctctctttattttttaattgtctaccaaaagagtctagagtcttatgaaaataatgttggattttgtgccctanataaaacccatttcaaaataatcagatttacttatta

SEQ ID NO: 104524 - DNA, 590 bp, Cannabis sativa
  modified_base (385)..(385): a, c, t, g, unknown or other
tatttatattatgagttaatcaggtaataagtgggattatgatcctactaatttatttcaccataaaatgtaaaatttgctaaaagtgagtaaataagcgtaatttgtaaattacggagatttatatagcatgtgtgaatataatatgagttatttgtgaaataaatatattttcaggttcgacgaccctagagacccgattggaggccaaaaatgtcacaacagttttagttagaaatattgatggaattattaatataagttgattttagcaatatgagggtattttagggtactcgaagttggcgaaataccctaaaaatagagatttcttaatagctaagaaataataagataactattaataataaattttttattaatnttattattaatattatatatataaaacgatacttcagtttcatttcgttttaaatatatatatatatattaagttttaagttataacagtagaaagaatgcagaacgaaaacctcgttctccctccttcgacaaaaccttctcctcctatattcattttcttcgattttcatcccgaaacttagtgatctaagctccggtagcag

SEQ ID NO: 104525 - DNA, 786 bp, Cannabis sativa
actgagatagatgagttgataggcaaggttgcggttttggctatcggtaatggaggaggagatttgggtatttctagggattttttgattgccctgtctcagaaatttcctctgattttagctttcgacctgagaaattgataatgatagaaataagtgttgggcgtagtgataatgattccttatttttgttgtgatttgattaaataagtgattatattagttgggaactataatatattatttataagatttgagaatggttgacattgatattttatgaaaaatttagattactcgattcacagttttcttgcacattctctgttgtacccttctcaattctatttttcagggtactatgtcacacgcaacaccacctagcaaaataagtggattatcatatatataaatctatattatatatagatattgtccgtgatatattttgcattacttattgtataaatgacgtttcatctattactaagcccattctctttaggaaaaatgccaaaatttttatgtttaggaaagggcaatacacagtgattttgaaaaaatgtgatcaatttgaagacataccatttaaaacagaacgccagagttccacttgatcagcttgaggcatgttcattacattcttgcagtttccattaattatatatgttgtctgtattataacagaaaccattgaaaacaatgaaattatctgtatgtgttttgtctacgtcacatctctgttaaggaatttcgagaaatgaagtgaaattctctttggtgaaa

SEQ ID NO: 104526 - DNA, 558 bp, Cannabis sativa
cccaagggacgatccaatgcatttgtctgtactttgaatggcagattaaaatccaggcaactttagtatcagtttcgaagacactgctaccttcagcttctcaaatgcctcattgcattcttcagaccagcaccatttctgatcctttttaaggagatcagttagagcgctcaccctctttgagtaccctttgatgaatttccgatagtaattagccaatcccaaaaatgaccgcagctccgctacctttgtgggaataggccaatccatgattgccttaatgtttccttcatccattctcagcttcccctggccaacccaatgaccaaggaatttcacttccttcctacagatttcgcatttctccttcttaatgtacaacttttcttctttcagccttgtcaacaccttccttagatgctgcaagtgttcttcaaaatagttgctataaatcacaatatcatcaagatatactacagcgaactgatccaaaaattcgtatagcacatcattcatcagattgcagaatgttataggggcattggtcaaaccaaaagg

SEQ ID NO: 104527 - DNA, 1110 bp, Cannabis sativa
tatttgtacaatttcagaaaatacatggttcattttgtcatttaacaaatcaaagggtccaattggtaaattctgcaaaacacagggtccaaaatagtatttaccctatatacatttgttattttatttttaatttatttattactaatttatataaatcctaactctataatatgcaatttttatttaccaataccatgaatctctattattgctctctataatatgtgactataactctttaattttgccaacaccagcaatttctattattgttttttttgttagttaatatcaccattataatcatatatgcataatatattatttttcttttgcattactctattttttttttttcaagcatattacattattttttagtactccattatttttttatttctttttattttttcttctcctttagttacagcttaattacattttcttattctaaagaaacttatagttttacttttccagggttaaacatgttatgaaggttttttatttgatttctttaaaataattttttctaggtccatccataaaggcaaacacagggctacgaatctacctttccgtgacaagattccacgttatctatcttcacaatgttgagtgaatttaatttgtacctttttattttacttataaagaagcactagttttaatctaaataaattgttttgcttgtaagagaaatcgttttttttttttttctaatttatgtattctaatctgtcttattgatattgattaatgcttatatttaaacttctaatattgatgttgtgctttatataaatcgaaactaaaactcatgtttctttatcaataccatgaatctctattattgttctctataatatgtgactatgactcttttattttgccagtaaatttatcaataccagcaatttctattattgctttctctatttgtcaatatcaccataataactattaaaattaatatttatagttaaatttgtttagtaaccattcataggtaatatccattattatccattaagaagtgttttatatacatatatatatatgcataatatattatttttcttttgtattactctattttttttt

SEQ ID NO: 104528 - DNA, 3616 bp, Cannabis sativa
  modified_base (263)..(263): a, c, t, g, unknown or other
agcgtagattatcatatcagttaaattttgtgtactggtaaatcattagaatttatttaatcacataatcttgattactttccactatgttgacatcacaataatcaagaatattaatgtgataatgatttggatgaatttatgaatcaaacaaatgatcatgaaataaatgtgaaccaaataacacattaaacaagtaatgaaataaatctgtttctttattgataaatgaatattcaagattacattgaaatggagttttntttagggcataaaactcaacagtgtctattggttgaatagaaaaattaaagaccgatatacttccatatgaattttgctctagtacatcctagaagggcgtgagagattgtttccttctggccattacaaagaaggcaaaaggggtgagaaaggattttttctagaaaaggctgaaagcacatggcagcacatgatggaaggctttccagataaagtgtttgatttttggtgggatttttatagaccaaactaccttctaccggcttttaaaagcaacatgattagaggaagaggcaaagggtgaagaaactaaggatttggcaaggtgataggttgaatttacagtgaagttatccaaaggatgacatctccaaataaacgtatccttcatagcagggaaaataggaaccttaagaatttcgtcaatagtgtccttagggaaatagagtttaagtctatcaacattccaagatctattttctagaataaaatgtgagaccaaatgattaggggggaaatacattctttaaactaaagaggcctagcattgagaacctaagaagaaccaatagttgaaattgagttgccatttcccactttccaaatgtggccctttacaagtagatctcttccccacatgatatttctctaggtggatgaagagtagcgacctttgggggcatgaaggaaatcattgcttttgaagtacttgaccttaagtaatctggacaagaaagaaaaatccttcaagcctgcttagctaatatagcctgattatgatagacaatgaatctaaaactcaaaccccccgaaattcggaaacacaaagaaatgaccaattttccattggattttgttcttgttagcactagagccccacataaatttagtcgtgagtctctctaggtgtttacagatagaaaagaaagacgaaaataagacatggtgtaggatgggatagcttggacaacaacttttatcagggtttctttcccagtcctagaaaaaaacgttccattctaacaattgatgttggtgctagcattctgtaagagatagtggaaggaagaactcttaagcctaccaacacattaagggactcgtaagtacttgctgatgaactctttattagatagccctaagttattgtagaagacatttttattatgaaggctagtgtttggggagaaaagtatagaacatttggtaaaattaaccatctggccagtggccttattataaatgtcaaggatatttcttaatagctatacaattctcaagggtaacagtggtgaacaacagactattatctgaaaaaagcaagtgggagatcaccggtgaagctctgtaaatagagaaactcttaaaaaaatttacattcatactagtacggatggcagcagagaggccttctgagaccaacaaaaagagatataggggagaggggatccccttgcctaatgcccctggaaggatgaaaactttgagagtgaaccattggccagaatattgaaggagacagtggagatgcagctaagaataaaggaaacaaaccttctagggaagccaaaattgagaaggatggctttcataaagttccacttatcgaaggcctttcccatatcaagcttgagagcgccccatcacagctttccacttttcatgttattaatgacattaacaacttcattagtaataataatattgtcaaagataagtctatccaaaagaaaatcactttgaattgtttgaaattaaagagtctaagacaaccctaattctattggaaaggactttggcgacaattttatacacggtagagcataagctaatgggcctgtaattccgaacatgtgtaccattttttttcttgggaattagaactggtaactcgaaaactttccctggtgatgtggacatcaatatttgacacgtggcatgaaggatgacatcaagaagttgagtagacccgagtcgcagtagtcaacctgggaggggatcctagccctgcgcccaaattgactttaggatctctaggatgaaagttcggactagtattctgtaccatgaagacatggggcaacctaatccaagccttaggagctgaaattacatgaacctgcaactcgaaagccaaaatgggcacttagggtttcactcagtgcccaagttgacattctcaactagggttttcgctttcggggccgtctttgtgcaaagtggtcaaaacttgcattgggacatcaaataaacataccacagacatatttgaggcatcaaaatcaaaatcggagcaagttgatttttgaataccggggcctggggctccgagcacccagtgcccaagttgacaatctgtcaatctgggcaccttctaagcattcgatcgaagatctgactcttgcatcgaatttttcttcatcaaaaatggggaaatatgtccttccagaggaaaaaaaataattcctagtcacaaataacaaggccaagcgcccaagttgacacctggggctggccctgcgcccaatttgacatgttgtcaacctgggccatttaaaataaagtttttcatgaattctttcgagcatcttctttgtcttcaaatatattaatatttaactatttctgggaaccaaacggaatttctgaaggggcgaaattgattctcagcgctaaggttgacaccaagttgatattttgtcaacctaagctatttccgatcaagtttagtaaaagtattctgggcatttttctatcataaaaaataacaaaaattcaaataatcggtataacctaaaaacgaacttatatgttttaaaaggtaagtaatcggtatcaaatgagttattataaaaaccaatgtagtggtaaccggttgaatttataaagtaaaaagatatatagtggtattctgttaccatatataccaaatcatttttaaaataacaaatgcgttgtaactggttactagtacaactatcaaatttttgaaaatagaatataagaaaaaaaatcccattataaatgtaaaattattgaaagttttatctttgatgtaattatatttaccaaatttatagaaaaataaattatatttgatgtaatgtcacctttaagagtcattcactctttgttctaaaaaaaattacagaagcaactatttttgaattttttttacacatttaccttaaaatatatatatatttttattatagttataaaaataatacaaaaataacaagaaaaactacattaaaataacagaaaaacaacataaaaaataatatacaaataataaaaaaccaataacaaattagtaggagtacaatataaaagggaattttgattttat

SEQ ID NO: 104529 - DNA, 553 bp, Cannabis sativa
ttgcctcatgtattaacaagaaaccatacagcattggatgcacaaggcgagacatcaacctcgttacgcctgggtagacgtaagcgaggcataataactgtgaaaacacttggcgtataatatacggtatacaaactaagtataacaatcgggtgaacccaagcaactaatagcgaggcacctatctcgctattggaaagcacgctcttgatacttccaccagtcagcttcagacatctttcaatgagatttatagtcttgacgagttggttctctcgagcagaaattgacattcaaataatgtagattgttggagttcaccttgtcaccgagaactgcgattgtcagatggagcgttatgtctttcgcgaagaagtgacgaggtttacattatcaacctcgaagagataggggaaaagctccagctcgctatcaatgtcattagtactgagttcatgtcgagacatcccagaacgttatgatttataacgtgtttaatacacgattatcttgacccagtaaaagcgggctaatcacagctgtgtgatattca

SEQ ID NO: 104530 - DNA, 581 bp, Cannabis sativa
tgaaactaaagaaattttggcatgcactattatatgtttctatcttatgttttagttaattaatcaagttggtatggcttgtgatcatttattttttctttgatccatacacatatttatacattgattttgtaaatattatcaaaattatatgtattctatttattttattcatgtttttttttttttatatattactaatttaaatatctaaatattatcccaatgtgcttataattttaggtgacatcttaatccatttccattctctattatttatttataacattatatatatgatatatatacattataaacaaacaccccaaaataatctgagataaccagaaaagagcataactatggtagagaaaaataggattgatttttcactccctctttctctctccttacacgcctatctcacactctctctctcctcatctcacacgctacacactatcaagtgtggtgtgagattatgactaaccatatctcaattacagttgtaacgtccccgcttcaagtctttattgggcccttacacccacggactcatggttcttatacacgagtacgcc

SEQ ID NO: 104531 - DNA, 568 bp, Cannabis sativa
ttttgtgttttaggttaggtttttgatgtgagattacgtgtttagatggctgtatgttttaggttgatatgttgtgtaattctggagttaggagttaattattcttgttattttgagctgagatggaggtttgtgttgagatttgttcaagctttaagttagagaacgttaattgggtctttaatggtgtttttataatttgagtgatttattgtgaattgatgcttgaatatgcttcattatagtgtttacaggtattttggagagtttggtaaagtttgggattgttttggaattaggggagcaattttcgggttcccagtacagaaccgaaattccggttctgggggacctgtagcaaccggtcgaccggttggttcccagaatcggacttccagttggggctttttcccgaaccctagttttccctatttttgtgtaatttataatgtctctcaccaagttttgaatatgatggtttagggccctgtaaagcgtcgagttgcactttcactcaggctgactggcacacttgagcacggagcgaggtaagatagcatgaatatta

SEQ ID NO: 104532 - DNA, 695 bp, Cannabis sativa
cagagacattgtcaccagcaaccaggtacatgtcaagaaaattagcacagaccacaaccctgctgacatgcttacaaagtgtgtcactttggacaagtttaaacactgtctaaccatgctcaacattgaagaatcataaaatcttaaacttgagttcacttgtgtctcaattaaagtggaaattgttgtaattaagccacatgtgaattgttagtttgccacatcatcaacaaacttacctaacctactgaattcagttggcttcgaaataaactactgcctactcctataaatagaatttcctgtctattgatttcacttactgtttttgatgtattgtaattgcttagagagagattgtacaaaacagaattgatagacttagagagagtttttcttgagggatgttaaagggaatgtccattcatgaaatggcttccctcatgtgaggattcaatgtaacttgtttctggttttgtaagttgatcagttttctggtttatctctctctctcattgattgtaataaaagattattcagcaataaagattcttcttcatattcaaaactcagcctcattgattcttggtgaattcgatttcatatactttcaattcagttcattattaattgatctctttgatctcttgagtttgttctgttattgtttgcattgtgttgtttcagctgtgttc

SEQ ID NO: 104533 - DNA, 565 bp, Cannabis sativa
tctaagacctttttagaagttactatcactactacaaactctacttttggtatcgattttaaattgacacttatacttttaatgtcagttcataaaaccaactattccagtgacaaaaagtcacatttttggtgtcgattctaaaccgacactattaagtttaggtgccattttataaccgacacttaaagaatacatatatattttttctattaatgtctatttaaaaccgacaccattaatttttagtgtcgttttataactaacactaaaactccctttaatgtcaggttaaaaccaatacttgatggattaaaaaataaaaaaaaaaatactgaaatcaacaaaaaaaaaaagaatttaaaagcataatacaaatgttatctacaataaattaaattaactaatttattacatataagttttaaaaaaaaactaatataattctacataaaattataaactaatttattcactccatatgtatacataaatcaattagtagtggaaaatgagacaatcatcttgaagctatccaagctcactaaatgttaagtcaatacaa

SEQ ID NO: 104534 - DNA, 516 bp, Cannabis sativa
gagccgagggtgctgtaaaattcctttaagagccccgagtgactccgagtgttggtgggacccccacctttcctactcctttatttggtggggatggtggtgattgcactagtgatcagaacaggaaagttaccctggcatctggttgctcggggcagagtaagcggtttcgtgggagtgtaaccggaagacatgctttctgtgtggcatggtgtggaatttcaagaaagattgcccttaggcaaagaaataatagccgaaaccaaaggcaaaacctatacctcctcgggtgtttgccattacccaagctgatgctgcagccagtcctcctgtggggacaggttagcttcttgtaaacaactccttgtatattgtattatttgattcggaagctacatgctcatatgtgtctacacaaataattgatctttcggttaggccttgtgatattcttgaaagagggtttggaaccgtaatgcctagtggggagttggttatctctaataggcgcattag

SEQ ID NO: 104535 - DNA, 1793 bp, Cannabis sativa
gtttaatttaataatattcatcataatatatatatatattatgagattttgtttgaaaaatctttggaaatttatattaattttaccctttttctattctatggacgaattaataggtatgttgatttttaaaaatcataaattttgatcatattttaattaaaaagatcattatcaaatttgaaatgatattatcaaatttattcattgtgtttatttatattaggactattgtttttttttcttttggttttttgtggtgtttcttattatgttttgttgtgtatcgtattgtaatattttttaatattttttatttatttttagtgtttttttttaaatttatatatgcttttgttaaacttaatgggttgtttttgttatttttttaatgtattttttcgctctttattattaatttaaaactttttattattttcaatcgttaattattttttttatgttttatatttaaaatattacatctgtatatttttaataaaccatcttctcatcgatgttattgttttgtttattttttggtttttttttcatgtgtgtattttaagtacttttcatataaatttattcattgtgtttattttcatgtgtttatttatattaggactgttatttttttttttgtttttttttgtggtgtttcttattatgttttgttgtgtatcgtattgtaatattttttaatattatttatttgattttagtgtttttttttaatttatatatgtttttgttaaatttaatgggttgtttttatttatttttttaatgtatttttttcgctatttattattaatttaaaactatttattattttcaatcgtgaattattttttttttatgttttatatttaaaatattacatctgtatatttttaataaaccatcttctcatcggtgttattgttttgtttattttttggttttttttttcatgtgtgtattttaaaaatatatcatatattgattttatttaaacataaatatcttgatcatatgttgattttaaaatctaccctataatgatatgttattaaaatggctctaaatatggacccttttgctattcctagtgcaaatacatagacttgtggaaatattgatttttaaaaatctactaataatgatattggacttagttaatcaaaaaaatcataattatatatgtattgaattttaaaaatattccatacaattattatgtcgattttggatgtgatttatatgattaatacaaattttattgtttatgattatgttttgtaactattaatatacaattttgttaattagtaggcttactcattaattatcatatacattagtcataaaaatagttgcacaaatctaattatagtgagttgactcattaatatatctattataattaaattaagaatttgtatgaatctatgtaaatatatttttaaattcgtacatttttaaaattgtatttttttttcacattttttgtaataaagttgtttttattgtacaataatgaaaaagccccaagtttaaaataagatagcctaggttgatgggtgtatttttggctaggatgagatgcatgagtaattggtcaatgaaatttatctcatcttggtgccaactcctaggtgcaaggttagctacaatgaatttgtggagaatttttgcctctaaagtaagttggtgcctttttggtttcataataatagggccattaccacaaagatttctagaacactcatcaaagttaaagatgtcatcatttttaagagagagtttgg

SEQ ID NO: 104536 - DNA, 612 bp, Cannabis sativa
  modified_base (217)..(221): a, c, t, g, unknown or other
ttttgtagtcgttgtgcgacctggataatgtattttggcatattttatataaaagtttagaaacgggatcccggtgtttgtaaataaatatgtaaattataaagtttagtatgcggcataagtacccaaagttctgagtttgtaagcggcataaacccaatgattttttttagtggcataagtacccaatgtttgtaaaactgtaatttttctgtannnnngtcagtacaggctccgttttaaatttttaaaaaaagatttagaagtaactgatactacatatttttcatccaggccaaataatctaaaatttgggtcttatatttgttatgtttaagacaataacagagtctttactgatgaaactggaagaaaattacagttttataaatattgggtacttatgccactaaaaaaaatcattgggtttatgccgctaacaaacctaaaactttgggtacttatgccactatttgccctaattataaaaagttttaatttgacacatttctcgagaaaaatctagctttgactagcaaggatagcactgtaattgaaaaagtactgtagcgtgccttatcattagggcattactgttggaaattattttac

SEQ ID NO: 104537 - DNA, 705 bp, Cannabis sativa
accaactgcttgctgctccaactaatgaggtgaaaaaaaatacaacgtaaattatttgtcacattactagctcgcattattgtgttaaagttattcaaatgcaagaccggatcggtggtcccatcatacgatgagacgtgagggtttttaaatccctgtggaaaaggagtattcataatatctagatggtacagctcgagctcctcgtttgagtcgtatccagattttcttcctaattcccccacttgatatctcctgaacttatcttccaactcatctattcgcaattggatgggatcctcttgctttggaccgagttgttggggaagatcaggttttgtctaattcaagtgctatcgtagatccagttgggagtaattactaacagacctcgttttactcacatactgtgtccttcttacggacctcgtcttgctcatggacctcgtccttgacggacttgcggatttactggttcctgtgctttctcgatcattagcacgacgggtactctctcttcctcgagttgatcaactgtgggtccttgagcaccccgaggtcacacttgcttcttcatgctgtgttcttcccctttgagcattttttgtcgtatttgttggaatatgttttaccaggatctagaattactaccatgtatgttgtttaacatcctaatatgaatttctaaaacaatgaaagtaaaca

SEQ ID NO: 104538 - DNA, 836 bp, Cannabis sativa
aaatattttacaaaaaatggtgcattaagtttttttgagatttatattcaagagagactattttgaatatttatttgttacaatcacattaaatttagaaattatgaaatgtacgtatattttaggttttataatgatagagtgttgacattgttttcccgtcttttcttaatttttaaagatttagagtatattttcttttaattttttggaattagaaacaatatttttttaaaaaaattcaaaatgtgattgtttttaacttattttataaacattttgcatctaatttactattcttaaaactttctgtattttcaattaactttttcaaattaaacatataattaagtatacatgcattatacgtaatttctacctagtatatatatacatatcaatcaatcaatcaatcactcaatatatatttatataaaggggaagtataagacggtgacatgacgctttagaattactctaaatgtatttatctattttctctttaattctctcaatttttaattttttattaaggtaaaattatttaaaatatatttatttattttaaaattatttattttttctgtaacagatattttgtttcaatacaataagctagcacgtattaaatttttaatagttattaatagttttttttttgaaaaaaaaaaaaaattctaaatcttaaatcgcatttagtgagaattacatataactatcatttatttgtactcatctttggtaattgtgagcaaataggcatcatggctataatactctattatgcaagaaagctttattttgatgggtatgtatgagacttttgagttatttga

SEQ ID NO: 104539 - DNA, 539 bp, Cannabis sativa
ggtgaggacacacacttaactcaccacacacgcgagcgtcccgagctagctagtgtggtgatgtttctcccctgtgcagtagggatccgatacagtatacgaatgatacaacaaaaagttaacttgccgactaagaaagctattaattaattatataaagtcagcaatacacattaattcttttattactgcctctcacgtacactacaagaaaacttccttcaattaatgcaaccaggaaaaaattttcaaaaaatttaatggagttaggaattatacatttaccaacaaagctagtgatctaatgagactttacaaagctagtgatttaatcatatacggccaaccacgattgtttttcatgttgagacaaaagaaaacaaatacgcaaatagaaaaacaaaactaaaaagaaagcgcttggagataatctttgcattcaattaatgcaataaaataagattatgagaattgctaaaagatatcattagtgtttcgcacctttctcagtgtcatactgttattggtgtaattaagta

SEQ ID NO: 104540 - DNA, 707 bp, Cannabis sativa
  modified_base (37)..(58): a, c, t, g, unknown or other
  modified_base (651)..(655): a, c, t, g, unknown or other
ttatttctgatctatattaattagtaaatctgattannnnnnnnnnnnnnnnnnnnnnggcataaaacccaacaggaatcatccagctcaccactgatctatatattgcgatccaggaccaactgcctacactacaggccgaagtggatggacagaaccgggcccgacgcccccctcgagtccctactactcacacggacaaccctcaggtaacaaattctagacgtcgtaataactgtgttcgcaaggaacgaagagccaaccctgagggtctggacctgaatcatccaacttcgagagaccaatccgtgagatatcctaaccaaggaacacaggctgatgaagatcctgagaaacgcaatcctcgcagtcgaccatcgagagacaacgacgcagaatctgcctcttcgtcttcgcatggtcgtacaccaagtagatacacaaggtccggctctgtagaaacgcaacaggggggacactatcaggtacatcgaggtgatctgcgtgatcacctcaacgcagttttcagagcacgctctcgcggcccccataacgaggaaacaccccgtgatccccatgtgggcgatcagggtataaacactcataataattcgcctaatgcaccgactgcgactactgggatcactatcnnnnngaacctcaccgcagtagtcgcgactcctgcagtcgcagcagtcccgactcct

SEQ ID NO: 104541 - DNA, 594 bp, Cannabis sativa
ctaagattgagttagttgtggggcaattggctaatattactttgcaatccactcttttagagcgaatcaaagaagtacaaatgcaagatcctgaattagagaaaactcgagctagggtttcggctgggaaggctagtgatttgtcgatagatgaaacaggaatattacgattcgggaatattgcgatttggaaatcgtgtttgtgtgcctatggatgagagtattaaaagagagatcatggatgagtctcatacgactccttattcagttcctccagggtcaacgaagatgtatcaagaccagaaagccatgttctggtggtaaggcacaaagaatgacatcctgagtatgttgcaaagcgtcttatctgtcagcaagtaaaggttgagcatcagaggcctgtaggtttgctgcagccactgaacataccagactggaagtgggaagacattgctatggacttcgtggtgggtttacctagaaccacgagacagtttgactcaatgtgggtcatagtggacaggttaacaaagtcagcgcactttttacatgctcggaagaatttatccattgaccagtatgctgagttatatg

SEQ ID NO: 104542 - DNA, 603 bp, Cannabis sativa
agtagtaaactcgccaagagtgagatcgatctcacagagattgtagttaagtactttaaaattaaatctttatttttatttgggagattcaaaattaagagaaaagtaaatttaataacattaaaaagacggtgaaattagaaagaaaataattcgaaatagaaattaacaatgattaaagttagggctttgatttcaattatatctattgattatgacctaatatgattatcttcttgttacaaatttctatgcaatagaaggtttattaaggtaatttatagtcttctcaaatatataaatctcaattacatgcaaattttctactctcgatgataaattaaacatgaacaggcattaaacatacaaactctataatctatctaaaccatacaggtactctcgtcctatatcaaaattcagttctatttcacaatagcataattcacacccacttctcaggcgcatcaaaatatcataggcagttaattggtgatgcggcaattaaaagtaattaagtacgaatgaaatagaatccatagaaattgagagaaaattaaatcatattagaaccataaaacaatgtcaaacaatattcatcta

SEQ ID NO: 104543 - DNA, 574 bp, Cannabis sativa
  modified_base (524)..(533): a, c, t, g, unknown or other
agattcgattactttaatatcgaaaaaaatccgagagaacaaaactccaacaccgacgcttagcaaaacaagcctcgcagaatgacctagatgaattaaatctggttctggtagaaaggctgagcgagccaagtatatgtgaaactgaaaacgtcgagatgatagatggctctctaacatggatgatgcatattatcaactatttactcgatgggcaacttccaaatgacaaaaatgaggtgcaaaaactattctatacagtgctttgctacacaatgatcgaaggcaaactatataaaagagggtattcaatgcccctacttcggtgtgttcctcccgcagaagcaaaatgaaatcattagagagattcatgaaagcttctgcagggatcatgcaggttggcaaagtctgtctaaaaagatcattaagcaaggatattattggccaacgattaataagcacacacatgagtttgtaaaaaatgtgataagtgttagaggtttttattgggttttatgccctannnnnnnnnnatttcaatataatcagagttacttattaatatagatcagaa

SEQ ID NO: 104544 - DNA, 585 bp, Cannabis sativa
  modified_base (60)..(62): a, c, t, g, unknown or other
aatgttgtgatcgtgtttatgtgtcgaaactaatttagtttttcccattagtcttgtctnnngacatggttctttagtctttttcttttaattttttccattagttttgacatggttttttggtcttttccttttagttttttctcgttcgagtcttgtcttttggcatgggttgtgtagcttagaatcatcatagtggtatggtagaagcattcaagaaggagaagattggatgtgtttaacctgaaattgttgagataataagcattaaagaagcattgagttggattgcaactcattcgtgtgatagagtcatgttggaaacagatagcttggtgtgtgttcatgcgattcagagcggtatttttatgccttcacagtttggtcttattgtttaagatgttcaaaatttgcttttggctttatcttttgttgatttgtgttttgtaaaatgaaataagttgactcattgcctggctttatctctacagatcgtgtgcttcagttggaggactgtttctctgaagagcgttctaatattttgaacgaatttattaattaatagatcttatgatttttattcaa

SEQ ID NO: 104545 - DNA, 745 bp, Cannabis sativa
ggatgaatttataaatcaaataaacaaataaatgaccacatgaactaaagaacacattaaataagtaatgaaaaaaaatctgtttctttattgataattgaatagaaaagattacattgaaatagaattttttatttagggcacaatgcccaacaaggaagcataatagttttatgattataatttgaatgcattggcttataatccataagggtggtagtatgattccaacttggaccgttgcctgaccagattgacttataaattgacaagtctatcctatagaatggacacctagtacaatatagagattcaaaacaacgtggtcaaggctagtaatggttggagagattggaatcctagttgtccctgtaaccaaagtggaagccactagagggcttctggcgagtgtgatgattattttccacaagatttgctaggtgggagcaaaagtttgcagaaataaaagaaaaaattaatagacaaggtgagcaaatccagttgttatggcagcataattcttttgatgcacctctttctttggtgcttgttgttcctacttcagtggttctagcaggatggtgtaatgataataactagatcgaatcaccatgcaacaagtctcaaaagaagtaggctcaagaataccagtggggtagccttgaaggcccctatacttttctgaaatgtctaagtgttgggttttgtgccctaaataaaacccacttcaatataatcagattta

SEQ ID NO: 104546 - DNA, 1067 bp, Cannabis sativa
  modified_base (1034)..(1041): a, c, t, g, unknown or other
gggagtgatatttggtcttataggttgagcttggatactagttggtattggaggaagctttgtaggcttcgaacaactttttccaaatttgaaattgttgttgcaggtggagaaaagtttaatgtgagcaggttgtaccgaagcatgctgcaccaggatgctttctcggctgctggtgcaatttggagcaaattaaatgtgccaaatgctttccatctttggcaagctgctcaatccaagcttttgacaagggatatgttgtgccgtttgaacatccctatcccaaacaaaagttgtgtggtttgtgacattgaaaccgagaaccaccaccacctctttttcagctgcatcttttcccaacaggtgttgtctttgctatttaattggctagggtttgatggtttgtcagggaactttgatagctggactgtttggttgggcaatacaaggccgaacatcttggatagtgtgagaacacttatattggcagttgtggtttaccacttatggagcaaccgaaacacttgcttattttctttttattctaactctatcatttgtatagtgaacaaaattaaaagtgatgtgaaatataggctaagattgatatgtaattagtaggctttgcggttgttcttctcctttgagaagattaatttgtatgttttggcgagttgattaatgaagttttcttcttcttcttgatataaaaaaaatatttacctgaatagagattttaataaaaaaaagagaaaaagataaagaaaaaaaattgagagagtaaatgaaatttttcttagtaatttatttcaatggaatgctctatatttataaatatgtgagtagttgtagtctcctaaattagaaaattaatacaaggaggagtagtaattacaattgatgtaaaaaaatttaaatgaatgagacatctatatggaggagactttaatggttacatcatggctacatttatttttagtcattacattactattgaatggttgtgattcttggaaatattttaccaggatctnnnnnnnntaccatgtatgtttcattaacatcct

SEQ ID NO: 104547 - DNA, 626 bp, Cannabis sativa
acattgtacgcaatatcaggacacgtacatacctgaagatacattagactccctacagttgatgcatagggaatcttttttatttcctcaatttcaaggctgcttttgcggcattgatcactaagactgaatttgtctcctttagcaacacgggtatggtctacactcttgcatgccaaaccttttgagtactttattgatatagctctttggtgataatcaagaataccccgagaacgatctcgacgtatttcatgaattcctaaaacaaaagaggcgtcaccaaggtctttcatctcaaattgcttagataaaaatctcttagattcgtgcaataagcatctatatcattagtggcaagcaatatgtcatcgacatatagaaccatgcatacctgtaaatcaatattttttcaaggaaaattattgctattatgtatagttagtttacaataatagagtaaataagtgagtgaataccaaatcaaaaaattatcacctcatcaaactttagagcatgctttaccaagccaataacaaccttattagcattactgaccgtgacataaaaaataacaatgtaaattaaaaatttaatttggcaagcaaaacaaatttgatgtggca

SEQ ID NO: 104548 - DNA, 513 bp, Cannabis sativa
tgaataccaatatgcactttcaacgaccaaaaaattaaacttaagcaactaaaatttagtcatgaaaaggttaatatttagtgactaaataatttagttggcaataataaataaataataatataaattaagcattcagtgaccaacatttagtcttaaaaactaatttataatttttttaatttagagtttatattcaataaattatatatcaaaaacaaattatagtcaaagctatatttaaatattattaaacacatgtattcttgatttgtcaaaaaatattacaattacaatgaaatccttgcttgaattgcactttgtcaatgttgaattacacaaattctaaaccagaaactataatagcagactccaccaattaaagttgtcaataaggaaaacagaaaaagccacaagagagaaagaatgagaagccctcttatttggctccaaccaagaagctaaaagcacacacccttccaacttttggagctgtaaagcccgcttagttaa

SEQ ID NO: 104549 - DNA, 641 bp, Cannabis sativa
gatggcttgatgaatcctgcctcccacatctgcgttagctgcctcttcaactccttaagttctgggggagacaatcggtatgctgctttagctagggcctttgcacccggcataagctctatttggtgatcaactctcctcctgggaggcagtctttttgggagttcttccggcatcacatcttttaattcatctaacacctgctcaattacaggtagagtagactcctccactttttgtatcgtacacgacgggagcaatgacaaatattgccctctttttcttcaggcccctcttcagttgcagggctgatagtagcttgacttctgggggctctctcactttagcgggaaccactgaaggattctcacccatgatcagtagattccctgttgctggaattggaatgacccccttctctgctagaatctccattcccaataccacatcgaagtcatccatgcgaacagctacaagatcaagttgccctcccatccgtcgatcttgccattcactttcctgaccactccaatcgtcgccacggccttcgaattgactgctttcatgtggcacgcatctttctccagttttaggcccaccctcttggctttgattttggaaatgaagttgtgtgttgcgcc

SEQ ID NO: 104550 - DNA, 901 bp, Cannabis sativa
  modified_base (697)..(703): a, c, t, g, unknown or other
aactgagaagacagcaacaggacagactccattcttgctagcatttggctcggaggcaatcactactacaatgttggcctttagaggctgttttttcacccatatttatgaaaaaggaagctaaagggtgtgaaaataccggctttgtttgaaattgacatttagagacagtttttagataaaaaccataggtataaaattgcattataccatttagaggcggttggaaaataaagcaggctgggttttaagggtaacccctatggcgtcggttcctatattagaactgacagcatagggtacacgaaaatttgacgcgtgtaccctatgccgtcggttcttacataagaaccaacgccgtcgggttttctttttataagaaaaccctcgcgtctgatcatttcctcatcttcctcactcaaacaaacaacagcccaaccaaaccagagagctcgaaaccctcgccgaccaccgcctcccccagccttttctccctcatttctcaaccatttgagcccatttttttaaaaaaatcttccattttcgatacttaatcatatacccctaaaaagttttcattttttaccctctttgagagtcatccgaacccaaataaaaaattttgggtttaaaattcggccaccatttttggttgagaaaacattgaatctcaacctcctttaaggtataaatatannnnnnnttcatttttataatgtacattgttttaattttggtttttgtaaattattttttgggttttttcattttattagtaatatttttgtgttgtatgtgtatatatagtgcccgaattttttacgaaatcgctcgtcggattgcggttattaggtaaaaatttaaacctcaatgtatagtatatatatgtatttgtatattt

SEQ ID NO: 104551 - DNA, 554 bp, Cannabis sativa
aactcagtcaatttaattaaccgagctgcctacataccttctttgtgaaggatcaagccacttgtagttcagaatgcggtattttagaatttgaataaagaatttcggtatatggccactttcaagaattctttgctcttttgaaaatttggaaaaaattcctaggtgtatgaccttttatggaattttgagagttgtgttttataccatttttgtggtattagtgactgcacttagtcttagcaactaagttgcctacgtatccttttataggaatcaagtcaaacgttgttccaagagtattaaaagattttgtatcttcgataactttgtagagaattaacttactttgatattttgaggtaaatgacctcatttgggatttttgaggtagatgacctcatttgaattttgttgaggtgaatgacctctttgtgaattttagaaattgggattgtacctaatcttagcaattaggttacctacgtatccttttgaaaggaatcaaatcgaacgtagttcatagcatattttgtgatgctttgataattaag

SEQ ID NO: 104552 - DNA, 1607 bp, Cannabis sativa
aatacccccatcaccttgaaaaacacctttcctttattaatagttgtcgccagagttagcaagactgaaaaaatatcacaacaccaaaccaaaaaaaacagttatattagaatgacaatcttcaaaataaaatctaaaatacaaacttaaaatttaacacacaacccaaatcactagctcaaaattacttaaaaactaaaaaaacaaacaaaatttcaagaataactagccaaagggtaatacctttggctagtaacaacaaactaacacccttataaaattgctaaaaatcaataacaaacagattatatttaaaattaaaacttatcgacaaattctctgtaaatataggcccgccacaaaacaacctacaaaataacaaaaataaaacttcgttaccaaataatataataaaaaagagtatgcgaaagaaatgatggtatactaatccatattaaaattaagaacttaaaaaagaattaaaatacttatctgataaagtaagaaggttgttgaagtagaaaacgagagcacaaaatggatcaaatatcttgtccatcatatcacaaacctatcttaaacaagtaggaacaagccataaaatgtcacaaaaaccataaaaggtacaaaaactataaaaaacatcaaaacatcaaaaaattaaatgagcgaaatagtgggttattatttataatacaagctgattatgtaataattattaacaattaaaaattaattatctaaactaaataatataataaataataaaatttattataaattaatacaaaataaaataaaatgaaagacaataaattaatatgataatgtatattattaaaaagttaatgagtaaaacacctaataaattaaaaagtcaataaatattaataaacgtcaatcacaaaatttgtgatttcaaaacattaatgaaaattttaaaattaaaaggaaagtcaaaaatatttaattgataaaagctacaaaagaggaaagaataaacaaaaaaaataaatacttttaaatgtaaataaaatgctttttttttttaaataaaataaaatgctcttaaactttttatataaggtataaactacataataaataataaaatacaaataacagaaaagtaaataaaacactaaaaacaatctgtaaaattaatttaaatcttaatttaattatataaacattaattaaaattaatacttatccgtgaaacttggcttgaccgatctccaattttgccctcatctcccgttgtctccgtcagtcattgccgatctcacgagacagctaagtaaatctcagtcatataagctcacgtgaactcctcctcttcagccaactccgccaccgccaccgccaccgccacgaccatctcggatcccgccgttgcacgactctgcccaaagcaatcatgtccttgatttcgtcatctccagtcgaaaactccgtaatctccatatagctcttcaagttttgatggctcagccatcgtctccgtccttctccataaatttaaaagcttcttccaacactccactgccgctgcacaataggctcatcgtgcaaccaaggactcgctcgaactcgttgtactcaaa

SEQ ID NO: 104553 - DNA, 1864 bp, Cannabis sativa
  modified_base (1804)..(1807): a, c, t, g, unknown or other
tcataatagggtgagttccttgaaaccctcccactacgaaagggtactgtgactttctgtctaagaacactaagtggtattatcctcatcgactgtatcaagactacagaggcagtgggatcatcttctatagaataagatgatagaacatttttggaatcaaaacaaatatcccctctactttgctacttttttttagatttagtcatattcttagaatagtatttgttgaaacaaatactttttttttcttaatgactataggatgggccatccctaatcacttagaatagctatcaaacatgctaaccttagttaatagttctagcttttcttaaagtcatgatcaggacatccatgaatatagtaatgatttacactaagtacacaaccattccatcattctgaaaattttcctatcactagggtatatccctagaaggacttaggcaaatgctagtaactaatcatagactttcactttcatcaatatgcaaactgaatttctagagaggtaagtttggatataatttgaagttcaacttaatgatctttgaactgcatatccaccaaatgggttttcaccattgtaggaaattcaagaaatttctcaaatatttcaaatttctgtgcataaggtaaaatctagagtgattgtcatatgaatttaacgagagctgatgtccacccctgaatgtacatccatatgtcaaatacagatgatcctactttcaagtggatataggtatatattctctttacaaagaatcatcttatcaaaaccactatgaataagatacaaatgccatagatatattagttatagtaaagagtgcatagaattaaataagtggatatggtcaaagaatacaaaactcatgttccatacataaacatacagtttggatccattgacagaaagtggatattaaacaacttgggaaagttatactgaatgttcaatgcattcttcgaaactgaaataattttttttatttagaatctaaaatttaaagtccaagacttgaatttataccaaatatacatgagtcattattctttcttggaccaccactactagtctaactctaagtttaaattgccttaagtaagcacatacaagtaggagagtttaagatcgaggatttatatcatttcgggatagaatgtcgacaatatagtcatctgcgccattcaatttcatggaagaaaataaaatgacatcaaaagtaaaggatttataaaccatttatccaatcagatactatctaagaaaatcctaaatgaaaaagctaagaggaaaaactgaaggataatttcgactaaaataagaatccaatgatgtcccagtaggtgggagtcaaagtaatcttatttcatgaatttctgcattgtttcatattgtaaatactagtctaaattgtcatctctagatgtataactagatgttacatttacatatatttatctgtcaagatctaacacatttttatttgtctaacgaatgacagtcctttggaatttgtcccattgaaaataacaaactaagttagactaacaatgaagattcaaaattcatactacaatattaataacggataacaacatgcttcaatataaattcatacatattcagatttagcaagtaacaaagatatgtcaaaattaaaaaactatcatatcttaaataattttcaaggtttccaacaaactgatacagtgtccaagtaggcaagagtcaaagatatcattcattgaatacagtagtcaactcaccattcttgcaaccttttattcgatcaannnnagaatccaacgttgtctcgataggcgagagtcaaggtcattcttattttatgagctt

SEQ ID NO: 104554 - DNA, 3383 bp, Cannabis sativa
acttcttacaagctttctaataatatatagaatgttcaaatcgaacattggaataaaaaattatggccaaaattcaaaatctagtcatcctcgaaatggccaattggaagcctagatgttacaaactagaatttttgtttggaaactagaagaaactcgatttttcctaatctctcattcccaaaacttatacaaacatcactagacaatccaaaataattccccatagatttttacattcaaaacagtagctaatacttcaatatatctaataaacaccaatttcaaaatttaaattccaaagtgatgcaaattaagttaacgtttctaaaaaaaattccagagtaattaactccaaactctcaaaaataaccatggtattacatctcaaaataattttaaggaaccaccataacttattccataaaaacttaaaccaaaatgaattctctcaaaatacccaattagaagttctaagagaaccataaaagtacttaccaccactccctatgcaagcttaggaataacttctgttgattatggttacaagttttgtcttttatgaagctatgttactctggaaagaagttactgaatgtttgttactcattcgaaagttttgttaataaagttgtggtcaatccagatggttcttttgtgaagcttggcttccataatgtagtgtcttctggatagcttgtcattaattcaaaaatgcatttctggatatctaactgtcaatcaagaatgttcatccgagaggagtgcctgtacgtttccggatagcttgtccatattgaagcttccagattttttgtactgaaagcatgttatcaaagatgacgtggattattgttaatcgtaatgagctaaaacatttaatatggtgtaaatgtaccatgatagtttcggagctaatttaggaaataatgcaacacaacgtttacatttaccaagaagacctcctcgactatgctaccaaccgaggggatgaggtagacctctttcgttgtaataacgaccaaaggagagtggaagacctccttcactgtcaagacacccaaggggacgaagaaaggcctcttccattgtgaatacaacacaagggacgacgaagacctctaaagaccaaggacaaagtgaagactatacctacaatcactctaaggtgcacccaagatgggaaaaacatcatccccatcttgggtatgttaatttgggagttggttacatcctcaattgaccaaagaacggccatgactgctacaacacatcatttatagtcgccaagaaaacctcttctactgtgaagctaaggagatgatgaagacctcttctgttgtaaagttgaggagatgatgaagacctcctctactataaaggcgaggagatgatgaaggcctccttcgctgtaaagctgagggaatgatgaaggcctttgacgctacaaagtcgaggggatgatgaaggcttttgacactgtaaagctaagaagttgatgaaggcctcctttgctatcaaaccgaggagatgaacaagactgccttcattaaaacatatctgagagaatgctaaagaacttcaaggctacaaccaaagagaagacaaagactacaccatattcaaataaacacaaggtgtgacaagagagtcaatgctaagacaatagccaaagatcagcacaaatgttgacattccaatgctggcatgatttcacattatctcaaattaaggggaaacactcaaggagtcatctaaattttaagttgaaaaggaaaagataaatgataagaaatatgatcatctttcctcttctccttttatatttaacatttcaaattccactattcgacatagaatggggatttgaaatcctactctcaataagaatgcttgaagaataaaaataattgtctaagattttcaaaattgatgtccacttagtagtttcgagagaaatagacttagttcacatcattaagtcaacctcacacacatgtaaagttgacttgggggtaaatatttacaccaaaagtatccctgatgatgtggatattaatatttgacacgtggcaagaaagatgaaatcttgaggttgagtagtcccgtgtcttaacaagtctgcctaggaggggtccctagccttgtgcccaggttaactttgggaaccttgggatagaagttcagactttgataactcattttcaatttaatatattttagtattttgtttcatgaagacatggagcaattaaatccaggccccaggagctaaatttacacaacttgcaccccaaaagccagcctgggcacctagggtttcagtttttaggaccatcttagtgaaaatgggttaaaatttgcattgggatatgaattagacatattacaaacatgtttgaggcattagaatcagatatagagtaagttcaatttttagcacctgaagcacctgatgcccgagcacccagagcccaagttgataatttattaatttgggaactttccaagtatcaaatagatgagccaacttttgcatcatcttcatcctcatcgaaaatggggaaataggtactttcatggaagaaacaacacttcttgggagctagaagcaaggcccggcgcccaagttgacaatttgtgactgtaggccgatttcgataaatttttctgagaaatcttccaaatattctctctagttttagaaaatattaagattcaactattttttggggctaaacagaactttcgaatggccataactgggacccaatgcgtaggttgacatattgtcaatttgggttgtttctaatcaagttcttgaaaagtatttcaggtattttttttccatcagaaataattaagattcaagaaaatttgaggaaaaaaccacaaacttgagcccctagaaataggactcagtgcctaggttgagctgatgttggccacagcaccaggttgacaatcaacctggggtgttgtttttgattgctcaaatgccaaatctgattcgactaatgaatttggaatggtaaaaaatagggtaagaaatctcgtcctcaagttcaagaaccttagaagtataaaaacgagatcttgcaaagaatgagtatccaacgcccaggttaacaaatggcatggtgcgttgggttctttttattcgattctgattccgctttgatcgtctgtctagttttccataataactaagatccatgaagctagagaagtcaaattcacatgttttgtcttctcattttgaacatgagaaactcactcagaaataaagagtttcaagtctctcattttcgcagaatagtaacatctataagaactggtgaccagctttgccaaaacacagaaacaaactaagtgatgtcaaa

SEQ ID NO: 104555 - DNA, 2500 bp, Cannabis sativa
  modified_base (1498)..(1514): a, c, t, g, unknown or other
  modified_base (2191)..(2220): a, c, t, g, unknown or other
gaaatacatgacctataccgtaggtatcttaggggttaggtggatataatcttttatcccttcttgattgatgtgatccctcataaagtagccgtcactaacctcattaattacagcgtaatagctgcaacagaggggttacgctgtcagtcatattgtttatggtggttccaatacgttttcccccatgcggcattaaatgcgaggtgattgctcaatagggttcagtacctcccggagctgccttaatacggccctggcctccgggagcatagaggtcattctcatatcttctccgggagccatcttcccagagacactcttttgttgttcaagacttggatgatttccttaggagctgagcctcccagctccacgtgtcgtctttataccagtccatgtattttgggcacaattaagagtaacagaaataaataagaaaatttagaaaataaaaaaggtgaataagaaaactcatgtgtaatgtcacatgactgattttttttcttcattacttcgtatattattatgtatgttacattattttataatcaatttataggtggtaattattttagaatattataagtcttattaagtttgatttcttttaataatttttttttaatttagtatacatggtaattattttagaatactataagtctttgatttgatttcttttgattaggaggtattaatttagtgttagttattagttacatactcatttttttttaaaagaaattagaaaaacagaaaataggtattaaaaaaagtaagaagattaagcatgtcacacaattctttaaaaccttcatttatatatattgatgattgatattgatgtttaaataatttattattattatattttttttattattagattagataaataataaaattgtgaaccaataacaacatagacatgataaatttaaaaaagtaatggctatcaagtaataataatatgtgcacatatcttttacacgaaattttataatatttgagcaagattattatttttttaaaacgtaaatttgagcaagattattatatacaaacagaagacaaaatgggttcaaaaattagtaatttattcaaaataataaactttaaaaaataaaaaaaattgagagatattttatatcacctattaaaattgaaaacttattaattctttttttatatgcatgactaagaatttttttatgttattcacatctttttagcataattaattgagaacaattgcatcttaatttaaccttatacataatgtaaaatgctgttagtgaatatattgtaattcaaaatcaaatggaaaatgtacattgatttttttttttaaaaaagtattgcttatattattttttctttcacaaatgcacttatatatatttaattataaatcaacgtaatcatatgttaataaaaattattattgagatgctataagatttttttttgaatgaaattattattattattattnnnnnnnnnnnnnnnnntattattattattattatggtagatgacaaataataaattaaaatcaataagaaaataaataagatgaaatacataaatttttagactatcacttaatcgagaaagtaaataatagagaatgtaaaaagattaagatgctacctaaaattataagtacattgggataatattaagatatttaagtgggtaatatataaaaaaaatacataaataaaataaaataaaataaatagaatacatataattttgataatatttacaaaatgtaaatatgtgtacgaaccaaccaagtaaaaaataaatgatcacaagccattccaacttgattaatcaactaaaacataagatatatagaaacatataatagtacatgccaaaatttctttagtttcataggaataattttttacataaacaaacttgatcgagttagttacaattggtgatgaaagagacgacatctagtagaggcaagaggtggaaaacagagttgagaaacatatcatgccttgagagtataaacttcttcaataataaaatatatgtctacatggttggccaaaaatatttgttgatgctcaaataatatggcaatagctagtatatataacatagatagttgttacatattaaatatgagaatatgaggagaatgtgataataataataataatannnnnnnnnnnnnnnnnnnnnnnnnnnnnnataataataataatagatatttaatttaatataggagttataaaatgaaaagacatattatcatttttatttcaattaatataaaaataaattttattatataattattataaatgttaaataaaaaaaataataaaaataaaaaattagaaattagaaaaagtagaacattagaagaagagaatgccacatcatctcttcaaaaccctcctttatatatacaagttagaagttacgtgcacgtaaatattaattttatttaaatttagttttttttttt

SEQ ID NO: 104556 - DNA, 611 bp, Cannabis sativa
agaagcttatggtataggaaagcctaaatgaccatttcaactacctttacctaagcctaacattacaagcctagaaagacattctgattcttagtggtgcatgaatgtatattagtggagaatagtaagtattgcaagcatatggaatttgggttagtggattgatgatagtaattggcatgcataaagtggtttaattgttagttaattgcattctatggttttatgagctaactcaaaataaattgaaatctgtcaagggtgtgattgaactgaaattctggattatatgcacaagtgaaatttttcatcatcatgttattgaagctacttaaaaattactcatgttttgggatattgacttatttaatgtttagttagtactttactcgaggacgagtaaaagcttagtttgggggaattttgttaggttatttttagtattaaaattaggttaattttagcacatttttctttttagtttaaatcatgtttggagaatttttacgtttttatcttttaattttgcagatttaaaatagatgaagagttgggaaatatcaacagaaaaaaaggataaaatatcgcataaaaatatcccagtggaaaat

SEQ ID NO: 104557 - DNA, 597 bp, Cannabis sativa
gagctcaactgctctcagttgagccattttttgaaattttgattaataattataaatctcaaccatatatagtcgagctccatgtttttcagtcacgccctatacttttaatctttactaatatcaatcacttatagtagagctcaactaacgtcagttgagccatttcctgaaattatattttataattataaatctcaaccataaattgtcgagctcaactattgtcagtagagccctttgttcaaagtctgataaatatataaaaatctcaacgacatatggtgaagttaactcaaaccaatcgagttctaattaaagcaaacacacgaaaatactaaaatattcaaatacattgatataaattaattaaccatagtaatttgaaataagcatatccataaaaaaaattaaaatttagaagttgtggctcttagggggcatgtcttcttggagagaccagactttccacataatccacacctttgaatccattttttgtcatttccaattgatgggattctattcatttttcttctaccacgcttgattgggacatttggaggaatcacctcatctttattcttgaattcttga

SEQ ID NO: 104558 - DNA, 675 bp, Cannabis sativa
  modified_base (72)..(78): a, c, t, g, unknown or other
  modified_base (172)..(182): a, c, t, g, unknown or other
aatttgataacttgtccaatgggtggatcggatgttgggattttatctcttaaataaaacttatttcaatannnnnnnatttactaattaataaaaaatcagaaattctttcatgattatatgtgtaatgtataaattctattaaacccagaacatatagttattcatgatnnnnnnnnnnncaacacagtggaatataatcatgattatatgttttaaagtttatgtcccatgatttgtcagtacactggatttacactaaataatagttagcgataaagattacttacaccttggataagggttatgtcattttcaaggcattggcaaagtatgctagtatcggatataaggagtatacatcggaccagaccgatattgacattgaataagatatcataaacttaccgttatatctatctaagtcaatatcacctagttgatcttaggttaatagatcttaatcttgagatgtttagtttaatctcaactgtgttatttatgttcttagagttgttcgttaaaactgaccaattagatcggcccaatactcacatcttactaacatgatagtataattgagtgggagcgctaatcatagacatggaatctatagcttctataaatgcatagaagtgaaatgatgatttcctttgagcttgacttaatagagat

SEQ ID NO: 104559 - DNA, 532 bp, Cannabis sativa
aagggaactcgccgcctgaccatcacctttgtcaggaagactttcgacacaggtcctaacaccgatctccatcttgtactgccgtaatcattaatgggacatgccacttgactacaaacatatcagatagacttttgatacacggcacaatctttaatggaggggtcatcacattgagggcctctctcacacatcgtaaatgcagcctactgtcccaacgctcttaaacctttggctctgcatacaacttgttgggccccattcttctaccttgttgggtcgctatctcatcttgacttccacattagtatgatattatccgctttgggcctaagccctcacaattttattttttggcaccttcccaaaaggtctcatactaatagtgaaggtagaacacatatatccaagacaactatttcatattcttccaatgtcgaatttggattgataccccaataattactatcatataaaataataaatcacataatatacaccactatgcgcacccatgaatagttttcataca

SEQ ID NO: 104560 - DNA, 509 bp, Cannabis sativa
  modified_base (435)..(436): a, c, t, g, unknown or other
attatttgtaatgacatatatatcttgtattatctttgaattcaaagtccaattttaatattttaagggtatttgtaataatatataaggtgatacatttaatgacacatgtaccctttaaattaacattgtattatttgtaatatatatatatatatatatatcctatattaccttagaattcaaagttcaattttaatatttttagggtatttgtaatgatatatattggcattgaaaagtctaaaatgaaaataaaaagttgtttttgtacaagtttattattatatgatatttttttctcaatttttgtcttagtatccactatatcatattttttctcttaatatgttacaatattattattacatcgcatatattatatgaacaattatattgctttgcttttatttttttcctttctctttttgtgtnnttatgtattataaaggattggaaattataattttttttttttaaattgaaaaatataacttgctcattatttt

SEQ ID NO: 104561 - DNA, 553 bp, Cannabis sativa
  modified_base (373)..(378): a, c, t, g, unknown or other
aaacataattgaaaacatatccattcaataataaaatattgaaacataaaatgtagttcataactttatttagaaaattataaataatcataatttctacaaaaaagcagaaaagaaaactcccactaaccaaaagatcaaaagattctaaaatgcacatattaataacatatttattaaacaacacgacacttaaccctttggttagaggatctactaacatcgactcggtcttacaattttcaataaaaatgtctcctttcttgaccaagtctctggcagtgagatactttatttccatatgtttagaaacactacaaatcttgttattcttcgaaaagaaaacatcagcattattatcacaatagattannnnnngtgtggaaaaagaatcaaccactccataatagaaccctcatcatcttcgatatcaggagcaatatattcatcaacgatagaagcattaccaactggagtaggattaagactactattatcatctcttgaaaatgacataggaataaaaattcctttagatgactcccccatttca

SEQ ID NO: 104562 - DNA, 680 bp, Cannabis sativa
aacaacttaaatttgaataattatcaaaatatattttatttaatttttatatatatgtatatatttcaaaattgtatttttttttatttaaatggagaaatgaattttgaaaattagatcaaagttgaaaattaattatttttcattaattttggaccaacttaaatcaataattttttcatttaacgattaattaaaataaatgaactaaaatatattattattaaaaaatgaattagttagtcaatgaaagtctagatagttattgtctgtttgcttgaagtatttatctagtgatatttaattaaatagaaaattgatatttaagttgatttttatcatgatacttaagtctttgataatttttcttaatatttaattaaataggaaaattatatttgtcctgaaaattaattttttaattaattttggaccaacatcaattggaatattttttcaggatttattttattttatagcattttcgaaaatagtatttattttaaatacattattttttttttgaattttgcattatatatttatagaaaattaaatttaagttgaaaattttagaataattttggatcaacttaaattgaataattttgtaatatttattggaaaattaatactaaggatggaaaatagtttatttttatttttccacatcttcctta

SEQ ID NO: 104563 - DNA, 794 bp, Cannabis sativa
atgataatccgttaattttttttttttctgttgcggagctgatttagtaccataaaactaacaatacattcttatgtaataaatatatagtaatacatggaagataatactcaccatataataaggacatatcgccatgattcatatgtttgttatgtaataaggataatcgtcggtttttaagtagtaaattaatttaaatattgatcaaggtggaaattgttagaataatttttatatggtaacaaattaaatatttgatttgatttgatttataaaacataattaattatttaatagttaattaaaattttctaattatggttagatttaattaccaaatatttcagttacctgattaatttctagaattaattatcaaaatattctaacaattattgtggcacaaactttaatggaatatctcacctatatataaatgtagggtctcagtccccgagctcactacttattttgtggaacatagtgaatctatttaaagagaatagagagagtttggaagcctaataacccacactaatcagcttccttttcttttatagattcaaagctcgtgtgtgattaaggctcaagaaattaataactggaggtatttcgattatttaattatatcgtatatatttatatatgtttgattaattctgttagataatactcctcttcgagacaggacaaatctccgaaatgcactcttcgagtcagtgccaaactccaattgaaccaaagttctattttctcattccatatcccacaatagctacacaattacatat

SEQ ID NO: 104564 - DNA, 574 bp, Cannabis sativa
  modified_base (236)..(249): a, c, t, g, unknown or other
  modified_base (406)..(407): a, c, t, g, unknown or other
  modified_base (455)..(458): a, c, t, g, unknown or other
aaattataaagcatttagcaaataacaaagacatttaaaaatacaaaagaaacacatcttaaataatttccatggtttctaacaaactgatatagtgtcctagtaggcgagagtgaaagtaatcatttattgaatagagttgtcagtgcatctaaaatgaacaccattctagcaaccatttattcggtcaaaataagaatccaacgttgtttcggtaggcgagagtcaaggttatnnnnnnnnnnnnnncttctaccattgtttcatacttcgtaaatttatctctaagtagtcattataggggagagtctaatagagacaaaaacttacaaaatacttatcataagagatctttaaggtgttaaatgcttcaacgaataaccatccataagggggacgaagtctnncgtctcgaggttatattgaaaatagttaaccatgtaggaccaacaatnnnnatcgaatatccttataactaaaggtcattattttaaagaattgtatttttgtttgatacttattataatctatattttaatatatatttatttaattaaaattactaatttagata

SEQ ID NO: 104565 - DNA, 556 bp, Cannabis sativa
gttgtgtagcagtaagagttttgactgtatttggctgccacgatttgcttccaataccaacttccatgacttagaacttggtatccccaccattcttcttctttgaggtatgtatcaatttgacccagaggttgtcttctttgtttgctaatgcccatacgtatttaaagagagctgttgattgacaaacattagtccaagctattaaaccagccccttgcatcatgtgttgccctttccaaaggaatgctctgcatatagcttcaatctcatgcacaacctgttttggtaacttgagtatctgacaccagtatgcatagattgttgaaagaacatagtttatgaggactgctctactagcaaaagaaatattcttagtgctccaagattgacttctagttgtcattttttctattaagaccgaacactcctgtttttatattttcttagcacaaatagggacaccaaggtatctaaaaggagtgtgaaagtgctactagtagattttattgattcaagttaccaagttgtacatctttaaattgatcgatttcaa

SEQ ID NO: 104566 - DNA, 697 bp, Cannabis sativa
accatcaccaccattacaccaccaacattacaccaccatccaagctattagcagaattgctaatcttcataatctctagcccattaagaatagcatctctaatttcggaatgggaattcgaattacaaaccaagctggagcaaaatttttaaaatcagaaaaaataactggtgcttcctttttttctttttttctttttttttcccctttttcttctttttctttctttttcgttgttcactcagcctcagaccagatctaccaccatcgttcttcgcacgacaccaccaccacctccttcccaaatctccctcgaacataccacgccgatcgacgttgagccgagagtagtgagggagaaagagacagatctaaggagaggggtgcagagagagtgggtcggggtttttgggtcttcgttgggttcatgcgatggtggtgctaggttgagatggtggtactgggctgcgatggtggtgagttgccatgggtggtagtggtggtcaggtctgcagatgaaaaaacagagagagagagagagagagagaagactggtgacgagtcggagaacggctgaagaagaagaggatggtttggcctgggggtggtcggagaacggctgaagaagaagagaaaaagatagaggaagaagaagaagaagaagaagggcggaagagaaaaggagaattagggtttt

SEQ ID NO: 104567 - DNA, 1138 bp, Cannabis sativa
taaaattattttatataaaatatttacataatttttattttaaaatatatataataatattataaaattaataaagaatattctgttaactacttagatattctgataaagttaacataaaaaaactaccgttaaactaagaattttgttacatagccacattttaatatagaataaatatatatatatatatatctaaattgtgtgtatattttaattataaatcaaaagagaaaaacaattagtttgagacgagtttagatatcatgtaggcatgtgtaactggcttgtttagctatactgttattgtttattggtacaattaaacgtcgaatgtcatatgattaaatataatagtttttataaactataactaactattaagaccagaggcggaggtactttaaggggtggtgtgaccatagcccccaaaatatcatgaaatgtataatatatgtagtgtagctaaattatataaatttacatataaatgtataattatttgcagtgtaatataagtatttacatatttaagaaaataaagttataagtaaaaacatatttaaattttatttttggcactataatttggaaatttttaaaatttatcagtgattttaaataataaaatggtacacaatcataaaaataaaatgcactaaaatattctgttagatctcgaacataacgacacttttataaagtgtactttacatgaatatatatattacatggtaaaaaaaattattggataattctatatatagtaaatcccctagcataaaagtttctatccctatccatttttgtatttagaagaattttttagtctgatttttttataattgtctacgttgtagctatttagaatcacatgtaaatttttaaaaaattctaaataatttacagtgcttaaaataagattcaattatgttgttgatgcgtgtctattttttcttatacatgtggcaagcaacagttaaaactttattttcagcattgtaaattttttagattttttgttaaagcgtacgtgcttataaagaaataagctaaaaactttcgttgaatgaaacaaataaaatgtgtatcaaaataatcttttaacgaaatgcaatataaattttaattttttttt

SEQ ID NO: 104568 - DNA, 750 bp, Cannabis sativa
ttcaaacaatctacaatatctactttaatacttgtcccttactattctatctccaatataataataaaatatatattttgcaacttgtactataattataatatgatgtaaaaatgaaattatataaatttttgttatgattatttgtaaaataaaaattaaacaaattaaaatagagtaatttgtagtatggatacgtaaatttaatttacagttgtaaataaatacctaaatttataattttgaaacttttttatgtacctgtctgttaaatattaagtaaattgcctcgtggcaattcctgattggtccaagttattaaatttttatttaaaaaaaatagtttaaatacaccaataagaaaatgacacgttgataataaattaatatataatggtcaggtacctatagagttccagaaatataacttaggtattattaccggcaaaaatgaaatttaggtatttatttacaactaagagttaaagttatatatttatgtcacaaattactcattaaaatataaataacatgaaacaaagagagtgaagcacgtgcattgtgcacgtgctagaatcacctagataaaacgaattagtttcgtttgatatatatataaattaagttttaagatataacagtagtaaagaacgaacgacgaacgaaatcttcgttctccttccttcgagaaaatcttctcctcctatatccattttcttcgattgtcactccaaaacttagcgatataag

SEQ ID NO: 104569 - DNA, 505 bp, Cannabis sativa
gagcaggaagtaatgaaagagcaggctgcaaaggatgccgtcatggcatcaaaccctcctactagtggtaatgtcagtaagaggaccgacagtggcaaccccaagcacaagcggaaggctgaggctttcggagcatcagggggaaatagaaagtttcggggaaatagaggtagccgtcagggtcgcgggtcctcattccgatcatatcctgagtgtcctaaatgcaagaagcatcatcttggtgagtgctgagccaaggcatgtttccagtgtggcatggtgggccactttatcagagattgtccccaatccaagaaagaagagcctaagaagaatattgctcagaacccgggccaacttttcattgtaactcaggcagacgctgatgctagtccatcagttgtgacaagtcagttgtctgttaatgcttgttcgtatactgtgttatttgattcgggagctactcattcatatgtatcgagtagagtgatagaaagtttacata

SEQ ID NO: 104570 - DNA, 588 bp, Cannabis sativa
agcactaagggaactctcatggaaatagctttggaaattatcaagccttagggttttctagcaaagtgctttcttgatagaaaacttctcatctcttattctcaaatgagcacatagacctcctttatatagtgtttaggatatcaccatttaaaatttaaattcataaatcataacctccatggatgttatggactcaataaagagacgtaactcatgcacaccataactcctatagagttaagaatttcaaattaagatgtgtaacaccttttacactcttaatgttggtgataattgtgaaggttactcatagtaacaagtaactcccatatatgttacaaaataatcacaaataatataaattgccatatgttacatattattattttattacacatatttaatctatatattatattatttaataataatataacactaactaggattcttcttcatcttagacgagtggtctcctgtcttatttggtggtcctaggttgtgctctgatttggtggtctcttcctcgatcttgtttaatctgatccatgcgaactggcggtacaatggtctctgggtgggttc

SEQ ID NO: 104571 - DNA, 637 bp, Cannabis sativa
gactagggtgcacttctaggtctcagccccaattctgtgtcccgagtctggttccatgtttgggtctgagtttgggtcaaggttcggccgagtctaggtcttgattagaattcaggttcgggtcccagttcagatctaggtcttggtgggaaactgggtcctagtccggttacagtttcgggtctaggtccaagtcgaagtcctggttccggtcccgttcccaggtctcagtctacttccaatttttgttccaatttcaggtcacagggtgtggctttggatcaaggtttgggtttgggaatgagttcaagtccgggtccgggtttgcatcttggtctgggttcgggtttgggactgggtcccagatccagacaccgactaggtgttcggtccaagccccaggtcctgatccaaaccccgatcttgcgtgctggtctggttccatttttggtgtcgaccacgagctgggtcctaggttcatgtccgagtctcgggtgaagtcttgggtcccagtcctagttctgttgccccggccctgatacgaaccacaccaacttgtgatgaaacccgacaccaaatatggaacagccaccaagaacaaacgatgttggaatggaacctcgacccaatgcttagc

SEQ ID NO: 104572 - DNA, 1626 bp, Cannabis sativa
tctatatatatattattttatataaatttaattaatatgagcggcacaccatgcactcctcaatttaaaggagatcataaagagataccctacaatatattggaagacaaaaataaataaagtgataaatattataattaagggttcgttggggacttctatttgagtccaatactaattaatagattaacatcataacgagccacagtttgactacccattattgacttttcatttccccgcttatacataattttatgtttatttaggtaagtgattgaactgaaataaattatattgaggtaagatttgataattaaataaagttacattagaaaaataaaaaatactaacaacaatgacaataaacatttgtcttttttttttttaatggaaaatgtaattttcattaataaataaattcagtcactaaacaaggtaacaaatcaataggaagagactccatagtaaaaatacgatcagggtacaaaatagagactctagcaaagctacaagccactaaattagcagatcgtttaacaaaaataacctcaacggtacacaattcagcaagcaaatttttacagcttttaatgacttgaccaaacaacgaaatcatacaaatagaactacataatgcttgcacaaccccaaccatactcgaagaaaagatggttcggccctcaaccaaccaacctttatcatcttttgccaccatactcgaccaaatgatcgaccatcatcaaacaaagttgtatctacattaaccttaattctattaacaagtggaggggaccaatgctctgcaacatcatgcacctgatagtcaaaacatgatgagccaaggacagaattttgagcattattcctttgattaaggtagtttttaacaacccaacaatgtcatcaacacgagttgtctttcctttccaaacaacttcattgcgtgcactccaaatggcccaacacacaacagccacaagagatttattttctgtatttatcttgctgaaaaccgaattacaccagtcaaagaaagaggaaccttgtgcatttatagtaccaatccccaccctattccagcatgttttaatcacatggaaagtgactaataaacaatgtgttatagtctcatcttcagcacgacagagaggacagatggggcttacctccacatccttgcttcgaagttgaatcataattgttagacaacctaatgcagcgcgccacatcagattttaatcttgggaggcaactttaaattccaaagtttaccccagaaacttgagtcattaatatcataccatccccctttaagcttttggagtaaattatatgcactcttcacactgtaaagactcgaagtctccttagaccaaacataatgatcgtccatattattcacttgcaacggaatgaacatgatcaaatgcttgtctctgtcaacaaagaggtcgtcaattacctccacatcccaactagaaccatcatgtgtgagtaagttgcttattcactacaagaaaagcaatttttgccggcgcagttgactaattgcgccggcaaaagttgtcagcattaatgagatgctgaatttgggattggattcagctataccttttaccggcg

SEQ ID NO: 104573 - DNA, 1030 bp, Cannabis sativa
atatattagataaaaaaatagaaattgtttttgaaaatagaaaataatatttttatgttttctgttttctaattattaaaactcagttttcaaaaaactatttttcaaatatttggccaaacacccctactagtttttaaaaggaagttttctgcttttaaaaattgaaaatagtttttaagttatgaagtcaaacaatccctaactttttctattctctagacatatgtatagtgtagtggtaaagctaggtaatttgtcgagtatgacacaacaccaaaatagagttttgacattagttagcattattgattgacacaatttaactaagatttgatgtgcgtgcgtcactaaatcaacgatcaatagcatcaattaataatatgacgcaagacaaacgtatcactagacaaatggtgctattgattgatgctcatggctaaaaaagaaacccacatttaaaaagtccatcaatcattaaccctaaatgctcctttcaatctccctctttccattccaaaatttaggtctatatcaaggataaaagttctcgataaaagttaaaatgtcatcctaaaaagttctcattagagtctcttcattagaaataagtttctaccgaggaccaaaattacgttgtcagtaaaagctataccgaggaacgtagaaatgttctcagtggtaaccttgcaacccatttgactgatttataccgagaatatagttctcgttataaccttttattgagaacagttgctgttttatttttaatttttaataattcattttcatactaaatacattaaaatacatttattttttatattaatatttctcaaataatgataaaaatataatttattaataataataacatacatttgtattttttacatttttaagtttataagtttagttccctaagtactaaatatacaaataaaagaattcacgaaacaattagacactaaatataaacataactatcgacttggtctttattcatcaggatgatcagatttttaaggtg

SEQ ID NO: 104574 - DNA, 549 bp, Cannabis sativa
attattcttttttttttttttttatcaattatctatcaattattaaatactcaatgtgtctactatttatcatacatgaaaatctaatccatgcgacaataagaaaaaatttagtttataagtttaagaagttattgagtgaagattatttatactgcaaaatttgaaaattgtagcaactacatgtgagtacagacaattttcaagtgaatataaaactttatttttagttgcaactttagtgaagagactagaagaagaaatagtgaacatttcaatcaatgtgtttcaattcataactctaattttgactgattcacgtgttaatgataacacaatactcttaggtatttattcaattataattaacttttatttatatttaataaatttattcagttatttgtctatataatattctaacatctttttattatttttataatagatattattgtatgtttatatagtgtcaataacattaagattgttgaacatcattataaaaaaaaaagagacatcaaactgttgaaataattgtccaaatat

SEQ ID NO: 104575 - DNA, 625 bp, Cannabis sativa
atattaaaaaaacacataagaatcaaatgtaaaattaggacttaaaaggaacaatcacataatatctagctaagaaggttatacgtaatggggaagctcatctaactttctcgcactaaattaaacaagacatatatttcaacttctattgtcagaaatgcgagtcaagtgaccatttctgaaaatatacacataatacatttataatacataatacaataaccacaaacattatttgttgatcgttgaagttgatagatagacattgtattaaagagaatactgaaaagtgaaccttctgcattctctatgttataaaaatagtagacaatatgggaagttaatccagcttgagaggagttcgaacagaagggacagttccagaaaaattaagatttttccttttgtagttaaatttttcccttttaagaagataacatactctatttattggttgtatgtcctttgttaccagagttaaagacttggttcctattctattaattcggcagtggaacaaatcgacacctgcatctgataatcacacccattcaattctttagaaaatttgaaactcatcgacaaattcagtgacatggtaaaaaaactattccagacaaagcac

SEQ ID NO: 104576 - DNA, 754 bp, Cannabis sativa
gtaattttggtattgaaagctagagatttgttacaagatggatgcttagggtttttggcagtgttattggataccacatgacctgattcagttcggcctaaagacttcagggtggttcaagaatttctagatgtttttcttaatgaacttctgggtttaccaccgcaacaagaaatagattttgttattgatttagcacctggagcagaacagtttctaagataccatacagaatggctctggcagagcttaaagaattaaaaatttagcttcagaggatgcttgacctagggttttcacgaccaagtgggtcaccttggggagctcccgtattattttttaagaagaaagacagatccctatgcatgtgcattgactaccgagaactaaataaactgactatcaagaataagtatcctttacctaggatcgtcgacctgttcaataaacttcaggggaagacggtcttctctaagattgatctccgattaggctatcatcaattgagaatttgaaagactcaaaaaaaaaaaaaaacacaacaacaaattttacacaaagactcaacacacaagacaaatgagagattccatagaaattcagtttgccctagcgaacattgatgctctcagaaaaaatggaatggaaaaatgtgtttgctgtaactttatatgctgcccctttgacttttctcgttggataacattaatacctccccaaagtcacctaatcaataatttatacaagtatatcc

SEQ ID NO: 104577 - DNA, 514 bp, Cannabis sativa
aacttagtgaagtatgacgcctttatcagcctatcgaacaagtctgctgcatttggcaccggatacttgttctttactgtcactttgttcaaagccctatagtccacacacattcgcaacgatccatctgatttcttttgaaacaataccggagcaccatatggagctttagaaggtaccatgtatcctaattccaccatcctgttcaattgttttctgagctcttccaactccaaaggacccatcttatacggcgcctttgctggcggaacagctcccggtatcaactcaatcttgtgatcaatcgccctcctaggagggagttaattcggcaactcgtctggcatggtgtcggcaaactcctccaacaacccagccacttcatcgggtacttctacccactgatcttgtttaatctctatcaaggcagccacatatgctttatgcctttcttcttaatagagtttccaaattgggtcgctgattccagcacaacgcccttctctttattctg

SEQ ID NO: 104578 - DNA, 1128 bp, Cannabis sativa
aagtgttatgttctttccaggacattggcaaagtatgctagtatcatatgtattttattttattttactaatcattttaatatatatttcaaaatgcattatattaagtgcaaaaattttaaaattttgaaaaatatattaaagttgaaaattaattattttaattaattttacaccaacttacatcaagtaaacttttcataaatgattcattaaaataaatagactaaaatatgttatatttaattaaaaaataaataattaattaatgaaatagcaagatagttattttttctatacctgtggtatttttctagacatattcagttaaataaaaaattgatatttaagttaattttattcaagacacttaaatatttgatatttttctcaagaaaattaattaaataggaaaattatatttttgttgaaagttaatttattaattaattttagaccaatataaattagaataatttttaaggatttattttattttattttatataaatttcgaaaaatgtatttaatttttagatacattagattttgaatttagttatacatatatatatatatattaaaaagttaaatttgagttaaaaattaattttaattaattttgggccaacttaaattaagtaatttttataatatttactgagaattaatactaagattgaaaataattttatttattttcagatcaatctaagtataattttataaatattaaactaagatctatatttagagttatctaaattagtaattttaattatatatattaaaataaatattagatgaaaatacatactttaaaataatgagttttattataaggacatttgatctcaattgttggttctacatagttcgtgttttagtgagattcatccctaatagatgttcgtttattagaaatttaacatcgtagattctcaaaagataactgttgacctcgctttcagccaacgacaatgagtctaataataatcgataacgaatatgattaccctataataaaagcaaataaataaagaacacaaggtttttaaagaggttcggccccgttcagttcggtaataacctactcccctttatttgtatttgttgggttttatgccc

SEQ ID NO: 104579 - DNA, 715 bp, Cannabis sativa
  modified_base (137)..(140): a, c, t, g, unknown or other
  modified_base (482)..(483): a, c, t, g, unknown or other
  modified_base (561)..(567): a, c, t, g, unknown or other
ggtctaggtcggatttggagtctgggtcctcgtctgattacggttctggatctaggtccaatttcagttatgattccttgtccaagtcctagtttgagtcccagtcaacttccgatttttgttccaattttgggtcnnnnggtacgggttcgggtccactttcgggtttgggactgagttgaggtccgggtgtgggttcgggtccttgtcagggttcgggtctagaccagggtcccaaattcaaacaccgactacgggttttgtccaagctgtgggtacagatccagatcccaatctcgggtcccagtctggttccatttctggtgtcgggtcatgagctgggtgcttggttcaagttaaggtctgggtcgggtactaggtcccagtcctagttctttttcccaggtccctatcctaattctaggtccaggtcctggttattgtgtgggtttgggtgccggtctaagttcgggtttgagtcnnagtctcggttcgggtttaggtcttgtctcagttttgatctgggttcgggtttgggtttagatcctggtcttggtcctnnnnnnngttcggttctagttccatttgcaattttgagttctagttagggtttgagttctagtcgaagttcgagtcctggtctgagtttgggttcgggtccggatttcagtataggtctagatcaggctctgagtgtgggttcgcctcctgggtc

SEQ ID NO: 104580 - DNA, 964 bp, Cannabis sativa
aacgtgacttcaaaacatatccattgtgtgtgaatgtagtcagcaacacaacaacaaccaacaatccatcattcttcaaaatgagcatctgattagttgcacaaacaaatacaattgtaacaatggaagaaaatgcaccaccaacaaaagaatcaacaactcaacaacagataatgcaaggtacaatgctggaggatggtgaaacaatgttttacttcatgaactatgcaaaacttgtggcagaagaaatagttgagcagctagaaaacaaccaacacaaagaggcagaaatctcaaattatgatgaactactaatcacatatctgcaacatcttgaaatagaagaagcacaaatatacaatgacaaagaaaaactacgaagtgtgcttagtttcaatataattagaaacattctaatacaaggtcaaaaaatcttgcgcaagaacatacaaaatttgttgcttggattcaaaatgcaagtgagcactaatgacatctagaaatggaccaaccaagtctttcataatccgtaaatatgacaaaaaggtgatgcacacttgtgatctaaacataagatttgcgaataaaacataggctacaacaaagttgattggaaactacatcaagccaaggtttaccaacataaaaacaactcaaatgccacaagacatcataggagaaataaaatataagtatggcgtaaaaataaactatatgaaagcatagagaagcaaagagcacgcgcaagaagaattacgtagaaaagcaaaagaatcatacagcatgctgccaagttttttgcacgtgctatagaaaactaatccatgaacaatagtacacatgaaaactgaagaagataacaacttgatatgtacatgtgtatgcaactagatgcttcaataaaaggatggaacatgtgcaaacccataatcgttcttgatggaacttgttgggttttatgccc

SEQ ID NO: 104581 - DNA, 1724 bp, Cannabis sativa
  modified_base (1668)..(1668): a, c, t, g, unknown or other
ttgcagttgatgttgatctctgaaatttgaaatttgtgtcgtgctctatattctgctgtttatttccctccaaatttcctccccaaaaatattgaagtccacttcttttatagccaaaaaataataaaataagataaaaatggctgatgaaaaaaaaaactattctccttaagattagaaaacctattctgcttaggattagaagaggaggtgagttttctactgcgttgactgacagtattttggtcataactctctcgatattgcttagaattagaagattcaagatgttccggaaagataaaagatagatctagaactttcatgttttgaatttttctaaaatctaatcagaatatagccgaattcaagcttgaagtttcagctttattttcttgcacaattttctctatattaaatatcatctttttgtgagatatttttatcttttttcccatatttttcttttgatattttctaatcttcttctattctaaatctgcaagaataaaagatgaagcgtaaaaatactccaaacacgattaaactcaattaaaaatatactaaacttgatctaaaattaatactaaaaataacctaacaaggtatcaggtaccttttagcgatgttcgttctttataaggagataagctggcctcaacccactccttatgaagtcaaatactattttgatttggagtctacttcgcagcaacatcggtctgaatacttctattttaaccaagttggtcaccagtggctagatgattctaacgagcatgccaatgagtacttcgttgcttgagatgttaaagggatccgtcactgacgcttctaaagagtaccattcatcaagcgttctatccccacataacaaataagggatagagcgaatcacatcctttctctgtcagttgagaagaggaacattatctggttgaccagtgtagataatttccagttgtatggcttgcatcctcctactcctcgagctacaaagataatagctacagatgaggctgtccatgaagatgggcaaggccttgacttggatgatgatgatgtaccattgtctcgtattgttcaaaatttggagaggagagagagggctctctgtaggcgcctggcctgtgggggtcaagttggtgacgcctctcttcgtatcgggcctaaaggctcgacttctgatagacctacatgccctgtgcctacatctaggggcaagggcaaagctatggttgtgagctctgatagctcttcttctgatgataatggtatttgatagtttataatatcatgcttttattcttgtgttgaatattattgaatgcattttgactccaaaatttcgacctcctttagaagaacttcctcccttgtttgcctggatttgacgtcctcttccaagttcatcttatccttggttaaggtggcaagaagagtttggagactttccctctcatccttcagaccattgacctccctggacagagcctcgacatccgcctcaagctgggaggtagatggcatatcctgaatctccttcttcagctcctcaactcgattgttggcggctagaagttgtttgttcaccttgcctagctttgcccttacgacctcagcctccttcttgagctattcggtaaggcatcacttcagtctcgcttngacgcgactaagaagtacattaatgcacggatggaacctcatcaacacgtgcgtga

SEQ ID NO: 104582 - DNA, 743 bp, Cannabis sativa
tgtcgagattagtcaggaatttagaatttcctaaaatacccttagtaccccttttatgttgttttagtgtggaggggcaaaatggtcattttgcccgatatgcattttgtccttttgtgaatttggtttatttagtaaattgttttatgtttgctgagattaatttagaaaatgtaagaaaggtttattttatttcattttacaaaaaacaaagaaaaggaaaaatcatctctctttcaaagctctctctctctctctctcaaatcctagaggctgctagggtttgatcttttgttcttcaaattcttcaagttttcatcagctctaagtgtaatctaagctaaggtaacctttgagcaactttctcttaatttccttaagttgtaagaactgaaattttgcatgctttgaagttttatttgctatggttgttgtagttggttgttgttgtgttctgaggtttaaatatggtttattatgttgatttatgcatgaattagaggttattatgtggtttgagcaacctttggagttttgaactcaagcttggctcattaatggcaagttttgtttctgtgagtgtgtggatgttttgttgccttgaaaatgttttctagggtgtatagaacaagtctggaaattttggattggattagggttgaattggtcgagttatgaatttttttgtcattcctgcactgaaccagaattccggttcagagaggcctgtaggaaccagaatt

SEQ ID NO: 104583 - DNA, 734 bp, Cannabis sativa
atttggaagcttcagcataggattttggttcaattaacgattgagttgcaagaatagcattcctgaaaagattagaaaagcgatggtaagaaacatagttagcaatgggataatttgttgtatgagcaaccttgtcacatatgtagtcttgtaggtatagtggttttttgatgtttctgcccattttggatattgttttgcgtgtgtctgaagccatttttgggggaataatggctgttggtggggatgcaattggagtaggaggtatggtgatttctggtatggaagcagcaggtgtattggttgctggtttgggggcaacaatattgtggtcatgtggtgagggattatcgaaatttgtagctgctggttttgtagcagtaggaaaaaatgtgtcaatattgacattgtggttgctggttttggtgagaggatagatagatttatagaagataacatctcttgagtggaaaatattattggattcaatatctaatagggtgtaagctttcatattatcgggatagccaataaatatgcaagctttggccctaggggataatttgtggctgctggtgtgaggagaggcatagcatagacagccataatttctcaaatgatcataagatggaatcttggaattcaatagttcataagatgtcttgtcttttaataatatagatggagttctattgatcaaataaacagaagttcttaccatatagctccaataa

SEQ ID NO: 104584 - DNA, 509 bp, Cannabis sativa
acatgtaaacgatatacattagagcaatatgaatataccgcaaatttaaattaatttcttattaaatgagttttttttttcacaaatatacaataacatacaaaaaccatatatcattaacctaaacatgtatacgatagtaaaaaaaaaataatatgatgtatcatagcacataagaacaagatataccctaccacaaacttaaattaatattccataattttttttatttcattcattatataccataacacataaaaacaatatagcctaatgaaataaactatatctcaaacttaaactaatattctccacaactttttttctctcttttgttcattatataccacatcatataaaactaatataccacactcttaaattactgtttttaagatttttatttttttcttaatatactataacagataaaaaagatacactatagtgtaaaataaataaccacacacttaaagtaatattcctttcttttgtaagttagagtaata

SEQ ID NO: 104585 - DNA, 961 bp, Cannabis sativa
tgtgctctcttcccaattctttctcccttctcaagaatatcattgaaatccccaagcactacccatggttcatttgttctcaaaccctctaattctttccaaagaagcctcctatcctcttccttgttaaaaccataaataaaagaaacaagaaacttgttcctattatccatggttgtaaccgaaagatgaattatttggcttgagcaaaaaagtatgtcaactatgtaactcaaaggattccatgctactataattcgcccccctttatgccaagcattatttgccgtaaaacaccaattggaaaacattctaacatataaggctccaagactcgaagccttaactctcgtctcaaggagaccaaccaaaccaacattatttttagcaataaattgcttaacatccatttgcttttgttgattgttgattccccggacgttccaacttagaatcctatccattgtttaaaggaggttctccccctcctctagttaatatcgcttcatgcacttcttcagtcacccgatcctcttccttctgcaattcattttcttcctcattctgtaaagcagtatactggttcgagatagatgcttcagcaggagcttgctgatttttaagcttccaacccttcaccacttgctgaaacccatctgcatcttccttaggcagttcgggcacttgtttcttcacccctttcaccacccattcttgcttttttgcctccttctttctacaatcatccgaactatgtcccattcctttgcaatgtttgcacagaataggtttccactcataattgacaaccacagacacatcattaccaaactcattctcaaaatagatcaggccaggaaactcttgctccattgaaacttcaataaggattctaggaaaaagtagcttatccctttccctagtaacctcatcaaccataataggttttcctagctgccca

SEQ ID NO: 104586 - DNA, 637 bp, Cannabis sativa
gcaaccctatttgatgatttgagagtttggttgtgaattggggtgatttgattgtgttttggagctgattttcgtgttcttgctgctgtttttctgggtttataacccaggtgccgcggcatggtatttagcatgtcgcggcgcgcccatttctttctgggcagatcctttttgaaaacttcaaatagccataactttgtgatccagactccgatttaggagttctatataccgttggaaagctcttttcgagctctatctgaatatctgaattttaaataccatgtgaatattttatgaaagtgaaattaggggttaaccctatttgtgaagtcctggaatgtgtgactaggattaccggcacctgctcaggagcacccggggattcggaatctctgatattgcggacaacaggtaagacagtgattagcacatagagtatgtgcagtggcgcttatattgaaagtgatatgtatgattgtttaataaccgggattagggctattaccctaataggaaccgtatagttgcctagggttattaccctagtcatatatgtaggtaaatgccatgtcatgttatatgtaatgagattcaagagttatgcgcttaaggcataatcaggttggactcggca

SEQ ID NO: 104587 - DNA, 629 bp, Cannabis sativa
  modified_base (578)..(580): a, c, t, g, unknown or other
accttcaatcatcctcagcctcaaaggtgacgctgggatcctagggagtcttagacgtacgtggcttgggaggcataattttaaaatccaagtcacctggttcaaaagcaattgtgacatttggtaaaaacaaaggctttgccacgggaataaaggatacgctgggtggttctggccaagctgcctctcgcaagaaacggcatctgccttcagatatttctttcaagaagcgcttgtagtgactagaaatatcttcctagtgggttctcactatgtgttccctaaccctagcatcatttagttctaatttggaggtgggttttgaggggttgggtttatatgggatggctgattctgtaggaaactcaaactctaaaacttctggaggacaaattcctgaaccagagtggtacattgctgccatcaaaaagcagtcccaatccctggaagagaattttatcaaaccagatggtaatgagttagagatcttaaaacaacctacatatttcctgaatcctagtatgagcagttttaaccctataaaaaaactaccaaaaccagatgagatgataacgatnnnaacaaatcaagtaactgatctacaatatgtaacaaacatgagaaagaag

SEQ ID NO: 104588 - DNA, 646 bp, Cannabis sativa
  modified_base (413)..(414): a, c, t, g, unknown or other
ttttgagaaggtgaatgatcttggtcattttatggaacctctcacttatagtgaagcagttaatagtccacagtctgcaaaatggataaaagctatggatgatgagattaagttcatggacaaaaataatgtgtggaagttagttctattacctgatggtttcaaaccaatatgttgcaagtagattttaagaactaaaaggaataataaatcgcgtttagtggctaaaggctttactcaaagagtgtattgattacactggaactctctcacttgttttcactaaagattcatttagaattattatggatttagttgtgcactctgattcaaagttgggttaaatggttattgaaactattattctgaatagagaattgagtgagcaagtctatatatctcaacctgaaggnntcgaggaaaatggaaatgacaattttgtttacaaattgaaatgatccatttatggtctcaaactggcatctcaccagtggtacttgaagtttgataaggttgtgacactgttgggttttatcgagcacacatttgactagtgtatttatatgaagatcagtgggagtcatcatattttttcttgttctttatgtagacaatattttacttgccagcagtgatttgtcattac

SEQ ID NO: 104589 - DNA, 579 bp, Cannabis sativa
cactaattatcaaccaaaacacaacttaaaattttattgaaaaaatatactaatatactaaataaattataaaatattagatattaataaactgataacaaaaatattaaatgggtccctatcagggtggaaagtattgttcctgttagggcgagaagtgttatccccgtcagcgccccgtttaatacttggtgataaaaaataattcctatcccagacatgttctccatttagataagatatccccgtccccttaggggcgtgtccctgcggtggggataagaaaagaaaaacttacaaaaatactggattttaacttaatctttacaaaaatactgttatacggcaaaaataacttttatactgccttgagacttttttttttcttttctactgtaaataccaaaaataaaaaataaggtctccatcttccacaccaacagacagaactaccacagcaacaccagaacagccgaaaaatcaccattaaatctggtgagatgaagcagaaatattaaaactattaatgttggggttgtcatggtttttctaatgttgtttttgggttgttccactgtt

SEQ ID NO: 104590 - DNA, 528 bp, Cannabis sativa
  modified_base (68)..(76): a, c, t, g, unknown or other
  modified_base (140)..(167): a, c, t, g, unknown or other
  modified_base (231)..(235): a, c, t, g, unknown or other
gtaatagccaattattcatatttttaaaagaacatttttaatggcccgattgttgggaatattttacnnnnnnnnngatttactaacaagtatgttgatttataacatcctaaatatgaatatctctaaaacaatgaaannnnnnnnnnnnnnnnnnnnnnnnnnnnacattggttgcagcggaatatatgactccttccgctcagctctctaacccttgttcctttctgnnnnngagtattatcaagatttgagtctggatctctttctctccttcgagtttggtgttaccaccgtcttactcactatcattgagtacttgacttgctatgtgtgggcatgtcactctatcactaagggttcgaatatggtgatgaacaatgaaggaggctgaaatcacaattgaaggaactctctgatctaggttgaaggcaataattaaattgtcaaaactggatgagtgagagcatcatgttccttttatagtgttttaattagggcttaggattgaattatatggattaaaaa

SEQ ID NO: 104591 - DNA, 1037 bp, Cannabis sativa
  modified_base (988)..(1007): a, c, t, g, unknown or other
aagaagaagatgaagagagaaagagaaagtgaatgagaatttctcagttgtttattctaattggaggaacctctatttatacaaatacaagagtgaaatattaagaaactaagaaaaagatgaatgttaattataattaataataataaattaaaagatttggatatccacgtaattattaatatttataacaataataaaataataaagttattaccattttcaattttaattaattatagttttccataataaaaataatagttttccaaaaattttaaaattgaaaagttgttaattttccaattactataaaatcttaattgggacaactaatgcatttaacaaaaattgggtatcttgtttttattttatttttttaacaaaaaaaaaataaaaaataaaattggtaactaccaattgaggttacccaaaaagtaatttaggttactcttttgggtaatgttaggctatttttagcctagctttcgggtgttaatgaaagttatttttagtcatttgtgatgtttttaaggcaaaattacatttattttctgtgttttcaagtttcctataactgtgaaattccaagtcttcaaaagtgtgaaaaaggaccaatgcgagccttgattgtttacttcatgagcgactgctcgtagtaatatactgattatttccttcaaaatagtcttcctcaaagtgacattgtagagggaattgaactgtttgctcaagttcaacacatctccatccacccacgagatgtattcatactactgaccattaggacctcagacgaagtacctacaccaaccaccacgtgtatcatagaaatattattaagtgtggagtagtttgctggtcctcacccttcgaatctcatactccccaccttcatggtagagctttcgtgtcccttcccccaaggttgacagcaagcccctttccctttggagaagtgtaagaacctatctgaagtctctaggtnnnnnnnnnnnnnnnnnnnngttaaagttgcaggaaaggtactgattcag

SEQ ID NO: 104592 - DNA, 617 bp, Cannabis sativa
ccgttattacaataaattacagaatcaaatcaaaataaacgttgtttaaagaataaataaaaaaaagtttcatcagttcttgaattaagtgcagcaacgtatgcgacttgatagaccgcgacttcccattcatattccaacacacgagctcacctactctacgatgttttacttgcagaatatgcgtttcggcctattttgtcgaatgtctacattcaccttttgtctcatagtcggacattctatgtgttgacaatgtaggacatgcaagtccctaatgagttgtccaacacattagtcgtttagaccaaaacctatgtaaagagacggcctttactcgtcataagagagatatacttgatcattggatataatcttactactagaaaaacgggttttagtgacccacattgagtaactctaagactctttattgatacttcaacgcacgtcactaatgagggtgactgaaaagacagttttagtgacactgcacacgtgactgaacctttttacattcactttcttcacgtcaccataggcctatagagtcaggttttgtcacactaaaaaggtaacagcaacacgcataaaatgtcactatatccttttttttt

SEQ ID NO: 104593 - DNA, 1430 bp, Cannabis sativa
  modified_base (421)..(427): a, c, t, g, unknown or other
  modified_base (896)..(896): a, c, t, g, unknown or other
tttggcatttataagattgaattagaaaatatggtattattgaaaagaagaataagtagttgaaataaagtggcaaaaatctaattagaacttggtccagttaagtgtatgacctagtgtgttcttttgcccaatattttattgttttttaatccatataattcaaccctaagccctagttaaaacactataaaaggaatatgatgctctcatctcatccacttgacactttctcaaactaatgtcatcttgactattgccttcaacctagatgagagagttccttcctcagtgattttagcctcctttattgttcttcaccatattcgaacgttgagtgaatgagtgtcgtgcccacacatagcaagtcaagtactcaatcataatgagtaagatggtggtaaccaaactcgaaggagannnnnnnatccaagttcagatcttgataatgttctgctacagagaggaatcaagggctagagatcttaaacggaaggagtcattgtattccgctgcaatcaatgtaaggttttcttaaacccttatttgtttaatttcattattttagagatattcatatttaggatgttattcaacatacttgttagtaaatctagatcctagtaaaagatattcaaacaccgaggtcgtggcaaccgtcagagtggttctgtaacccaatacacttacccgaaatgtccaaactgtaagaagcatcacctgggtaagtgtaaagggcgaggatattttagtgtggtttgcctggacactacaaaagagattgtttgcaactcaagaaagaagatcaaaagactgaagcaagacccgctccaacaagggtttttgcttttactcagactgatgcagaagccagcccctcagttgttacaggtcanctcttggtcaacaactcttatttctttatattgtttgcttctgggtccacttattcatatgtggcggccagaatatttgataaattaggtagaccatttgatagttatgataacaggtttggaacctattacctggcgaaaaataagttatctccaaaaggtgggttaggtctatgccgaccagaattgaagatagagagttgagtgctgatttagtggaattgggcttagcatattttgatattatacttggaatggatttcttgtccaagtattctgctagtattgactgtatgcggaagatggtgatcttccaacttgagggcaaggaaccatttgtatttgtgcaatcagttcagggatctcgaattccagtgatctcgatattaaaagctagagatttgttacaagatggatgcctagggtttttggtagtagtattagatacctgttacgaaaattatgtttattacgcaagtgtacgcaatcaggtagtatctcacgcaagtaaggtcgaaccacagggaattggat

SEQ ID NO: 104594 - DNA, 1406 bp, Cannabis sativa
tgcttttcttactgagtctgtcgactcaaagtgctattgctacgtgtaggtaattgcaaggctaaagtagaggagtcgtgagagcgagcaggtgaagattgtacatgccggggcggttatgcctggagcgtatgatcctcagaacatcaaggcttttgctatttagtcgctaggcgacaaatattttgtaaatgaatagtaaacttttgtaactgtattttgtaaacaggatcccagaattttataagtgttatatgttatgttttaattaaataatcaatattttaattattcacgattttcagtaacctcgttgattagcaacgagctgcacagtacgttaaaagtcacgctaacatgcctatcatagtttgggtgttacagacatacttgtctattgattttgaaacaaatctacttagtgcggcgattcgaccagtcaaactttgcacttccttggttttagttggcgacttcatatccaggacgccttgaatcatctctagattggcttcaattcctcgggcattgacgatgaagcccagaaactttcccgagctgaccccaaaggaacactttaagggatttagtttcatattgtactttctgaggacattcaagcattcgtccaggtcatctatgtgccccccaaccttcctggatttgacgagcatgtcatccacatacacttccatatttcgcccgatctggtccttaaacattttatttaccaatctttggtatgttgcttcaaatttttttagaccgaatgacattacttcgtaacaatatagacccatatttgtctggaaacttgtatgttcttggacttgtggatgtattttgatttgattgtaccccgaataagcatccatgaagattaatatttcatgccctgctgttgcatccacgagctgatcgattcttggaagtggaaacagtctttggggcatcctttgttgaggtctgtgaaatcaatacacactcgccatttcttcttcggcttgggcaccaatacgggatttgcgacccaagctgggtagaaagctgtgattatgaaattattgttgcgtagcttttctacttcttcctttggggctagtgctcgcactttgtccaatagccttcgcttttgttgaactggccagaaattgggatcaatattcagaacgtgcaaaatgatagaaagatcaattatgaccatatccgcatgtgacccatcaaaaatgtctaggtttgctcttagaaattttatcaattctgattttacttcaagcaacaaacccttttcgatatttagatttctggcagagatatctggatcgatctcgatcttttctaactcttccacaggtccaacattgctgcttggatccccaagtcgaggatccacatcttcatccccg

SEQ ID NO: 104595 - DNA, 1083 bp, Cannabis sativa
  modified_base (336)..(343): a, c, t, g, unknown or other
actttctttcacccacttcatcccagtgaataagtgatctacactttctaccatataaaagttcataaggggcatcccgattgttgcctgatagcttaaattgtacgagaactcgatcaggggaaggtactttacccatgatccttcaaaatcaagcacacatgcccgaagcatgtcttctaagatctgaatagtcctctcagactgtccacccgtctgaggatgaaatactgtgctgaacttcaactgagtacccatagctcaatgtagactttcccaaaatcttgatgtaaacttcggatctctatccaaaataatggactttgggacaccatnnnnnnnnacaatttctctaacatataactcatcatactgattaatggaaaagttcgttcgaaaaggtaaaaagtgcgctgactttgtaaacctgtcaactatgacccacacagagtcatactgtcccgtggtcctaggcaatccaaccacgaagttacaagcgcacatcacttgtagaccccaacccgcttggtctagtgtggccagaacatgtacatacatcgcccaactctcgcattcatggctgatcagagatagatttaccctttcctacacagtagagcacccgtgagccaaccccagcaagactatataattatcaataatcataactaacatattacataaataataacgccatttcacattttcctgtataacacaaacccgtgtgttacgctcacacaactatttatgtctatgtggcatagacccacgtgttaggctcatatgtctaaatacaataaggccttagaatagttcatctcaatttttgttacgagttcgaccagattatgccttgaacgcataaccctaaatctcaatatacacttatatataacatggcatagcacattcacattaataatcactagggtaatgaccctagaccattaaaattctcatgttagggtgataaccctaatctcgattcacaattacccacatatatcattttcaatataggcgccactgcgcatactctacgtgctaactactgtcttacctaatgtcccgcaaacgtgg

SEQ ID NO: 104596 - DNA, 954 bp, Cannabis sativa
  modified_base (47)..(56): a, c, t, g, unknown or other
atttataaactcatatcttaaaaataaagaaaaataattaaaaattnnnnnnnnnnataaaattattttgaaaaaaatataagatagaaattcaagatttgatattattttaaccatcataagaatttaaatggaagaattgttacaaatttatttataattttttttatcaaaaatttattcgttaaaattattgaaaatgtataattttgaattatcatacataagctatcaaaatttaaaataatactatttaaacaatagttacttaaattgatgggattattacacaaagcactattttttgaaaaaaaaaaattacatttttacgtttaaagattttttttttatattttacggttttctatagaaacaatacgaaaacaacaagaaaactacataaaagtaacaggaaaataacttccaaacaaaatcaaaataataacaaaaaataacatacagataacaaatttattacaaaaaatcaaaataagaatttaaatggaagaatgattacaaatttatttataattttttttgtcaaaaacttattcgttaaattattgaaaatatataattttgaattatcatacataatctatcaaaatttattacttcgacgggatgctccggggggttatggttttctcggagggcggagttgggattgggtgatgggttgtggcggtggtggtgtttggggccatggaattgaagacggtgctttgaatttggggtcttgaattggccggggttgccttgattggatttagaggaaggcgtaggcgccattactaagatagaaattcaagattgatttgatttgattttaaccataataagaatttaaatggaagaattattacaaatttatttataatttttttaacaaaaacttattccttaaaattattgaaaatgtacaatttggaattatcatacataacctatcaa

SEQ ID NO: 104597 - DNA, 934 bp, Cannabis sativa
  modified_base (238)..(244): a, c, t, g, unknown or other
gcttagcaattagctttcgcatcttgagtcatcaacgaaatccttataacttggggatcagactaaagggatacggcatacacacgatcccatgatcagtgtatccagcatcgatcccacgaccagtgtatccagcatcaatcccactatctttgtacttagcattgatcacacaatctttctgtttatacacattgtgacgagaggggaaacacttcctctccaagcttactagccnnnnnnntagtgatgcatgttcactgggtaagaggtcgcaaacagattaattgagactataccctaaagatatgatctaaaaattatatattcagagatactgttgtaagagctaaaagaaaaggaaccattctccatgttcttaagtcaatacaagtaacgaggattagactattaccgaactgctccggaccgaacctctataaaattcctgtgtctttatattgctttattatataccgattgctatatatcacctatcacttattaaattagactcgttgtcgttggctaaaagtgaggtcaacattttggtactttcattgagagcagaattaagaatcgcactttattcaaatctaaccacaaacacgatggtgcaaactcgtagaggcctgactgatcttgcaaattcacagacggtggatcctacattgcagaacccaggaaacacaattgttccgccagctgttaatcctggacagccggcaaacatgggcaatggtgtaacaactcctatgaaatcgggcctggtgtgcaagagactggaaataacagttccacacccaaccagggcattcataacacatctattccgcctggaacctcttggatattattttaccaggatctagatttacttacattgggtgaagcagaatataatgactcattccgttcacatatctagcccttg

SEQ ID NO: 104598 - DNA, 612 bp, Cannabis sativa
tgctgtgtattttcattttgtgtttaaatagttgttgtatatatttctttagcaaaaaattttataacagggattcctggaacacgctttttatgccgttataatgtccgttttaagtattttattatagtcaagttttttatattatcacagtttgtaataattaattaatctattagtattaaactagtttataaaatcacacatggtgtccctacagattagggcattaaaccaatcatcctttgaaaattgcagcctctgcccccttggtctctgtgtgcatccctcttgacacacacacgtagcaactgaagcattccatgtctatcccactttgaactatctcggtcatcaactctcgaccactgtggtgcctaacaacaatctaacagtcccagcactacttccacacccatgcctacaagcttccttttcaacaaaagtgcctcttgcggcttatgatgtcactcacacaaacttggcctagtgtaccaaccatacagtatggactatcccctcaatcttgtcctatgctaacgagtatcaaacattccgttgcgcctctctacaactgcacgtggtagttgtctttctagcatccttctgcgt

SEQ ID NO: 104599 - DNA, 1770 bp, Cannabis sativa
tctccacatccttcttgtttatttctttaaaactagcaaaaatcttctccttcaacaaattttttttcttgtttatacctcaacttgtcacattgaccagaacaatcaaagcttgaaaccgaagcgaattcctcaatgctaaaccttagcatccgaccaacaatattaaaccacatctcattatcattcggctggaccacctccctcaacaacaaactatagaacaactggtgttgcaaaacataagaaggagttcttaaaaagtatccaaacacatttgtccaaacatttcctttcgtttagtggacaaaatagaattgatagtctcaatgattttaaaagaacaagtagatgtcacccgtgtagtatgaaaatcttcattactaaatttattatcccataactgaaaaaacaaaatagtaaaatcaataaaacaataaaacaacaataactataaaatagacataaataaacaatacataaataaacaataagaaagaacaaataaataaacaaaatataaacttaaaaaaaagagaaatagggaaaaaaaattaaaaaaaaaaagccaatagaaaatagagtatatacatttatatttgaaaaaaagaaaataaaacccacaacatcaaatgaataaggaataaacaaaatataaacagaaaaccctcaacatcaacaacaattttgaatttctgattagggggtttcaaaattttttgagcaacaaatttcgatttagatcgtttaataggtatttttgggtttcttaagagaaggggacaatgaactcgaacgaaatcgagtaacagccatcactcaaagataaaaataaaacgaagaaagaacactcaaaaaaaaaaaaaaagacaatgatgatgagaatgatgaaggagaaggaattcaaaataaaaagggatcaaagagagagtgggttagacaatgataactggcaggagaagtgattgatatttgacaaaatggaaggaaacatgtaggtagttaatgtgacataagcaaaactgtatttttgttcaaaaaatggtaaaaataaaaactgaaagtatagaactgtatacatgtttaaaaagagaaaaaaaattgcattttatgtaaaaatctcaatatttaatgtggtagctcatacttaagttaaatttactctctgctatcactatcttgaagtatctaatacaataaaagcaatgatatgtctcaaaatattcaaaacaacaaccaacaataagatgatttttttatggatgtataactaaagttctacatttgttaaaaataggaaaaattttggacatataaaaaatacagatactatcaccattagaatcacgcattttgagaatgtgccaaaaaaatccataagagtttaatctgtaagaacgatgatcctaatattttttttcttcagaattttctctaattaagtgtggaaaggtgtaaagaaaaataataaataataatagaatttaaatattatatatataaaatataaatattatatgttattaacattgatttcttttaaataaaatttgggaaatttacacctcatattgattttttatattttattactttaactggtgcacgacacttattatatttttactgtgtataatttttttttaaaaattttgacccaccatagttaatttaacttaataatatatatgtttttatatatatatatacatatataaaaaagtttgtaaaagttttttttttttttttttttttttttttttttttttt

SEQ ID NO: 104600 - DNA, 2162 bp, Cannabis sativa
aatgaaaactatcgtgaaatgatatggataaaattagtaaaataattgaaaaaagaaataaacataataaattttaaaataaagaatataaattaaagacatcaaattaaaaacatgtatatgtgtaatttccttataagaagttgaacaacactagtttggtagttgtttagtctgaactccagcaaaaagttttgggtttcggccattagactctactccggaccatagtggaattaagccttttttttttaagtaaaattaaggataattataccacatactgaaatttttaacttttttacttttatactgtggggcagaatttttttcaaaaatattgtataaatttcatattgtgtactgtgttaagttttatggttgttttttagttgttctactgttgattttaattgttctgttttgttgctttacggtaattttaggttgttttataaaaagatagtatttttataaaaaaattccgtgtgacagtaaaattgtaaactttgacccaaaattcagtatttttataaaaatctctaaaattaagcctcttctttacaaggattagagaaatattactttacaagggcggcccatgttgtaacttcacgtgctatcaatggactaggagaatggctcatgctgaagtaaatgataagtccgaaaaatactaagggaatcttcgtaactatacatcatttagaaagattatacaatcatataaaataactacaaattttccatgtaaaaaataatatacctaaatcataatattattaaatatagcaagtttatattcaagcaagataattcacatcctaaatttattaataacactattcctaaaatagttaacactcattaaaaatgtaatattttattgttagaataattgttaatgtgatccttaatgtttggtaagagtaagagatagagggatggagagggtagagggagagtgatggaaggagagattaaatttattgtttggtaagaggtaaagtaggaatatcccaatttgtgcatattggaatagattgagaaatttaaaatatgtacttgtatgaatctcacttaattgatatgtaaaagtaactaatttaattcaatctaaacatattttatatatatatatatataaaaagccttatttatttatttatttatttcaacttttatttttatttttattttgcccacagcctaaatagttataaatattttccaggatgcttagaaatattagtgattttctacatatttattctcgatagtaccagtatttacaggtatggagtccaaaaacgcgggaattattttttctacaagttcatcataatgttattaaattatgataaacttgggggacaaatattatccctcaaaaaatccaagagaattgtgcatgaatttttgttctagatatgtaagtcctaccaatggaacactttgtcacattgcacctcctaccagtggagtacattggcacattgcaccaccaaccgaagggcacattggcacattgcacctcctactagtggagcacattgggcgtactaagcttcctgctccatcagttgctaaggcacaaagagctcctcaactaccaaattacctcaaggacctgattggcacaaaacattaaggaaccattaagaacctaattggcacgaacctcaaggatgatttgggtccgctaaatgcaaaagacacgtgcttttaaagctattctaaaaatatagtcaaaaaatgataagtgaagagatatttattttttaaaatggttattattatattattattattttgtatcttaaacctaacccgaatattgttacgggaaggtgcacctatgattaagagattttaaatcctagatgaaaatctatataaggggagtgaaattacttgtaaagagactctgaacttgatactcccgaaattatactctcgagctcccactcttaaattctaaaaacttacttaaggattgaattcttgaaaaatataattctggagaactctcctcaagcattgagatcaataacactccaagtggactagcctattaccgctgaaaagggtaaaccactataaaattctcgtgttcgtgttttgaaattccgtattttaatattcccagtttgattatttaa

SEQ ID NO: 104601 - DNA, 803 bp, Cannabis sativa
tttctcgtaaattacccggcctaccaatctaaattaattgcattaacaataaatttactaaataaatataaattaatacaattattgtatgataataaattaaatgcttaattccataatatgtaattaattgtgcatttataaccatacaatatcttaaatatttgtactaataataaatttgtataaaatatacaaattagtacaatttaattatatgaaaatgaattaaatgaaaaatcaagaatatatacttaatggcagatttttcaaaatttattaatttagacaataaattacataaatttggtaataaataattaaatgcacaattatacaaattgcacatttattacatgcctaaattaatcatgtaataaattaccaaatttaaacaaatttccattttcaatttatactaaataacatattaattctaaaaatatgtattaaataaaaatagaatttgaatgaatgaaatttattgactaaaattaatacaatataggaaaaataattaatattcccaataaatgaaaatttataaaaattcgatttttttttttaaaaatacactgccagaaacgacatgtcgtttttgctatatgcaaaacgacactcgtttttcttcaaagaaggctgcccacaaccacgtaaaatgacacgtcgttgtccatagtgtagaaaacgacacgttattttcaatgaaggctggctgctcacacgggaaaacgacacgtcgttttccacaagaggaaaaatgacacgttgttttatggatctgaaggctgcctcacaagacg

SEQ ID NO: 104602 - DNA, 569 bp, Cannabis sativa
attttcggatcaacttttcagggaaaaagacggtgtttttgaagattgatctacgatgttatcatcaactcaaaatccaggaagaggacataccaaagacagcttttcgaacaaaatatgggcactatgagtttctggtaatgtcattcggattgactaatgctccttcggcctttatggatctcatgaatagggtattcaaggaattcctcgataactgtgttatagtgtttaacgatgacattcttgtatactctcagtcagaggaggagcaggagcatcatctttgaatggtattacagcgaatcagggatcacaagttgtatgcaaagttcaaaaagtgcaaattctggttgtctgaggtatcatttctgggacatattgttggaaagaacaggattatggttgatccaaacaagggtgagtcagtgaagaattggccgagaccaaaatctgtgacggaggttcgaagttttctcgaattagcaaggtattatcgatgtttcttcgagggattttttaaaatctctatacccctaaccgacttgactaagaaaaatcagagattt

SEQ ID NO: 104603 - DNA, 578 bp, Cannabis sativa
gggctcatcatagtagaacaaaacaactgagaagacaacaacagggcatactccattctcgttagcatttagacgcaatgctgccggtagaagtaaatatcgtgactcatagacgagatttttttaatcaagaagaaaaccaagaactcttaaaattttccttggatctacttgatgaaaaacgtgttgagtcgcaaattactaatgcagcatatcaacaccgagttacgagatactttaacaagaaagtgaagaagaggctcttcaacgttggagacttggtgctaagacgagtatttgcaaatatgagagacacttctacagaagtatttaatccaaactagaaggttccttatgtaatcgaagaaatagttggaaccggggtttacaaattggctcggctaaatggctcgctgataaagaactactagaacatggaaaatttgcgatcctactaccaataaattgatgctgtaacttctattatctgatgtaatattttgaacttcagttattaataaagttgaatcatttttcaagtaattacaaagtgtcatcctttaaaattacttgagggg

SEQ ID NO: 104604 - DNA, 591 bp, Cannabis sativa
  modified_base (152)..(155): a, c, t, g, unknown or other
  modified_base (213)..(215): a, c, t, g, unknown or other
cactttattgagggctatcataagtaaaaatattaagacttgggaggattgtttaccacatgttgaatctgcttataatcattctatgcattctgatactaaattttcaccacttgaaattgtttaaggttttaatcctttgactcctttannnntatcacctttacctgtttttgagcatttgaatttagatggcaaaaagaaagcagaatnnntgaagcaaatccatgagagggtacgactcaacatagaaagaaggaccgagcaatacataaagcaagctaacaagggtcgtcacaagcaggtttttgaggtcggtgattgggtatggttacacatgaggaaagaacgattcccagcccaaagactttccaaattgctaccttgaggagatggtccgtttcaagtgcttgaaaggattaatgacaatgcctaccgacttgatttacctggagaatataatgttagtgctacttttaatgtttctgatataagcccttttgatgcaagtgaagatttgaggacaaatcattttcaagaggggggaatgatgagaacactaaggctaaagatacaagtaaagttccagtt

SEQ ID NO: 104605 - DNA, 677 bp, Cannabis sativa
  modified_base (497)..(506): a, c, t, g, unknown or other
gtttactttatggcgggataaactacaagttgggcaataatccatgtctgcatattccttacgatataaaatgcaattgttcggacatgcatgcttttttttcatactttaatcctatggaatataaagttttttttttcacttcatatgtagatttcgggaagcagttgtcaaatggtaagatatctttaaaagcggctaaaaattgagtaaaatatttatctctcactccattttctgctttgatgtaaaactttaccgttgttggtaatcttagtttttacaaccattgaacatgggtttatcagcatcacttagaaaattatcaaatttttaggatcattaagaaattcctcctgtgcttcgttaagcaagtccaatggatgatcatcgaaatcattaccctcgatatcatctaccccccgctttcctaatggatatggatcatcagctaaatgtttgccatgtcaataccaagtagtataacttctattgannnnnnnnnnatacacatggtccttaatcattgtaatatttcctttagatccattacaacaatatacacacggacaacgaatacgtttgtgattttcagaattctttaaggaaaactctaaaaatgcatcgaaccctacttgaaattgcagtgtgtctctctcctcacgcatccatgattt

SEQ ID NO: 104606 - DNA, 643 bp, Cannabis sativa
aaaccccggcaacggcgccaaaaatttgttgtgaaaattgtgtacgcaagtatacgcaatcgtaacgagtaataaagtgataaatcgagtactgtctccacagggattgaaaattggaaattaatttataagactaggattttaaaatgtcataatcctttttccaaagtgattatgatttgattctctaattaattaatatattcctatgcccaattaattttaagaataccaatttaagcacaataattaactcataatagattgtgcaaatattacaagtttagaataaaagaaagaggaaaagaaaaacccatattggagttgtcacaatactccaagctttttcttgccaaaatcctcttcttcttcctttgaatatttgtcaatctccaaaataaaaaactaaattaaaaccctaaataaaactctctctcactttttttctttttcttctttttcttctttttcttcatttttctctgttgttgttgtaggcgtccctggagcagcccaaaaatccccagcccccttctctcctattcaatcacgtctctgcttctttcttttatcatatatgtatatatatgattttactaaattttttattcaaaacaaagtcatgggctgcccaaatttcttc

SEQ ID NO: 104607 - DNA, 512 bp, Cannabis sativa
gatacaaaaatccccttattagaccttgcaatctcaagaccaagaaagtacctaagttctccaaggtctttcaatttaaatctattattaagtctgatttttaaagcctcaaggtctttgatgttgttgctagcaagaataatatcatccacatatactagtaacaagatcaaactagatccattttgtctaatgaataaagaatgatccgaggcagaatgtttgaacccttcttcaataagagctgaagagaatttttcgaaccattgtcttgaagcttgtttaagaccatatattgatttttgaagcttgcaaacagcccttggtggaagctcccccttaggactatacccttgaggtatagtcatatacacttcttcatgtaaatccccatgcaaaaaagcattgttcacatctaattgatgtaagaaccacccttgagtagcagcaagagctagaatgagtttaacagagactaacttggccacaggtgcaaaagtgtcattgtagtc

SEQ ID NO: 104608 - DNA, 521 bp, Cannabis sativa
  modified_base (275)..(278): a, c, t, g, unknown or other
  modified_base (457)..(457): a, c, t, g, unknown or other
tcacaaaactaagggaaacattcggagatagagaaggtacgctatcgaaaaaactactttcctttaatgtaaattccatctaaaaatttaacttcatacctactgatctcagacaaaaaaataacaaaatctagaaactggtttccacaataaaaaaaaaattattacgattccaaaaaaaagaaacaaaaaaaaaattgattaggcttccaaaacaaacctactgatcttgtaaaaactggtttctgtgaacaggtttgacaataatatcagannnncataaaagtatagagaaggcggtgagcaatgtctacccaaaccacttccacggagcatgcatcttccacctgctaaacaacatcaaaataaactttggagtgcatggagacgatctgaccataaactttgtaacggcagtaaagatgtacaagctcacctcatttgagagatacatggnagagatagatagaatcgacaaacgaataagaccataccttgagaaaattggacatgaggtttgg

SEQ ID NO: 104609 - DNA, 3233 bp, Cannabis sativa
taataatagagcaatatttagatgtaacaaactacctagttattacaacaagaactggaataacaaaactaactaacacctagactctaactcataatgttgagattggttaagtgtaataataaaggtcaaacacattgcggtgtttcacacatttcaaagttttcacaatatgagtatgtgaaatttaatatagtgtaaaacataatcactaattatggttttacctttaaattgaccttataaagtgtataaggttactcaagaagtttggaatcgtttggagatatttaaaaggacatttacacagttagtgtgtacccaggtgacatatcgccctgaccatgcgttatgtctcctagaacacactacatggggcatagggcatacatttacataacaagaaatctgtcaaactgctctaagcgacatgttacctactagtggatgacatgtcgcttgggagctaagatggaattacaaaaaacataataaataaataaataaagcatcatcaaaatgctccaagcaacatgttgtaatgggcgacatgtcacatgtgacataaaaactaatttttagctttttgttttattgtatttttggctccaaatttaattccaggagtcacgatccaattggctgagacacatgacgacttctacactatatataaggtttatgagagttaaaatttgatgtacatattttctaactctctctctctctctcagtctagcacccaaggttacttgttctctccaagtttatgaagaagtgcttgacttgcataaacttcataaggcttgtgtatcccacttctccttcctatggaagaagcttcaagcattaatgaaggcttaggaatagagatttcggacaacatttataaaatgtgtcaagccttttggttactaatttgggttatatctctctaaccttaatctttgttttttaccttttataattgtgtttatatgttgcatctcctactgttttgattcatattattgtcacattatattatattggtttgatttatatcatttaatccatcttgtgttccatatcttattttttgattatcaagattcatgtttatccgataaatgtgaatcttcatcatcatcttggttcttaatttttaaagaaaacatctctaaatcactgtaaattgattgtgtaaaatcctatatccccaacaattaaaatctctaatcctaaccacttgtttttggttttgtataatcaataaatggaaaattttggtttttcgcaactcctaggaccaataacttcgagtccatttcgatgcttatggaacacaaatttgaagattttctcttcatatatttgtagatcttcgaaagatctttcccacagtacaaactttgtccaaattcgatttctacagctccaattacgctagttttactttgactaggtctaagattacacgattctttaaaagaaacgagttagatgctaacttcgattttcaatgcgagattgaaaacgagtttgaggacgattatggatgcaatgttgaacaagggtttagctaaaatcatggatgtagatatggtttcaaagtctacatcaaagaatgagacttctcaaagaaactataacctaatggttacgggtaaccttaaattttttaatattgagtatgtgaatttcaataatgtgaatacaagttactttctttcattttcaattgagattgaatatattatcaattggaataaaacatgtatatgcagttgatgatgagatcattgcaaactaccaaagtgaatttattaagggtaatgcaattgataatgagatcattgcacccttatgtgaagtcaatataacccaagaaaaggtaaaagaatgatggtgtgatacttgtgctaccatccatgcaacctatgatagaactctctttaaaacttttgaaaatgcaaaggttggacttgaggtcaaaatagaaaatgaaaagagttctgaaatccttggtaggggttgtattaatttacaattcactactggaaacaaagtgacccttactaatgtttactatgttctagatatatttctaaacatagttagtggttgtcttttgagcaaattgggtattaaaatagagtttgataccaataagctcatcctgactagattaggcacctttgttggacagggctatacatgtgatgggatgattaaattgaggactcttaagaatgataataattttgtggcttctagtacttgtaatgtgaacaattctaattcttatgttatgtggcataatagacttgctcatattagttttagtactaccaaaagaattattaaatttgatttgattaaatatgatgtgaattatgtgttaaatctaaaatggtaaataaactttttcctattgctgagtgaaatctcaagatcctagagttaatacatagtgatttatgtgaattgaatgacatgatcactagaggtgacatagatatttcataactttcgttgatgattgctctaaatttacatatatctatttgcttaagagtaaagatgaagcatttaacatgtttaaaatctataaagcagaagttaaaaatcaattagaaagaaaattaaagatcttagaagtgatagaggtggtgaatattttttaaatgattttgatatatttttttgatgagcatgggagtctttcttattccaagtacccagaacctaaaaggcccaagttgggtccaaaggctttgagatgtgtatttgttggctatgcctcaaatagcaaagtctatatgttattagacttggtggtgttaaagatttgagatcaaatgggaagttttctcaagtggagagtactctttacttaatagaggaaaaccttgaagaaatcatatggaagcttcttatgaatcttcaaattgaggatgatcccaattttttttttttttgggaatgcagcaataaatgatgaaatgcattcaactatatccaatcgcacttgggtatatgtgaaacttccacaaggctcaaaagcaattgagtgcaagtagatatttagaagaaaataacacagcaattgcactttgcaagcttttaagtataggttggtagccaaagggtttaggcaaaagaaagaaattgattactttgacacctatgcacggttgctaggttgattgcaatatgattacaattttccttatcatatatatatatatata

SEQ ID NO: 104610 - DNA, 885 bp, Cannabis sativa
aaattactctttataaaataatccctaaaatgtggttattttgcaaatttgaaacctttatggttatttttgtaaattcttctctccaaaaccacgactccaaattctgttaaaccctaatcaacactgttactcactctctgacctaatcaatctccattgttgctttgcttcttcgcatcaagacctaagctttaagctctctctccgatcactccatgggttccgataagaagacgaagaagaagaacaagcattctcactccaacagccatggcggcggacccgatgttaagctcattaccgactctcgattcgcttccgtacaatcggaccctcggtttaagagagctccaaagcataagacgaaggtggagattgattcgcgtttcaaccgtatgtttacggataagagattcgcaccgtcttctgctccggtggacaagcgaggtaagcctaagaagcagaattccgataattttttgaagagttactatcgagttgaagaaaataaagaagaggaagaagaagaggaagagaggaaaggtgaggctgtggtgaaactcggtggagatgaatcggacactgagcagagtggtgagtcggatgcttctgaatcggaggaggatgatgatgatgacgatgatgtggtgagttgggaatcggatgcttccattgatactgatgatgatgatgatgatgatgatgaagagcttaatgttgagtacgagcctgaggaaccggtatattactatagcttaatcatactctgatcaactgaattttgctattgcattatcaaattttgtgatgtgttagtttaaggttaatgaaattgtttagttgatttgtttgagttacattttggacaggaggaacatgtac

SEQ ID NO: 104611 - DNA, 2486 bp, Cannabis sativa
ttaacctcgttgattagcaacgatgcacattacgtttaaaatcacgtcaacatgcctatgctagttagggtgttacatatatattatgcattacattattttaataagaaaataaataaaagacaaatataaaggaaacttataaaaaatttaagctcgtggtatgttaattttatattatggcatattcatttaatttacaaatatatcatttttatgtgctgacgtatatcaaaaaagaaaataaataaaaaaaacttaataaatggtagttcttggaataatacatacatgaatatgacgaatgaaataaagaaagaaataaaaaactaaaaattgatattatttgtttaaagttatatgtataccatataacaaattagtatacaatccacatttttttattttattttctaaatggtatgtcatagtacacaaaatgtatataccataatgcaaaatgtatatactactaacagaaaaatttgactgagacttttgctgttgtttgggagcaatcgttgtaatttaaagatgtgagaaaaccagaagaagaaaaaaatgagtagagcttcgtcgccttcaattgtgaggaattaggaaaaaatgattggattaataaatcgaataaatggatgacagaagaatatttcatcgccttttgggaaaaatcactgtaatttaccaatttttttgaagaaatccaaaccaaccgaaaaaaatggaggagaggaaagcttcgtcattttggatttttgagcagagcttgtgcttctatttggagaatgaatataatctgaatgattctcttatataattaagggtattttaggtactaaataataataaaggtcatttgctatattatttttaaaaagaaacattaagcttcagtgaaaagagttataaggccatttgctactatttttcttttgaaaatatatcacaattgttaatatttctcattcaacttttacatttaaggaaggtttggttccaattttcattttaagtactaacatgtctttataaattagtaattattctctctaaaaataaaaaaaaaatatatatatatttttttataaatcttaaaaaaataatttagatcgttaattttttttaatggttaatgaaattaaaaaaaagaaacaaaattttttaaaactaattaaacaattaaaaaattaattatttttttattaaaaaaatatatttaaatagaaaaaagtatattaaaaatttaatttgtgtcataatcaaattttacgagaacaaatttaagtctatttttgtctcaaaaaatttaaatttttttgaataaacataatatttttagtttaattatctattttttttaaacaattttataatttttattaaatttttaattttttattaatttattaggatttaagtgaatttgtaagtataaataaaataaagtttgaaaatattttttcgagattaatttagattttttaagtaaaattatttttttaattaatttaatatttttatcaaattttttaaatatttttttaagaattaataaacaattataatttttaaattgagttttttaatgaaagtgggaaatttgattattgatcaatgtttaggagtgagtatattaattttttaatggtaaaagaaatggaacttaacatataaagtgtataattgtgtaattgttatattttagaaagaatttttaaccaattgtatattttaggggtacaatctgttagtttctaaagttttccaatcaaaaatactcatttgtatatatatttttttttgagaattctcatttgtatattcatgtttgatataatcacttaaaggaatttatggtgctctttgaaatgcataatagttattgacaattgacattaactattatatcaattacatgtttatgtaataatttagattaatattaaatatattttagatttgtttcatacatatatataattggatttcgttttttatatttacatgtatataatttaaagggcttttttttagatatatacaaaaaggcaattaacttacaaaaatacattggatcggccctttaaatttttatacagcccataaacaaaatattacaattatacctcttcttctaaaccttcatttgcatgaactaaaaatctcaccaacgtaagcttcgatcgatcaacctaacaagacaacctatatgaaacgaaattaggtgaaatactgccattaatttcgatgatttcacctgaaaagaagacttgaatcaatccaaacaaatataatttcatattgatgaaagaaagaacagaaaaattggcttgaaactaaaatttaaccatgaattctgatttaattcgtaaagaactgatcctcttaatatctatttttagaatcaaaaaatatagatctctaataaatagatatggagctcccaatcaaagtcaggtataatccaaaaaaatagaaaaaaaaaa

SEQ ID NO: 104612 - DNA, 597 bp, Cannabis sativa
tgaaatttagtgggccatagaaaaaaaaattattttggacccttatttataaaaaaatgtggtatttttcaaaattagtaaaaaaatttgtataatttcagaagggaaatattttttttggggcccctaggcacaggcctagcccgcctatgcccagggtcaggcctggttaaacgtaaaccctaaaccctaaaatatataacacagtaaacacaactaactaagtaaattacaacctatgtaaattacaactaaccaataaatcacaactaatgacaatcaataatcataaaaaaagtttaaataatggtacatgagtctctgtcttgggcaaaggatcattttcaacatattatgctattttttctgcttatcttctaaaaacggttggatcttgggtgtcctcctcagcctgtgcagcatccacccactctcaaccaggttctccacaccatcataagagattgtcctcacatattcctcattttctgtgcgtagaagtagccccttcaccacttcaagatgttgtttaagattcaaaaaataaaagagaaaaatgatgtagcatttatcacaagcatttatcttaaataatta

SEQ ID NO: 104613 - DNA, 545 bp, Cannabis sativa
  modified_base (30)..(46): a, c, t, g, unknown or other
tagggtgctaatcaacatacttgtgagtannnnnnnnnnnnnnnnnaaataatttccaacatatatatcaagagttatgtgtataagacataacctggttagaccctgtatatatcatcaaggataaaccactaaaagaacgtaatgtatgaatatgtatatatgaacagggttatgcgagcaaagcataatcaagttagactcggtaactataaccgacataaacactagtaaggccttactataaatggacgtgtgagcctaacacgtgggtctatgctacatagacataaatagagtgtgagcgtaacacgtgggtctatgctatatagacataaatagatgtgtgagcgtaacacgtgggtctatgccacatagacatatataggtgtgtgagtgtaacacgcaggtctatattgaatatacaaatagtgcaatagcaccattaattatgtgttatatatttattgttgacatggttatttatactgtcttgcttggcttggctcacgggtgctctactatgcaggaaagggtaaatcagt

SEQ ID NO: 104614 - DNA, 780 bp, Cannabis sativa
cattcaagcaccagagcacaggcccaagcccacaatcctcgaagcccaaggaataccattgatcgacctttcgaccgggcccatcgatgacctcgccaaggagatcggcgacgcctgcagaaagtggggtttctttcaagtgatcaaccatggagtttcgcctgagagtcgacggaagattgagtcagcggcgagggagttctttgcgtggccagaggaagagaagatgagagtgaagagggacgaggtcagggttttgggatactacgataccgaacatacaaagaacgttagggattggaaggaggtctttgattttgtggtggaggatccaaccattgttccggcgtcggtagatgctgatgatcagagagttaccacgtggcataatcaatggcccgatcagaatcctcatgtattaaggtaaattttagtgctttttatttttaatttttattgaactatagaggggttgatgaatgatgatgatgatgataacattgtgatttataatatgttaaatatacattgtccgattgtccctaggagtcatatcaatctctgttcttataaagatgtgtccctgctttttgttcttatagtaaaacaaaaacgccaccagggacggagctacaggactagttttttttttttttttcttcttttgataaaaaaaaataaataatgaactaatattatttaggaaaactacctttatattattttttaattgatccttcgagttatttggtgatttctatatgagttgttaagtaaatt

SEQ ID NO: 104615 - DNA, 508 bp, Cannabis sativa
tctatcgttgccccttgaaaattcaaaccaaaaaaaaaaatcaaatctttattacatacagtacccaatttgattaaaaaaaaactctaatattcaattagagagaactcaacaatgcatcaacatatttttcaagacccatttttctttaaccctaattcgtcattgaccatggctgcattgacatatataatcaaaattaataattcaaatctgttaaaaaaaatttgagagaacttaccgtcgctggtgggagccggagccggagctagagcagacgagtgagccataataaaaaatagagaagcagcccccagaacgaactctttctgcgacgaatcaaaaagggtggaaatccttattaacctccacaatcgccattgtcgtcgtcatcatcctcctcgtcgtcatcagataacggcaccagccagcaagctccatggagatgatcgttaatgcagacgaaatacgacatcacacaagagaaaacggagagagagagagagag

SEQ ID NO: 104616 - DNA, 1583 bp, Cannabis sativa
tttcgggttgaacacatccaatatttcccttcttgaatgcttctaccatagcaccatgataattctgaactacacaactcatgccaaaagacaagactcggaacaaaaaaaaaaactaaaagaaaaagactaaagaaccatgtcaaaagacaagactaatgagaaaaactaaaagaaaaagactaaagaaccatgtcaaaagacaagcctaatgggaaaaactaaattagtttcaacacataaacacaagtattaaaattaattaaggaatgaactccttatcattctaacccataaaaacactaattggaattaaactaataatagtaaattaattaataaaaacaaaaatctgaaacagaggacgtcgttgaaccgaaccgaaccactctcagatgactgctcttgaacccctcatagacgactgctgttgaaaccactctcagatgactggccgtcgttgatcggcgacaccggccgactgaaccaaacagaagcttctcgacgtctcagacaattaataagtaattgattaccttaatgacagaatattacctttaatcaaatccgtaattcattcttgtctatagtcaatctcgtgaaaagttataataataccaaaatatttatcatatctcttctagttaaaaataacaatcccacaccgaaaaaagaaaaagagtcgccaaagataaggatacaaaaaacaatcagccaattaaaaggtctattaatcatctattagcaacattgtcgttcaatgaacttcatctcaaaaaatatataataaaagaaccaaataaaatcaactatatcctgttaacaaaactaaaaaatttagaaagtaagtcaaggtttgaaaaagactaagacacttatcaggtgcctagatcgtaatagacgaaagaaaattcatagatcaagaagtgaatattgctaataaataagaatcgtgatgacaaatgaagaatcatagattgagaatcgaggcttttaaatttgttgcggggatggagaatttaggaattgaaatcaagatgagagaagagaaaagggatagcattggactaatacacattattagtggtaaactataatttctatgtaaattattatgtgaatttttgcaaaaaaaaattattttaaaatataaaaataaaaaaatttcacaattatattagtccataataattctaacaccatacacaaaattcttcatcttcaacctaatcctctattttaaataagaccctcttgaaaaagagggtcttatttaaaataagaccctcttcaattagccaagtcctcacccctttgagaatttttgccaatatttttttgttgagccaagaatgaagaaacagtcctaattgcattttgtttttatttttaatttattttactaaaatctatttttgtaaaataaaatatgatttttattttttatttatgaaattatattaatttgaagtggcctaataataaattcagcactaataaattcagtcagcacttcaccgactaaagtaacgaaaatgtaaagtatttaattcgttaaaaaaaaaaatgtaatatttaagtgt

SEQ ID NO: 104617 - DNA, 819 bp, Cannabis sativa
tcagtatgggtagctctattccaataagggtcctgacgagaaactgaaataagaattgctcaactctgtataagtactttatgtaatcccaatcccacataaaaagtaacacgaatcttttaactcaacctcaaaagtatgataagtacaagatcctaaactaattatcatccaaaagtaaaaacatgatttgtcaaataagaatgaaacaagattagatgcaaacaaagaacaactcaacaatattgtacaaaaacgagaacaaaagagattagacaatgcaaactcccagagattttctgagggagtcaaagcgacttgagtttagggccttggtgaaaatattagccaattatttctgagtatcaacatattctaactttaaagttttttttaacaagttccctaataaagtgatgccttatatcaatgtgttttgttcgagaatgttgaacatgacttttggaaatatttatagcactagtgttatcacaaaaaatagttaaaacacccaattcaaaaccatagtcaatcaacatttgtttcaaccataacaattgagtacaacaactaccagcagcaatgtacttagcctcaatagtagacaaggaaatagaattttgtttcttactatgccaagaaactaaattgtttccaagaaagaaacaacctccactcgtactcttgcgatcatcagcattgcctacccaatcaacatcacctaaaacaagccaagttagaattagtgtctttagaataccagattccaaagtcaagagtactattaacatatcaaataatcctttttagtgcagatac

SEQ ID NO: 104618 - DNA, 1110 bp, Cannabis sativa
ttagctctagaactactatcatataccactaaacaaactaatttaacgagtcattcgcagttacacagtctaaattagttcatacttacacattttcctaatcttgcaaccataaatttacatacaataataaattcaatgtagttaatttatcatttacatgttcttaatttggcaaatatcccaatgcagatagttccaagttcaaatctaagcttataatttcaaaaaaagaataaaaattcaatttttattattaccttcaatctatgattaacagcaggatgaatatcaatatgagcatcatcgctaatctcaccatcaacggtagattccttctcgtgttctctcttcacatacttctcatgatcagacaaagccacattgaaatcaaaagcttcgtttcgctcagaaaatcccaacccaataaaagcgtgttttccattaccatcttcgatcttaagaacaaaatatctcgacgaatcgagcacggtttcaactgaggtctcacgctgaccagggtttacaaaacaagcagcgaacaactcacccgagttcggatcctcgagtcggatctcacatcgatccttacacgatacaactcggagtcgacccgtccagatcttgtcagactgaagccactcgccgcacttgtacccaccggaggtactccggggagggattttgtatacggccacctcgcgaactaccagaagagtgtgctcaaacgactcgtcttcatcgtcgaacgacatcgtttcgatacccaattttttttttcaaaatttcagaaaaaagattggaaatttaagttggatttggggtgaatttgaagagtggtgagagtttttgtgataatgggatggaatgaagtaaggtggaatgagggcatcaatggagttggggcgttgcagagacgtgggttccaagccttgcctaagcctcaaagaaaggtcaactggattgtcttcaattttactattttacccttgtccttttcttttatctctattttgtactactggtttttttgggctttggaattaatagggtaaaagcccaatatgtgggtcttgtgaggcccaaacgaattcttacatggaaattaca

SEQ ID NO: 104619 - DNA, 510 bp, Cannabis sativa
ctcccttagtgttttgctcattgatggtaacctatcttaacactagtaaaaatctagtcttaagttcaataggtaataacaagtcaatagagtgaatgtggtattcaattgttccatctatgtacatacggtgaaaattaagggttaaaactgaaaggttttttaatggagcttaagcttaagaagtgtctaaagagtgatgagacactaaaattctacctatatgggctaaaagtggtgccgcctcttataaaattgggagttattctctagagagtctatgaattagaatttcgcacatggccattaacggtgcaagagcgagacatgcggtctcaagtgagtattagttagggtgtgtgtgttatcaccggtttgtactaaaggaatagtgattcaatgctacaacaaccaaatttttatcaaactttatggtaattacactaaggtaaaattcaagtcgaaaaatattttacctaattcacctaagcaagacttctttgaaagtgt

SEQ ID NO: 104620 - DNA, 773 bp, Cannabis sativa
gttgccatatcaagctaccacgtggaaagctggtcgtcaaccactagcaatcaaagaaaaacaactaaaaccaggattagttcacctggaaccccagaatatgtcagggatgtgggaatatgttagggattgaccctgaacatcaaaacctgttttatcaaaaccagatgctcctggaaaattgataaaatatacaattaaactggggaagttcttatgatattaatgattgtaaatcacatttctgatgtaatattttgaactacagttgtgaataaaataataatttctttcaacaagtaattgtaaagcgtaaaccctttaaaattacttgaggggcatatatgtatgatcaaccggaatcaatctagaaatacatagtacaatgcaaacccatcacttcaaaaataaaaagttttttgaaacttttttttaaaaaaaaggtcgtcgaccaaacctttttgacgaaagaggggtcgaactgttataactccctgaccaaacctttttgacgagagaggggtcgaatcgttataacgccttgatcaaacctttttgacgagaaagggatcaaacaactgtaatttttggtttaaaacctatttgatgagaaaggaaaatcaaaagttacgactagcgcataaagctgaataataacggctcgcgctaagtgtaatatctcgataagcctaatggtaaataattaaggtttatatttatactatgggttaatcaagtaattagtgggatatgatcttactaatctatttcat

SEQ ID NO: 104621 - DNA, 626 bp, Cannabis sativa
  modified_base (34)..(47): a, c, t, g, unknown or other
ataaataatttcatgattaaacataaacaactgnnnnnnnnnnnnnnaactaagcgggctttacattacgtccttgggtccctttgaaccagggtagtaacgtttcactaatcaagaagtgtgttttataatttccaatgcaatttacaaattgtatttcaatacacactgttatagattcaaataaaatattacacaaccaaccaaatccctcagctgagcatcacaagatccctttgtgactttgttgaaattctttcaacaatatatcaacctgaaattccttttaaatctgagctgcgaagataccaaccgaaatcccttctgctacatcatctcaacaacaaccttgcacagaactttgaagcatgttcaatggagttcctataaaaaataaactcaagaaaatattgaaggaaagaaagacaaagcaagaaccttgagctgaatcgacctaagttgttagttcgtagctgattcaagaacctcctatgtatacttagattaattaggtaaaaccaaaaaaataaacaactgttaacgataaaaagacaccgcaaaaaatatggtgacatggataaataaaaatagtaaaactccattggtaactccacaaatttctaaca

SEQ ID NO: 104622 - DNA, 866 bp, Cannabis sativa
  modified_base (203)..(210): a, c, t, g, unknown or other
attagggtgctttatgaaacactgagattgttgattatgaatagctataaatattctttattatgtaataagtgtgcttgcataaacattaagttgtatgtgtacattgaatatgtatgacctattggtacgaatactatattgtaatgaaatatgctagcactttccatgatgtctaattagtagcttttcttgctgagtcnnnnnnnntcacgggtgcttcgtggtgcaggtaaaaaagttagaagctgcgttcgaccatgagtcaaaggtctccgagcaatgtacatatcagtcgtggtgtcttagcttccgggaagcaggatcgacttcttttttatgtttggaaatgtaactttaatttttgtaatagtgattttgtaacctattgtaaaagaattttataaacaggggatccccgtattatggtgtaataagtatgaaagttttatttcaacttaatcaaaaagtttttaattaaactacactttttctaaactaatagattagaaaaaaaaaataagtttgtaaaagcacacatgtggcgtccctgagggtcaggacattacaacatggtatcagaacgaccaaggtttaatgatcctgaagactggctcgatatgtacattggctgcgaagactcgttcgactcatggcttagtaagtgctaattgttagttgattaatagactatttattgattgtttgaattgcctgcttatttgaaatgtgtaagctgttagagaaacatgataagttatgataaaattgttaaatatgtttaacacatattagcatttattctggtttgaaagatgttaatgatggaaagaaatggtcgcgagtgtactggaagatgtacctgg

SEQ ID NO: 104623 - DNA, 517 bp, Cannabis sativa
gtcacacttcacacttagggttaacccctgacttttaactcagtaaaaattcaagcgtggcatttacaattcagataatcatacagagctcagaacgagctttgcaacgatataaagaactcccaaatcggagttcggaatcaaaagttacgaactttcgaaaatcaactcaaaactgcccaaaaacatgagggcggcacctgggacaaattcccaggtccactcaaaggagcgcgccgcggcatgctccagagcatatcgtggcatctgggtgcagaacccagaaaaccagcagcaaaccttcgaattttcagcccaaaactcaatcttttcattgcaatttcacagccaattcacaaatttgcatataggattatttgcacatactagatactcatttaacacattacatacatcaaaatcccagaaatcaaattgctcaaaaacactcaatatcatgcttaagattaacaaaacctaagctcaaactcaagaacttcaaaaccaagttcttcaa

SEQ ID NO: 104624 - DNA, 2132 bp, Cannabis sativa
cattgtaagaacttcaagtacaaaacaataaaaaagagttggattatggagttagataagataaagatgaaatatttattaaaattaatagggaaacatgtataataactactggtgcaggcttgttggttcttgtgaagtgttatagtttttaggttgaaaacgatggaaatggatcgaagatgtagccaagattaaatgtaagaagattaattaatttaaagaaagagagagtgcaagattgtgggggtgggattgcctcgaggaggatcaaattaagaacactctgggtctggggactaggggccttgtggcactcattattttttattcatttcatacttgtcattgtttttttttatttttattttgtcaggttcatctcatatttgttcgaacgtgaaaaatgatttgttgacgtggaaatatgtgtcccagatactactctttctctctctttcacaaaaaaggagtttaaagtttctattaggcaaacccacatgttgctttcttaacctccttatattaaatgagttttaccttttttacttgatgatacactttcattgttgtttcttaaaacaaataagaattttttacgggcataaatatttaaatttaattttcggttgtaaataaatatttaaatttaatttttagctgtaataatactgaaattatatttttagaactctgtgagtactaactgttaattttttaaaagaaataaaaatttggaccaatcaatgattatcatttggtaatttacttaacttaatagttaggtacctataaaagttttataattataatttaattattattaccgtaaaaaaattaaatttagatatttattcataaataagagttaaatttaaatatttatatcgtaaattacttaaaaaaaataataattatttcaccacctaatcattttttttgaacaatgaattagaattcattgaaaaaaaagcgtttagtacatcgacaaggaaagaaggaaaatcctccatccaaactagctgattattcactctaagtgcgtgcacagctaattaatgagcagccatattggccgaccgatagacatgaatcagggacgtctcaaaaaaattggatagtagactagaaatatcatctaaaagagaaccaaggtcattacaaagagaagatcttttaggaaaagcagaaatcaccacctaatcatttgtttatatataatataagtgattttgctaccaaaactattagattaaagtaacatttgtaacttaatcatatattctcttaaaatcatgaatatgtggaaatcattctcaaagattttatatatatgtggccgaattttcaattatgtattcaagtggctacgtaccaccacacaaattggttaacctatatccatctataaggacaagttttgtcaactttttaataatggggaattttccctcttgaataatatacgtaaatggtatccttcctttcttaaaagatggacaaaagaggaaacatatataaaggatttttctttttaattttttttttgggtgggggggttgcttttcccaatttgattaagagggattatagtatatatagtgtagtactagtagtagtagtctaatatggtccacataccagggtttttgtagttactatctaatcttggtgctcttttagctcatatcatattgagagttgagacttgagagactatatatatacacgtaaagcttagtcatacatgaggcacgtgaagaggagagggttctaatctgatttggccaaaattcacatgggtctgttggcccctttggaccacccaccctccctctttccattgcaacaataatattcttaattcttcttcttcttattgtttgtagccatataattcttgctccattacccagaaggtaaaaaaaatctttgcttgtcaattcatattccctaaccccaacaaacaagtgcttcataaaatataataatatgccagagagtacacttgatctacataatgttatagattttttttatatctttggttttagagctcaataattttaatgtgtataataataagctaaaagttttattgtctaagcattcttatataaagaaaattaaaa

SEQ ID NO: 104625 - DNA, 1282 bp, Cannabis sativa
ttctgcatcagcctgagttatcgcgaacacccttgctggagtgggttttgctgcggtcttcggtgctttagtcttgaattggggaaaatccctttataatgccctggcataccacactgaaaatatccttgccctctacactcccccaaatgatgcttcttacaactggggcactctaggtaagtgtatcgggtttcagagctaccctgtcgattgcctcgaccctagttcccttggaacttcttattctgacttgagccactggatgtagtaggcacgtttctagtctgatcaatggccgagccactacctcccctaccaaagcttgatgtaggaagggtaggagccccaccaacaaccggagtctctcgagattctaaggtgcacttcactacaccctctgcccgcaatgccttatccaccatatcagcataggtggtgttgccatcaatagtaatcattaggccgtgtctaatttttgcatttaatctatccaggtacttctctttcttactgaaatcagttggcacaattcccaaagccaaccttgccatgcgatcgaattgcgtcatgtattcagtaacactcatgttctctttctgagtcagttgggtgaattcttttcttttggaacttctgactgcctcgttatcatacatggcattgaacagctgctagaatttctcctaggtcattgtggttacatcgtgaatcatggacaccatgtcccaccatacccgagcatcttcttaaaattggaaagtggcacaggccaccctatcattaccagtgacgaccataaagttcaagatcctggtgatcacagttagccactgctcggctttcattacatcgagacctacctggaaaactggaggtgcctgcttacggaacctttcatacaagggttccatctgattcactgaaacaacaggttcggcctgcgcagtaggggtaggagctactggtaattctggagcagagactgtaggagcaccctactgtcttaaccgccgaatctcttcatcttgttcattaattctcgcttgcatttttggaaacctttttccctttctttggcagcttgggcatcctgtggcagattaacatcaccccgaccacgtgccctacccgtgggacctctaccttggccacgaatattacgggaaatcttagctccctaacaaccacttgatccaatcgaattgtcgtggctcctggtgcttcgcctggcgtccatactaatttgaacagcctgtgtaaccaagagctagtctggtca

SEQ ID NO: 104626 - DNA, 1295 bp, Cannabis sativa
tctcattgtttcggcaaagtgacttaagtcacaaatcaggtagtttcgagaactggtgagcagcttcaccagaacatagaaaccagctaagtgacgtcaaattatcacttaggcctcaaaaaatacatcctcaacgtgtttttctcttggctcaacatccaggttgacatcatatgtcaatctgggctctggtatcagagcaaccttaagtaaaatgactataactcactcaatattgatttgattgatgtgattcaacttgcatttcgaagatatttcaatgatctatcaagtcatggatcacactccaattgcaattatgaatttatcaagttcaaattttgtcctcaagagagtacgaatttcaactacaacttagttagagtgggtcccacagatgcaactcaagctctggaaattgatgacagacctctagaatcaatttcactgttagatcatcatcaacggtcgaaaatagcttaaattattttttttttttcatattttattattataataggacatccttccttataaaaggagagttcatctagttcgtctttcacattcataaaagtacacataaggttaaagcatctttctagtttctctctaaaaattagaactttcaaacttagctatttttcttgtaatcatttttcgtgagaataaaaacttgaagtggatgtagctctaattgtgtcgtgacacagggagtgaactactataaattcttgtgtgtgctctttattttacttaattacttctaaacttcatcatctcgtcgtttatacatacgagcggcgagttgggcagatttctgcgtcaacaatcttattttctactaaagcacatataatcataaataataatcaaattattgattttctactaattctcatgtttaaatatgcggtcattacaggtccaattctggttcggggtccagatttggttccggtttggggtatgagtctagtttcaatttcggttcggggtccaggtctgaggtctgtgctagggtctgagtctagttcctgttttggtttggaactgggtccgattccaatttcagttcgaggtccacgatcagggtccggggtcaggtgtcccggttggggttctagtttgggtccgagttcaggtctaaatttaggtctaggtccgggtctaggttcgggatctaggtcaggatatgtgagcaaaaatataaaaaataatatgttagacaaaaaaaataatttttgaaaattgaaaacagcattttgatgttttctgttttctagttttttaaa

SEQ ID NO: 104627 - DNA, 542 bp, Cannabis sativa
  modified_base (286)..(295): a, c, t, g, unknown or other
gacgtacaacaaagataccaatcacgtactcctggccgaatcacttgatgaaatcaaagagaaatgagtcacatcaaacctaaagttgacaggccatcaacaaaaagtagctcgatatttaaacaaacaagtgaaggctcagaaattcttcgtgggagagatggtcctaagaagggtatttctaaacaccaaagatagcacgacaggtgtactcggacctaactaggagggaccatatcaagtggttaaagttctcaaatctgaagcatacaaattaggtaagtannnnnnnnnnatgcaactcgttctagtaccacgatattggaattgggaacatttaagaaaatactaccaataaagtaccaggtcggacgaccaaactaagtactgaaagaacatttacttttaactaaatggcctgctgggcaaactacgctcaaaggtttcgacaaaagaaaaaaaatactcaggtcggatgaccactatttaaagtaccattgcttatttctgcaatttgttttatttcatgttaagctaaaaga

SEQ ID NO: 104628 - DNA, 992 bp, Cannabis sativa
atgtcttttataaattatcacaactccctttttttcacttttttaatttatataagtcaaaattaacttgcatgacacaccatacataagcatttattattttgattcacacaaacatattacatgtactcaaataaacacttttaacgtaaaacatgaattcatacaaaacctttttacgtaaaattttactaaaatactatttattctaataaaatccaaataaatagttaattaatcacaattaattataataaatacctacagcaactaataaattataaaaccaatttcactttatatcatagacagtaactggtattacaaaaatacattttattattttaacaacacttaactattttttataattagtttaaccattaactaagtaaattcagtaaaaataccaaaaatgactaaaaactgaatcttactattctaacgtagtttatattctatactaagccacaaataattttctttgaattttctaagcaacctaggtatttttcataattaaaataagaaataacatcaataattcataaaaactacataatcacctgaaatttcaatctatcaattttataacagtttatatatcatagcccatcatataaaataagcctagatttttctgagcagcctaagtatttttcataattaatttatgaaataaactaaataactcacaataattccaaataaattcagaaaattatgaaacttcaccaagcaccttagaatgaaataagaaatcaaaatctgaaaaaaatatttaagaaaaacaccacaaaaatgctcagaacgtggtccccggcgttctcgtcagtttcgttgtcggcaaagtgtaactttgtccccgattgctcttgacaagtccattcgattggggaagctctccacagtgctcagaacctcaaaacaatcaagatcaacccaagaaaagaggtccaagttggcagatcggagtcgtctccttcgttggc

SEQ ID NO: 104629 - DNA, 939 bp, Cannabis sativa
  modified_base (71)..(77): a, c, t, g, unknown or other
cccatatgtcgcataactacatcacctaatcaggtgagcctatgctaaaaacctgcacccatatatcatannnnnnnatcacctaatcaggtgagctcgtgccacaatttggcacgaatatatcgcttcatctaattagacgagctcgtacctacgcctggtacttatcatatgtcattgacggccgtacttaagcccagtacgtcgctcgcatcacctaatcaggtgagcctgtacctacactcggtactcatcatatatcactaacgcccgtacttacgcctagtacgtcgcgaggaaaattgcatcacctaatcaggtgagcccacatatcacatgcataatattatcacattatcattactcaaccaattagtcttttcattatatatcaatattaactatatctcaatattaatcaagtcataacaatagtaattatattaaatacaccgtactatgtagtacaatatacttttctttcctcaagtttcggttcaagtatgttggctgatctacttgaagtacaatcgatgatctcgggccctaagtcataacaataatagactaacaagtgtttatctcaaaatactgcttaataattgcaaaggacaacctaaggtttcctaccaaaactcatagttcaaatacactaaaataaaacttatattttagctctaaaatatacaccatatggtagagcttgttgcaagcttcaaaacgatatatagaacgtccaaaacgaacactcgagtgaaaagttatgaccaaaatacgattcccgagttccctaggttgctcgaaatggtaaaccggttggccagaatcggttgactggcttacaaactggttgaccggtttatcaggggcaaaaatatgatttttttcaagtttacccactcaccgaaacgctaccagaacctgtccaaaccaccccaa

SEQ ID NO: 104630 - DNA, 771 bp, Cannabis sativa
catgagtaagacgatttgttgaagagttttcacaggctcagcacaatagatcaccaacactagtagtggaacttgaagcacataatgaaatgtaccaatagacaactaagtaccgactcatatattttttttatctatttatgaatggttgaagaagcggtctctgcacctagctatgaatggaaagcccaacatataggaagtagggagacttagaatagtagacgttatactagactgggatagtatatgttacaaaacccacttattacgaaggatgaaagaatagatcttaaaggagcaagtactatattgttggatattctataagttacacactcctaagttagatggaaagcagtatgaatactgtatgcaaagactttagagagaagtctgttatagaaatgagtcaggagaggacgatgccatcttatagaaaggagtgtagcgtgctgaatagaatccaaaataaaaagttagaaagagatctgttaaaattagctagaggtaatttcttatgaaggtatcttgaataccaaaggataagcaaagcatcaacaaatcataggttaccaaaggagaagctaaaagctttaaactcaaggtcatctactttatggaggagaacgaagtaaaatgtgcatagtttcgacaatttttttttctggaatgaagacaaataaagatatagacacaactaacaatatggttacaacatcgatgagagacaactgaatgggtcacaactacacaactaagagattgtgg

SEQ ID NO: 104631 - DNA, 1702 bp, Cannabis sativa
aaaaacacagtatttttgaaaagatttccgtgtgacagtatttttgtaaaagttaactcaaattctaatatttttgtaaatttttctaaatataaggaaaatttatatgcacgttttttggtattttttttggaatgaaattagaaaacttcattaagaaagaatagccaaatcggccattacagcattgttaatagcatcagggacattgctaccaacaaacaaacaatctgaccaataacaagaaccacgagcaagacaatgagcggcgttgttagcagatcatttaacaaaacaaacattaacataaggtaaagactttaaaagattacgacaatatgtaatagtagatccaaacatagattgcatgaccacattactttgaagagcttgaacaaccacaagagaatcagtttccaaaataacatgttcccatcctttcttttttatccaactcaaagcttctttgacaccaatggcctccactaaactgggttgaacacaccctgctttgtgcaaacaaaaagcttcaatgagatggccattagcatcacgggcaagaccccctaaaccataacaatcggatgcagcaaatacagcaccatccacgtttaccttcaaaaaaccagcagcaggtgctgtccaattagtgctattgttgctggtgttgtttatgacagcagacaaaggagaaaatctgttggaagaagtagtcttccactggttcagcacagttttagccgtgttaattacctcagccactgtagtaacatttttgttccaaagcaactcgttccttgctttccaaataacccatgacaccataagagccccttcaaacaccacagcctgaccacggtttaaaatttgctcaacccaggtaccaaaatcagtcgccacaataacactagcaggcacactagacaagttccaaaccgatcgagcaaagttgcaggaaaccaaaacatgataaatcgattcttcctcactgttgcaacagacacaatcaagttgcacaggtacatgtttggtgtagagttgagttcgattggggagacaaccagtgattgctttccaagaaaagtgaataaccttaggagggactttggttttccataaagatcgccaaagattcaattccatatctgcagaccatctccctttcaaaacttgcaaccattggtagcagctcttgacagaataagaaccagaattctcatgttgccaaaaccatacatcattcactacatcaacatttaaaggaatgtgcatgatgagatcatgttctcgttgctcaaatagatcatcaagtatttccacatcccattgatcgcgctctacagtcattaactgattaaccgaagcccccacaagaccaggatgtgtactcaatacacacgggttagtcttgtcaggtaaccacggggtgttcaagataggcacatttaaaccagctccaatgcgaatacgtgctccagctgcaacaatcgattgagtttcatagatactcctccaaatgaagctaggattgttgccaatctcagcagtaaggaaggaaccatgagggaattatctactcttatagattcggccaacaagggactggtcattagttagtgttgatgagtaaaaaaaggaaatagaaaagattatgtaaataaataaaataataacagtagaaggagcaaattagtaaatagat

SEQ ID NO: 104632 - DNA, 1273 bp, Cannabis sativa
tttcaaggtgcaaaaggcttacgataagggaacccaatttcacctctgatctttattctggtgatggaatatataacttcgactctaaaatggaagactggaggtaagagttttgcttttcatccattatgcaagagtttgaatttaattaacctatgctttaatgatgatcttattgtattctgcaaaggaaatgctaactcagtcaagagcatagctgatgctttctctcattttagcaactgctcggggctcaaagcaaaccagcataagcctaacatttattttgcagaagttaatgaagcaactagacaagagattcaacatttgataccctttagcacagggaatctcccattgaaattagagcaaccaaatggagacaaaaggattgtgagaccatcatcaacaagctcaaaatgaaactagacacttgggctagtcattatctctcatttacatgtagagctctcctcattaacactatcttgattggaattcgttgctagtggatgacaatttttcaactccctcaaaaggttacaaagagatagatcggatatgcaggaattttctatggggagaaaaagacaatacaagtaaaatgcacatggcatcttgggaacttatttgtaatctgaaacaacttggaggattggaatttagagagggtcctaaatggaacaaggtattattagctaaatacctttgggcaattgattctaaataaaatgtgttgtgggtcaaataagtgaatagcatttacctaaagggcaaagacatttggtctctagagctaaaaaatgatgtgagtcggtattggagaaagctcttgagacttaggaatgtcttcaccaaggaggacattgttcaagcagaggtcaatgaaaaatttaagattgggataatctatactaagcttgtgaatggagaccaatatgagtttatggcagcaacatggtgcaatctttcggccccgaagcatagattcattatgtggcaagctctcacaacaatctcttaactagagataatcttgttaggaaacatgtgccaatagatacaaggttttgctctatttgtgagtgggaatttgagtcacataaccatttattttttgactgtccttactcttggagaatcatgcaaccgattaaggaatggcttggtagtcaactttggcctaccaatttcgaggatcttcggatttggctcaagacaaagagatcgagaagactcatttggggtattttctttgttgtcgtaacaagta

SEQ ID NO: 104633 - DNA, 1887 bp, Cannabis sativa
ctgctacatatctccaatatcaaaaggccattcaagctgctgctctacactagaattctgctgccaaaacttgcagcacccagccagctccacaatcttcattgctgctccatccgaaatggcagccacctgaaattggctcgtacaagatgaatatagatgctacccgtgactctggtggtgcaattatgggtgtaggcgctctttttcggaacaatgaaggtgcagttgtagcaggtctttcaaaagctattcaagtatgctattccccaaaagaaatggaggctactgccatattttatagcttgcaatgggccttgacgcgtcaactacaaatacactttttgagtcgaattttcttttattagtcaatgctgttaatagtttatcttctactaagtttgtaactcattttcatgacatggtagtcaatattaattatcttttgttcttttttcctagagtaaaggtatctcatgttaaaagagatactaatcaagcaacccatgacttagctaaatttactcttcgattggatgaagatatgttttaattgggagaaattccatccccaatctttacttaaccattctcatttttaataataacatattttttctcaaaaaaaaaaaaaaacataactgatgaaagggtattattgtaatttcgaaacaaatgtgcttattaagtccagaaatttgacacgcaataatatctaaattgacacgccatccgaaataataaaaaactaggttatacttaacttctcctttcttcttcctcatttttgccccaaaaacctatcaaaaattacgatttcaattcaggtgatttcatttttgtaacttctatttctttcatgtttggattggattaaatttgatttggaatctcgtatttatcgcatttcttttctggattttgttattttctatatttgtacccatttaaatatcatcatcatcatacaaaatctagttttggtcggttgatttgatttcatcctcatatctcgttactatatctgcagaattttggtctaaaagattcatcagaaaatcaatcaaaatctaacaaaacagagtacctcaaatgatgcatcgtttcgttgacaatgttcttgctgtcaccaaagagtgagccctcttcctcctcttctttctttttgattttgtttttttatgtgtggaaatgtcggattatgctacaaggttgaggaacgagatattaatggaattgtaaagtgttgggtttgaattgtaaagatgtttataaagttttaatcttgtatgtttgtgtcgttggaattgatcatttagtttgaagttctttgttgaattttattagaaggttattattttttttaattgggagttcagttctgcctatcagggatagagagatagagaagtttgagtgcttaatcaatgtaaatttcaattttattgtcagttcaaacatgatctctaagattgtagattaaagtctataatggaattttttgtgtccttaactggaagaagaagatgtatgttgaacttaactgcaacatgaaaaatattgcattctaaatcattaatgtttccagtttaggatctacatacaagcactatcaaatgggtttccttcatctagttttttttaatttatatagtttctgttattagggtttgagtattcatttcatttcccttgtatcttcatactaatgctgacattagaatgttcttgactggcagcatttgtttataatgaatctcttttagctgccaaaattgatatgcatattttcttagttagtaatccgaatgatggtatttttctttcagtttttgatatagtattgacatacattggccaattgatgacattttcttcttcctttgt

SEQ ID NO: 104634 - DNA, 542 bp, Cannabis sativa
  modified_base (317)..(331): a, c, t, g, unknown or other
taataaagatcagaaatcgcattctatgctgcatggttcacatgatttatttcatgattatgttcaatgaatgttttctattaagttcaaaacatatataaatatgtatttatttgttcatgattatagcgtcgtcagcacagtggaatataatcatgattatatattcaaaagtttaatttccatgatttgtcagttcactggatttagagtggcatgataatcaacgataaggtatacttacaccttggataaatgttatatcctttctagggcattagcaaagtttaccggtatcagatgtatggagtatacannnnnnnnnnnnnnnattgatcttagataagatatcataaacgtactgttacattgtcaatatcaatggttgatcttaggtctatggatcttaatccttaaatggttaggttcagcttagctgtatattattaatgttctttgagttgatcgtggaagctaacttttggttctggtggatattttcatcttgggaacatggtagttcaattgagtgggagtgctga

SEQ ID NO: 104635 - DNA, 576 bp, Cannabis sativa
atgtatatttaaattaatttttaaacaaaaaataacactcagaccaattagaaactgtcacttgactattgacttgacggtcaaataagttcaaaaaatataacttaaatattattattgttaaaaattaaaattaattaaatatttatctgtaaattaaaccaaaatatttatcctgtaaattattatctgataaataccattttgtatcttgtattttgcaaaagttaccaataagactctctattttgttaaatgataaaataaatcgtgtattttctaaaattgtacacatagaaccctaaattgattttttgtcaaagtaaaacttaataataatctgatctagagatgttatgacaaaattagttacattttcagtagtgttaaaaattatcttaaagttggttacattaaaaaataaaattgttaaaaattgagctcaatgtcctatttgtataattttagaaaatacatggtctattttgttatttaacaaaacagaaaatccaattaataacttttacaaaacacatggtctaaaataatgtttacctactattattattattatta

SEQ ID NO: 104636 - DNA, 549 bp, Cannabis sativa
tcataattaatttatattacatagacaatcatatatatttttcaaataaaaatctacttacgtgtctttatttcatacaaagatctttgccatatagtgagcatgactttgaatttatatcacttaaggcatttattaaattcttctagaatttttagataagacttatttcaaattcttactatattaggacctccaaataaataatatttgttgcaacatttaagtggcacttataaattctcataaaatatattcaaagctataatcaaataatgattatactttctcaatatttaagccttattctaatcaatctcatgtctatgcaaactttatttaacaattcattttgtgtacaaatacatatatacaaaattctcattagtaatatttatttgcacaccctacaagtcttacttcattttatacgagtaaccttacctagactacgtcataatattttggccaaaaacaaaatgtatgttgataattctcaataaatcaaataccatgatccttgctatctcatgttagtttattgtatat

SEQ ID NO: 104637 - DNA, 549 bp, Cannabis sativa
aacgaattgctaactaaacaagaaggcaaggccatatatttttgacatgtgtagcatattaattattaacaagcattgctacactcttatttttttttatttaaccgtttatatattacaatcatgttttacctgggactcgaacccaagacctccaagacacacacccacctatggccacgtgagctagcctcaagtggtttcattgctacactcttaacactattatattttgacaccattgctataacacatgatcgtgatcatggtgtgtctacatcatgtaaatattaatacaattatttaaataaatttaatttcaatataaatatgtgaacatgatatttatttaaaccgatgttgagtattctaatatatactctttagcatttctccttttgataagtacaatatgtcacactacaaaatataattctcttatcacttattttattttaaactaaaatgtgtgaaaattgatactcaattagtatgtcatacattggtgtccttgatattagttttagtttttcatttattagactcggt

SEQ ID NO: 104638 - DNA, 517 bp, Cannabis sativa
gtaaattggttgctggtgcttgccgtcttttcgcactatagctgcactaatcgcatcttccgagatggctaaatagagaaacagtgtctctccagttattggttcgccaaaactagaggcgttactagatgcctttttatgttctgaaaggcctcttcacactcttttgtccattcgaactttttgttgcctcacaatatgttgaaaaatggcacacacttatcagctgacttcgaaatgaatctgttaagtgcagccattcttcctgtcagggcttgtacttccttaggctttgtcggtgatggcatgtctattgatgccttgatttttttaggattttcctcaatacccctcgcgttacctatgaatcccaaaaaactttcccgaggaaactctaaaggaacatttttttgggtttagcttcatgtaatacttctttaatatcttaaagcattccgcgagctttgatgtatgatccttactttttattgattttacgaacatatcatcgatgtaa

SEQ ID NO: 104639 - DNA, 717 bp, Cannabis sativa
ggtataggtgcctcccaagtgacccagcaaacttatgattcttggtctctttttttttacaagtatacttttttatctgtttgggtcttgggtttgaccagacctttaggatgcactggatggtaaattagcaacatgttagtaatttcgactcaatttgaattttgaaataaacatctttattcattttttgatataaaatgtgtttgttaccgtagtaacttacatcagagctatttgatctaatctgatctattggcttaacatggtataaaacaaattgaagaaattagaaattgttctttaaatggttgtcatccaacctgagtactttttcatttttgtcgaaacctttgagcgtagtctgccaagcagaccattcacttaaaagtaaatgttctttcagtacttagtatggttgtccaacctggtactttattggtagtattttcttaaatgttctccattccaataccgtcgtatcagaacaagttacattttttaatcatacttacctaatttgtatgctctggattcgaggacttcgatcacctgatatggtccttcccagttaggtccgagtacacctgccatactgtctttggtatttaggaatatccttcttagccccatatctcccacaaagaatttttgagccttcacttgtttattgaaataccgagctactttctgttgatgggctatcaactttaagtt

SEQ ID NO: 104640 - DNA, 596 bp, Cannabis sativa
attcttataacttctgttttgggaatctaataatgtggatgactgagaacatgatgtacaattatagaatcccgactttcctaacagatcgaatgttggttccttataagtgttaattctagaactggaatgttgtgcacaaatttagataggatttaaattatacttccaatagtgaattaatgatacttaaggataaagaagtaattcgaagggtaaaatagttatttgaccaaaactaattacaaaccaacacatagagggctaatcactagaattaattatatcaatggacactgcatttaaacttagtaaatataattctataattactaagagatcaattctatatttatagtgaagtaatcgtagaattaataaacaagaaatatttggttgatgagacttaataactaatctagttaattggagcttagaattataggtccatggtccccaaatcgccaccttgaaataccatcaagggtagggataaaaggttgtataaagatatttgaaaaatcttttttgaatatgcaaaatagtaattatttattttttgtaataaataaatattttttcaaattaattaaata

SEQ ID NO: 104641 - DNA, 509 bp, Cannabis sativa
caaggtataatgcttagccttcttctttatggttttctttagctcaagataggttaattgcatgattttagtgatttgaggttctgtagtgtgcagctagtttgagtttgaattctacggattacttaaaattgaagttagagagcctaagttggctctctaatggtgtttttaatttttgagctatttgatgtgttatgttgcttgaaatggatttagtatagtatatgcaagtgttctagagagtatggtagagtttgggctcgaattgagttgtggaggacatttttggagaaccctgcactgaaccggtcgaccggttcagggaagcctgtaacaaccggtcgaccgattgatccccaggaaccggtcttccggttgggaaccagtctgcttgttgggtttttttcagaaccctaccttaaactaagtttaagaataagcatactatgaatgtatattatttactagttcatgcatgattttataaatgatgtaattgatgtaaa

SEQ ID NO: 104642 - DNA, 514 bp, Cannabis sativa
gatccaggtttagatgttgataatgctctgtgacaaaaaggaatcaagggtcagagatcttgaacggaatgagtcattatatcccgctgcaacctatgtaaggtttttttaaatcaattttatggacactggtacgcttccgctaatctattttctattgtttcattctcttgaattaattaaggctaaattaagttttacagtgttcttaacattaaaatcatatatatttgatactttaaactaaaaaaaaaaattgatgattttcaatacaattaaactgtcttcaattttacaaattctgaattcaaatttaattatttgataacatataattgagaactatttggtcaaattaataaaattatgttaattatattttatttaagggtagcaaatatgtacaattttaaaatataaaatactaaataaatattaatattaaaaacacaaagtaatattttttgaaaaaaaataaagtacgaaactgtattatatttatatttcgtacaaa

SEQ ID NO: 104643 - DNA, 898 bp, Cannabis sativa
attactagaaaactaatatatattatatattataatttttttaaaatatatatataattaagtgcggattggattggattggattggttatttttttaggtaaaacaacatctaatccgcacaagtgcggattttagatttttcaatccaatccaatccgcgcaagtgcggatatccgcattttacggattggattggattggatcgtgcggattggatttgatcggatacttagtgaacacccctatattttataaaatggtacaaataggaccctgaattgatttttatcaaaataaaacttaataataatccgatctaaaggtgttatgacaaaactgtttatattttctgtatctgttcgtgttaggttttgtcttcaagttagttgtattaaaaaaaagttgtcaaaaattaagttcagggtcttatttttaccattttgaaaaatacagggtctattttatcatttaacaaaacagaaggtctaattggtaacttgtgcaaaacacagggtctaaaataatatttacccttatttatatttattatataattaatttatttctttttatattttgtagttacaaaaaatcatatccaaaagctatgattgacgaagagtaggcctcagatatgcttccacacttacagagtcaggtcattagttaattttttttttaaaaaaatattatttataacaaatatttagttaacaatataaatatgtatatcagttatgtatattttcaagctctctaactgagctaaagctatgatgaactttcataccgtaattacacttctgctgcggcattcgaccaggttctgactcttctccattacattaagctctcaatcatcaaaaactctctgaaactcaatcaaaaaacccatg

SEQ ID NO: 104644 - DNA, 721 bp, Cannabis sativa
atgggttgaacttaaattaataaactcttatgctataattttggcataggtgaaattgtgttttgcatttatttttaatattctaaatgtgaaatttttgcttaacagggattaacagagtgatgccttttaaaaaaggctgataaaaaaacagtagattttaggcatataaatcttttctttccatttttctactttccattgagggaaaaaaatgtgcatcctataaatttcagttgtcatgctctagtgccaaaaattctatataaaaaagcaaatgacaagacctttttttttttaaaaaaattcaataaatggactccaatctcgtgtacagacattttagaattcatcttttcactcttccaccaagaaaatattagttagaaaaaaataatggattgagaacttttatatataaaccaacatcatcgtgtctacatgtcttagacattgcttcctataataagcatttaatttacttaaagcacgaaggcaagaaatgtggtttagaaagagaaatttgacaaacgatgcttaaatatgttgcatggtcttattatagggcgaagatgcaaaatgaccctaaatctaacaataaagttaataaatgttactttttaagaaaaattaacaaaatgtccattctgttaaaagtttgataatgaaattacaattataaccttgaataattaactatttggtatagttattttgcaca

SEQ ID NO: 104645 - DNA, 516 bp, Cannabis sativa
tttattggctttacctgcaaattaagtcaattttataaatcgtcattatgatcaagcaactgaaaataaactatttaaaaactaaaatgcaacttaaagtttaaagagattttacattttctgtcaatgagtccacaaagtcgttgactaacttcttctctgttgtaggtgttaaaaatgttgttgttttctgtgcctttttcctgtttgtgtatgtccattgttgtatcaaagctctcaatgactccatcagtattgtgattggtagttctctagctgctaagtttgctgcatttagagattcagcaatgtttgaagtcatagttgaatacctgttgtttttgctgtggtatcttgaccatttatggtgtccaacttgttgtaaatatggtctaacacgaatgtccaagctgcatactcgctcatatggtattcaaatttcctctctgtgtatgctctggctgcagcgaagaatggtttatccagcttgcttgcattcttcttgaaggttacttt

SEQ ID NO: 104646 - DNA, 642 bp, Cannabis sativa
tttgaactcaaactttggttttaagagtgaatgttgtttagcttgctgttcttgctgctgtgtttatgtgatgttttctgtagttaaaatatcgctatttagattgatttgagcaggttttgttagctagttagttggatgagcaagctttgagtttttgaactcaagcttgactcatcaatattgatttttgtattggtgcatgaagctttgttttgttgctttcgaaatgatctttgaggtctaattagcaggtctagaaagtttgaattggtttggggttggattggtcgagttatgaatttttgaaaacttcctgcactgaaccgaaattccggttcagggaggcctgtaggaaccggtctaccggttggcttcctggaatttttcccagaactggaattccggttggggaaccggtccaccgattgggggaaaatttaggaaccctagtttttcccatttttgtgttatttagtgtattgccatgttatttatcgataaggaaacttttagtttcaagtttaagtccccgggaagtgatttagaatgtcacttttcagtgttgtgattaatgtgatttaggagcctataattcgccgagcagattgttccggtcaggttgatcggcacacctgaatt

SEQ ID NO: 104647 - DNA, 1136 bp, Cannabis sativa
  modified_base (79)..(82): a, c, t, g, unknown or other
atatatatatatataaatgtaatacttcttattgggtattatccattaataggtaataaacaaatttaactataaatannnnttttaaaaatattaaaccattagattttggtccgatagcaaataataaaagagaaatttgaatttctatacttaatttagctacttaattaaagaaaatatcaaaaaataactcttttcacactatatcaaaaatatatttatataaaaaatatttaagtcaaattcaacttttttttaatacttttttgccgaaaaacttttttttattattttcttttcaactgatggaccattctcagcccatataatgtaaaaatggaaaaaatttctaattaaatagaaaaattaatataaaaactcaaaaatttttaatattaactattcataggcaatacccattatatatatccttagtttgatctgatgttaaagactcaagtgtgttataaactcaatctgtgttctaaagctcttataacagaaattgttgaagatagataaacatttcaatagtctaaggctaaaatgaaaaataaggtttgaagtatgtgctattacattttatttatttttgcctatatatatgataaatgtatataccttgaggtactgcataaccatgttgacgtagaagtctaaattcaagagcaatggcgtataaattataattagggttattaacattggcatatttttccttcaaaatagtacttatttcattctcaaagcgataagatactccaagtctttgtaatgtgtcaatgagctcaagttgagctaaagaattttccatctcaactagcatccttttcacgatctccctcgatctctttcacccgacttctataaggttctccctacatatatatatttgaaaattaaataatataataagatcaaatatttatatataaactacaactatctaataaaaatcgttagtttaataatttattttttttgtatttttttaaagttaacaattaaaactaacaacgttacttaaacaacctatgtatatctcggaccaaccctaatcttcatataataataaataatattactcacctcatattggcttttaagagactgaatataatcaaaaaaccaaa

SEQ ID NO: 104648 - DNA, 644 bp, Cannabis sativa
ttcataatttttattgttgcatatttatttatttatttatttttattttttaagtttttttaatcattttttaatattaattatctttcaaattactttgataataacttacttgaggaatttttaatataaaaatttttaatttaaagatttaaatcaatttcaaaattagattaaaaaataaaaaaatatatattaacatatagaaaataaaaaattattcgagttcagagaaaaagatgggaaaaaagataaaaatatctcacaaaaaaatgatatttaaaatagagaaaactgtgcaagaaaataaagctacaacttcaagcctgaattcgactatcttctgattagattttggaaaaagtcaaaatataaaagttctatatctctcttttatcttttcggaacatcttgaatcgtccgattccgagtaatatcgagagagttatgagcaaaatactatcagtcgatgcagcagaaaaaatatctcgtctgaggtttcccaaaaatttaaatccgaatgggaatttaagcaggtgcattttttccatctttttttttgatatttttctaatcttcttctattttaaatctgcaaaaataaaagataacaagcataaaaatgctccaaacatgattaaaac

SEQ ID NO: 104649 - DNA, 1034 bp, Cannabis sativa
ccagagtgttgcacctttagggaaaattcacctacccctcactgttgggcaagctccgaagagcataattgtaatgccacaatttttggtattggatgtaccatcatcctttattgtcatgttgcgccgaccagccttatatgacctaaaagctgttacattgatatttcattcatgccttaagtttccaacaaagaatggggtaaggtgcttgagagcaaatcaacaagttgcatgggaatgttacaaccttgccctaaataaggctaaaaaggaagaatcctttagtcagagttcgaacaagggaaaagacatttctaaataaggaaccgcccacgacgggacgaagatgtggatccccgacttggggaaccaaatacaaatgttgggcagtggaagaactagaagagattggaattgactcaaatgttcagaccacgaaactcagaattggaaaagacttgttgctcgaagtaaaatcggcaatgataaaatttctaagagcaagagcaaaccaacctagacatttttgacatttttgcctggtccaatgaggacatggtcggaattgatccccctataattgcacatgccctaaacatcgatccaaatttcctgcccattcaacaaaaaagaagattgttagacaaagaacgggccctagccttaaaggaagaagtagaaaaactgcgcaacaataatttcctaattgaagctttctacctgacttgggtagccaccctcgtactagtgcccaagccgaacaaaaaatggtgagtatgtatcgacttcaccaaccttagtaaggcgtgccccaaagattttttttccacttccaagaatagatcaacttgtggatgcaaccacaggacaggacacaagatattaagcttcatggacacctattagggtacaatcaaatcaagatgcatccttcgaaccaagaacatacaagtttccgaacagatatgggtctgtactgttataaaatcatgccatttggtctcaagaatgccagagctacataccaaaga

SEQ ID NO: 104650 - DNA, 1787 bp, Cannabis sativa
aaatttatataggaaaagaagatactttatcactcctgcaatattttgagatgcaaatggatctacaaggggtaaggggtgacgtacggtgtataatcttccctgccacagtcgtagaggctacccaacaatggtatttcaaattgtctccaggaaggtttaattcatgggattccttctcatcaaagttccatgcacaattttcctcccctcgtcagcttacctcacacatggaagacttggtggaagtaaagcaaatgccattaccaggggagcccctctgggcttacattatcagatttatgaccaaggccccaaaggttaaggggatgactaaagaaggaagactagctgcaatactaggggcattgagcctctcggagaactgtggaaagatattaaaaggctaactatgggatcgatggctgaatttctagaatgagcagatggatttattatgctcaaagaagttgttcggcccgtggatattattgggcaaaagaaaaaccaaaaacgcaccttggcagtaggaatgtctgtccagaattcataatatcccaacagttcaaattcaaatgggaagaggtctaacaatgataacatgcaaggtaatggaaagaaaggcagattcattggaaatgccgagcagtgccccaaagaaaatgcctctaatttactgctttctcagtcctacactactacaaattaggcttgtagtaacactatatagttacatgcataaaagtgtgggtcactaaaaaattaagagtaggttttagtgacacacaccattagactctaactattcggtgtttatcacccgacatgtgggtcactaaaaatatggagtgtcactaaatattaaaaaccaaaatttataattttataaaaataaaaaagaaaccatggcatacagaggcgtgccatgcgtgtgagaaattctgtttaccaacgcattgtgcgcgtcactaaagccacattttagcgacagcattaacgcgttggtaaacagatttgctcacacgcatagcgtgtcactataccttgtgtaggggagccaacaataacattcactgaagcagatgccaaccatgtcatcttcccacacaatgaccccccggtcgtggaggtgcaaattgcaaacaagatggtggcacggactatgatacacaatggagcttcctggaacattctgtataagacagcttatgagaagatgggactccaacttaaagacttggtcccctgcacccagctaatatatggtttctccaaccagagtgttgcacctcttggacaaatctgcctgccactcactattggagaagcttcgaggagcataaatgtaatggcgtaattcttaataattgatgtcccttcagctttttatgtcatgttaggccaatcggccctatatgacttaaaagctgttacattattttttcatttgtgggtcaagttcccaaccgaaaggggagtgggatgtctcaaaggaaattaaagaattgcacaggaatgctacaaccttactctaactaaggccaagagggaaaatacctttagccagagtttggacaaggggaaaatcattgcccaaataggaagtcacccaaagcggagatgaagacatggatccccaacttggggaaacaaatataaatggttggccaatagaagagctagaaaaagtggaaatcgatgcaaacatcccggccaggaaactcaaaattggtaaaggtttgctgcttgaaataaaattagctttaataaaaattttgagagcaaac

SEQ ID NO: 104651 - DNA, 1339 bp, Cannabis sativa
  modified_base (319)..(338): a, c, t, g, unknown or other
gtaatatccgctttcttgggtaattaattttttttttacttttagtttattttgtttgtcaatggggataatttactattttgaatatttatgagtttaatggagtatgaattttttttttttaagtgacaataaatttttttattttttattttaagagtatgtataatgctagataaataattaaattattagagataatttaatattttattatttgtgaatattattaaaggtatattaataataaaaatataggtaaatatattataccatattgcttaatttattatggttaatattaatattattattattnnnnnnnnnnnnnnnnnnnntattattattattaatactattattattattaaattagtaaatttatatatatataccgtgtacatgttttatatgtatatatattattattattattaatttttaagttgtttaggattatattacggttaggactatatatatgagatgtttatattgttatttagggttaagaaaaacggtagtgagatacagagagaggcggtcgaacgaaactgaatggtgataaagtgagatttcgggtttgttgagtttgagagtttttgggctgctctagattatttctttgagttttatttcatccaataggagttttagatgtgattaagaggtctggaatcaaagagttcgaaaatcaccattgtttacgttcgaaaatacggttcttgaaatggacccaaatttgaacatgtttaagttgtttcggagagcaaaggaggttgtgtttaagtttatgggaccccaaagatcagttttgacgtgaagaaacgggctaaaaggctctaaaacaaaacatcacagttttggacaccatttttgccggtgtaccgtgtttggagaagacgatctcagaccggccatttcgaggcgaaatataagtggtatttgactcctttgaggttctgggatccttgggaacattttccaatcgaaaagacgcatcgaaacgggctgtagaaagactttggagctcgccggcgcccaagaagacgattatggcggcgtaactccgatgacacaatctgggcatatctaaggatcttgttctcaacaaggaaattcattgaggtgcttggagtagcaagaaggtgttctatacttcatgcgccagcttgaggccagctattagggcttcatattcagcctcattgttcgaggctttgaagccgaatttgattgctccgtgcagttgttgcccccaggtgttgtaagggtagtccctgcaccaaacaatcggtcagtgcagtttccgtcaacatggagtttccgtgttagttct

SEQ ID NO: 104652 - DNA, 1253 bp, Cannabis sativa
gagcacccgtgagccaagcccagcaagacagtataaaatatcaataatcatagttaacatatcacataagtgttaatgctatttatcactcgtttgtgtgacacagacctgcgtgttacgctcacacgcctatttatgtctatgtggcatagacctacgtgttaatctcacatgtctatttatgtctagccttcattttctctgtcaaaacagtacactcttaccttgaaaatttttttgtgcatatggggacaacaatgtttttaaagggtgtctgcttctttgtaaaaccttatgcctccaacactctaacaacgtctcgatatgccatattactgcaaaaaattgcaaattttgccttgttggattgtaatcctaatgttgctaagaatagcttcaaccttgaatcatgaggattatgcttttatagtcacctctacaaaagagtaaaacatcatttgcaaagctaagatgattgagtttcatagcctcacatctctcatgacatgcataatcttttttgcatcccactttgttcataattcgagtcaagttgtaacgccctaaatattaggatgctacccaagaggattaagaaaccctaatcctctcgacgagattactaataaaataagcacgggacattaaacttgaaacgaaaacggaatgaaattaaacatgtaataatttttagctttataattaaaggtttcttaattcgggatgccaaaaatattttacaaaatattacaagtcttccactagccgacctaagcggcaaaacagagtaacaaaagttcatctctagtacccgcttggtctactatggcccgaacatgtacatcacccagctcccgaactcatggctgatcaaagacagatttaccctttcctgcacagtagagcacccgtgagcctagcccatcaagacaacataaaatatcaataatcatactttaacatatgacacaagtgttaatgttatttatcatttgtctgtgtgacacagacctgcgtattacgctcacacgcctatttatgtcaatgtggcatagacctatgttcatctcggttctagttaccgagtccaaccttattatgccttaagcgcataaccctaaatctttatacacaatcactactagaaaaatgggttttagtgatacacattgagtgactctaaaattatttagtaacacttcaccgcacgtcactaatgagggtgacttgaaagacaatctttagtgacactt

SEQ ID NO: 104653 - DNA, 1099 bp, Cannabis sativa
  modified_base (165)..(206): a, c, t, g, unknown or other
attaaaaaaataaaattattgaaagttcagggtcctatttttaccattttggaaaatatagagtatattttgtcatttgacaaaatagagggttcaattggcaacttttataaaacacagagtccaaaatgatatttattacccttaataataataataataatnnnnnnnnnnnnnnnnnnnnnnnnnnnnnnnnnnnnnnnnnnaataataataataataatgagaaacgtgagtagttttaataaagggataattttataaatacataaaaataataaaaaattataaaaatacgctcgtacataattttaaatatctttaaggtttttaagatttatttacaaaaaatatggtatttttatgtacttttatgatgtacttttattattttgttattgatttttcgttatttgtatattatatttttgttgttttgatgttagttttctgttaccttcatttagtctttcttttctgtaaataccgttaaaaatatttaaaaaaaactttaaatgtaaaagtgtaaaaattttacattaataaaaagaagggataaattgaggaatgattttttttttatttattaattaaaaatacatttatattatatttcattaaaaagtacttacttttgtgagtgagttgtctaatatactctcactctccacttaagtctagcacataatttatattaacttaaatggcataatgagaacattatttttaaaaataggtatattttaaagaatatataaataaatgtaaaaattaaaataaataaagtaaagtgataatataatttctttctctcatattaggctaacttaaacaatacaacaacatactcattcttttaaataattcttacatttatttctatattttttaaaatattctaattttaatagatgatgtctctattttatattttaggttaatttaaattatatgctagatttaaatgaaagatgaaaatatattagaggaaaattctataataaatcccttaaagtggatatattgatccacccttatctgttttagcacccgaaataattttttagtcaaattttttctcatagtcatgtacgttata

SEQ ID NO: 104654 - DNA, 911 bp, Cannabis sativa
atgattacttatatgttgtagtgattttacattaccttatgaaagttttattgaaatacaaattatagtaaacctgaagttcatgaattgagttgttttttgacatgatcaatcatacataaaaaattgtaaaatgatttgactaaattttgtagaagaatcagaagattcttctcattgttaatttataaggctcaaaaaaagaatgtgcatatattttgcacatagaaaaggtgaaagtgtattttcatattttttaattttaaaagtaatatatctataatttcatttaatttctcttttatacatgtttataataaaattatatttttattgataattattcttctaatataatttattttaatatatatgattttatttatttacctataaaataaaatatatatataattatttttgaagaaaatatttgaattatatttctttagccatcttgagccattgttagatttttattacataatttcttgtcgatgtgataagatcatatgatcataaatttataaaatttgtaaatttttatatttcttattatatacgtatgactcactcttagaaatgaattaagttcataactatttaacctgaacctaaaatttaatatcaaatggtatatgtgggtttaaataattattgatatattgtgatatattgaaatccctacaagtgtattaatattattagatatcacaatttttaaaaaattctctcgatcagggcgagcgaaatacagttgagatcgatgatgatttggaaaaatgatccttgcacaaagtatataagtacaatatagtttaaaataataccaactataaatctatattattcaaagttgagttagaatgagttgaaaacgcctaaagcgtaaatgaacaatgtagaaatta

SEQ ID NO: 104655 - DNA, 507 bp, Cannabis sativa
tttagtcgttcatgctggtctctctcggcagtgaacgttactggtgcacactgtagtgatttcagcgcctggttctttgatttaatggcctctaaacctcctgaagtggttcgtgaagcagctatggttagctggaaaatatgggcggtccgtaatgatcttgtgtggaatgacaagacttgttcagcgtatgaagtggttcgatcggctagagtcgtccttgaccaatggataaatgctcaatcacaaaaacatggggcattattaatagatgatattaataatgttaatgagcactggaagaaaccattgttaaatacggtcaaggttaatgttgatggtgccatttttcaagcggagaacaagttcggctttggttgtatagcaagggatcacaatggacagcttatagaagctatctcagggagccgagttggattggttcagcctgaagttgctgaagtatttggggtcaaagaagccttaagttggataaaaagaaagaag

SEQ ID NO: 104656 - DNA, 1980 bp, Cannabis sativa
tacttgtactacaatcacaacatttaatagaaaatcataaatatatttatataaaaatgccagctttgttgccaagatttgtggtactgaagcataccaacagtgagcgatacgtgagaatattaagcaaggaggagagtgatagagttggggtgattgatgggttcttgaaatgtgatggaacagacattacaagcccttttgtaaagtttgaattggagatagccaaatcagattcaaactttgttcacattcgcagctcttacaacaacaaatacttcctcatagtagacaccgaacctagtaataatgttgagaataggttgcgcgttgtggcgacagctgaccaacccgaagaagacacctcctcttcttcatgtaccatgttcaagcttgataataggtttggtggtaagaattttatatttatgtccccaagacagcgttcctttgaaccggacacgtgggcgggggagccttacgcgaatggtttggtcggaagacatattggaatcggaggttatggggtgaagaatttcttagtggtggactgggattcgcttgtcattttccctaaagaggtgtcttttaagctggctgaggacgagaaatatctcgccctgcgtcagatccaacgacatccttatctgcagtttgtggacaaggataacggggatgacacgactgagtttgagatctctactgtggatgatggttatgttcgtataaaatctctctccaacaaaaaattttggagacgcagcccaaactggatttgggctgattctgatgaacagaataacttgactggcttacaaaacaatatagacacgttgttctggccagtcaaaactggtaacagcacagttgcattacgaaacttggggaactacagaatctgtaaggctcttaccgcagaccgcaagacagattgtctcaacgccgtcgcccccaacatcaccgacgatgcaaggatggaagtacgggagacgagggtcatctcgagagagatcagaaacattacttatcgcttaaaggatagtagaatctacgacgacaaagtcatcgatttggcaagtagcgcaacttcccacaacaacactgaccgtgagaccactttatcaagctcatttactcacacgtcgtcacgttctagtaccttcagtaacaacttttccttcagtcttggagccagagtaacatacaaaataggtcttccagcagtaagccaatgggaagtcgaaatgtccactgaatttgcgtacggttatacatggggcgaaaccgaaactaaggaagagtcaatccagaatatccatacaattactgtgcctccttggactagatcaacagtcagccttataacaaatcaggcaaagtgtgatgttccgttctcttatgttcaacatgatgttctttcaaatgggcacactaaaactgagaccatgcatgatgggatgtatacaggaatcaatatgttcaacctcgtgtttaatatcgtcgaagaaaagatagaaaaaccaacaacaacaccactattatttttacctgaagttggacaagatgatgataactaattaaattatgggctgacacctttcttcctcagagtgttggggtggcttggtggagttttatttgttctataataatggtgtttatcgctcacactctaggtcttctgtaactttgactttcaggtcattttcgcagagtctgtttctttgtttgtctggtgtatgtcttgagttgtactctcttagttaattatatgtgtggttgatttgttgtttgtgtagtcatctccttgtgagatttgtatgattctgcttaagccaatccattggttggctaggcgttgttcctaattaatcttgaataaaaagttggatgcatgcatgcatagttatcatattgtgttgtttattgtttttcacaataataataagcaaggtcgactttaagaataggcgagccaag

SEQ ID NO: 104657 - DNA, 1017 bp, Cannabis sativa
  modified_base (55)..(57): a, c, t, g, unknown or other
  modified_base (122)..(128): a, c, t, g, unknown or other
aagctcattaatgggggtcgagaattttgggttgcataagtgcaagaagagtaannnctcaccaagaacattctctgtgttaaatacactcacaaatatacagactcgtggactaaggctcnnnnnnnccccaaccacgtaaaaatccctctcttaatttcttacagctctttaaactcttattattttattggttgccgaaaacctcggtcaacaataccaaactagtgtagaatgtagagttgttggtttaatcagagtagttagtaatgaccaaaataccccaaaatttaattagcctaagtgattaatggagcgtaaaattgtcttttttagcttataagatttatttttttaatttatttgaagacctagattcactagactgaatattggatttaatataagttttatttaatttttttagttagataattaagaatcaaaacttaagtaaatcaagaagccacataactctcatctatctcttcaaaacattaggaaccagctaaaaaccagagtaatttctactcaattcaacattttcctaacagaataaattaattctagggggtgtgcaacttggaggtaagttcttcatcttctctctttgatttttagcatttttaggttgagtttacttaggtttttatatgaatttgaggctgtggttttattggaattcacagcatgagattttaagtttaattcaagattgtttgagtttgaaatttatgtttcagggctgttaagtttgattagagtgaattcagttcaagaactcaaaaattcactcaactatggtgaatttgtaattttgagataattctgagttttgaatattgagataagttgtatttgtggtattgaactattctgaaaagttttattaggtttggagaagttttgaagtgcttttgaagtgaaaaacccgagtttgggttgttctgcaggaaaaatggcctaccgtgtaacaccctaactaagatcggaagagcgtcgtgtagggaaagagtg

SEQ ID NO: 104658 - DNA, 1444 bp, Cannabis sativa
taaatttaccaaagacaagtgagtgtttttagaaaggaattctaatagcatgagatggtaagacaggtgaaaaaacaagtatgataataaataattacttacatcattttctttaaatttgaaaatcaactgaacgttgcttttgataaaattatatagaaatggccaaccaacagtaatcgagactaaaagctataaaaagtacctgacctctccgtagcatctcagatttcttgagctttttcatggcatagacatggccagtagatttttctctgcaaagtctcacctacatatttgcagaaagtatgtttagactatgtatgacaagcataggtgacttaaaaggacaagagagtgtttgcaaagtgtcctaatttcctaactaggtaaaggaaattagagacaacactgaagctccaacataacatatcccttcaggttgagtttcatttgatcttggcaacagaattcagaataatcaatgggagaatataaattaaaaaaatttatcacaacaaaaattatttacagatgcagaaattaacctccccaaatgctccccttccaatgattgtcaagagttgaaagtcatcaacacccattttatgtctttgaaggcgcatgtactcagtttccttcttttctagatatttgagaatattcatttgctcttcctcagaaacatcagcatcggcaagtcgcctctccaagacccaccgtctatatttgatagaagttaaaatgaaaaccaataatatgggagaacttcaataagcaatgttgtaagaaaacacagcaaattctagggaatatgcagtacattaggcaacaaaagaaaaataaattgatagcatgtacactattaaacaacatagccaaggcagcatataagctcttgtaaaatgtaagaaaatcacagttttagacacaacaaaattacagcaacaaaattacagcaacagcctctccaaaagtgttagttgaagttaatagtgggctcattacatactcttttttaaaatgatctctcgtgcatgtaaatacttgatgcaagattcaggtgcacatcgaaaagtaacaaacaacagctttaataagaaaagtaccgaaatccttgggatagttatcaggcaaaattttcacaagcacctattgtactattttaatgatagatttatgctaattaaatgtacgcttgtcaacaatttaagaaaaatgaggaggcatctagaaagtagtaatatttttactttaggcatgtcgaaaagccatgaaaaagagtatcgttgtatcttaattcctttaataatttttagaaaacaccaggatatcagaaatttttagtagtgctgcacaatatcttttttatcagtatctcataaccggagtcatcaaaacttacgaaaaaactaggaaaaaaactaaatacatcttgcagtta

SEQ ID NO: 104659 - DNA, 1179 bp, Cannabis sativa
gctccttgtacgggtcctctaggccagtcggagctggaggatctattctctgggtaggaggcatgtctacgttcagaccggaggtagaagtggttgccttggactctccataggccacttgggaagcgcagtactcgagatacatgtctttggccttgccaatgtaatcgaaattcccttgaggattagctttccaaaagtcataaaaaatctcgagaccggctgtctctaaggcgttcaccttccctctgagcctctctacctcagcgttaagctcttcctccttggacttcttctctacttccaacccgtgaaaaatagtttgatgaacctccctttcttcttggaggtcagtcacttctttggacaaggacgtcatggcagcctcaagttggtcggaagcctccaaatccttggtcagctcagcatcttctcaccagcaagaagctttttgttgacttcatctggttccattcggacggctccgagttgaaccctggcttcatcagcatccttcctggctaagtccacttccgccctcatggtgtttgacatagcagcattcttggaggcggtagacttagttcgagaataagtgtaagccatcttcagaccggtctgcacagagaaaaaatgttagaatctgagccaagtaaagaaggattaaaggaaactgtaaggaaagactcctcccatcaacagctctagagaaggctcattgtcagctcccgcctactgctcattcacctcagggaccgaacgattcatgtagtgggtgagcatctcgttgcctcttttggtctctgggtgcaataatggaggtggggtaggatcccagatctgcccttcaactgttcgggcatgtccgagcttcctcctcgagagaccttgcacttcacagcttttggagcagaagggtccaccacggttagatcctcggatagatcgataacagcttcaaccggtgccttctctctggacggcattgtctcaccacccctagacttcttggccggaggagatgagattgaacttccccccactctttcaaagcttcgagcatcttctgagacatttttgcacgaaataaaagccacatggttaagagaaaagcacaagaactacaaaagcataataattaagaagattaaaattagagggagtattttgcgaagcatt

SEQ ID NO: 104660 - DNA, 642 bp, Cannabis sativa
ttacattcccgacggtttaaaatcgtcgcctataacagggtataggcgacggttttaaaccgtgccataggtgacagtttaaactcgtcgactatagtatagggcacgatttaaaaccgtcgcctataccatgttataggcgacagttttaaaccgttttgcaacactcgtataggcaacggttatagaaaccgacagaaatactttaaatgactgtttaaaaacgttgggaaaaactatttttgtagtagtgttgttttgagacattctctagttggtcgaccaactagttttattttatatgaaattttgatttttccttctcataacagagcttaacattcattatttttttaagttaaagaacttaatttaaatgattttggaatgacaatctattttacaaactttctcaacttttattactcattactgcaaacttcaaacatttcacatcactagttttatatttaggtattttatgtctttttgttcaagtatacaagcaatcagtctttctgtccctatctagttttttgtatagtttataaaaattattcttggtgattaatttcatttcaatgaatgatatatatctttatatattaaaagtgtctatctaacggcatttcttggtttaac

SEQ ID NO: 104661 - DNA, 854 bp, Cannabis sativa
  modified_base (197)..(200): a, c, t, g, unknown or other
tttagttttttctggttggaaatattttatttatggtaactattgtttgtaatttctataatttttattttttgatgtttattttggttattcaaaagaataaatttacaataatatttatttatttattatttttatgtttcatcccactaatgtaaagtttatttatgtgcagttaaaatactaatgtcccttcnnnnttttagagaaaggataacaagttttaaaataaattgcgggacgctgatgatattggattgcaatttgttaccaagattttacaattgtgatttatttttcaatgaagtttccctactctaatgattttaagatcattgttagaagttttgacaagtttgtcatccagattttcaagagtgtccctaatctgtgttgctcatggattagttgtgcatgctcttcggatggatgagcaacttgtttggctagatatgatgatccagttttttgttggatgtatagaagtatcgtgataatcatgacatgtatactatttatttgatgaacatgatcataactagcttgtataatgttattatattttcaatgaaaatatagtagagcttacttttttctatggcataaaaaataatgtaaaaaaatatgagattaaaaaataattaaattttaaaaaatggaaaaaaaaaacaataaataaatttgataaaacttgtaataataaggttcgccagaaaagtcatcgggaaggtcatcggcgacgaaaaagtcatctaaaaagttagtgtcgctgaaaaaattaccggaaagtcacagtcactggaaaagtcactatctcctaaaaaagtcattgaaaaagtcaccagaagtaaatg

SEQ ID NO: 104662 - DNA, 1136 bp, Cannabis sativa
atctacatactccacgagtccttattattagggatattttctggatacaaaatacaatctcaatatttgaaataataagattttatctctcaaatttgtcgtccattttcccatgtatcctgcccctatttataggaatataggttgatagttattctttttgggattgattcatttacaactattaatgaaacatggacattccacacgtttcatttattcacacatgggataatatctaataaccactcaaccactctttatttttatcatttagacagttatactgactaagaaagttacatctcgtcaaacatgagttctccttcttatccatcttaataggaaaacacgcaagtgttggggaatatttcatctagctatattccttcatttgtattattgatgcgagatgatcatcatgctacgagtaacacgaggaggttgagtgtcataagtttttctcttctcgggaaagggttaatgattcacgaggttcttgaccgtctcgtcttatacattttatataaccacttttattttttaattttacaaaaaataaataaataaataaataaaagtgtgttctttaaatttcatttttattttcatttgttgattttatttaagtcggatctaggttcgatgccaggatcggagccagttctggggtcggggccaagggctaggtccgaggtctatggctggggccagggtccgaggtctaggattcaggttcgaggcgagggtcggggtcggggtcggggctgaaggattgggtccgggtcgaggtctaagtcagggtccggagtccgagttcgaggtctggggtctggatctggctttgggtctgggtttgggattcgagattcgggtcaaggtctaggtttaggtctaggtctgggtccgtattctgaagtctaagttggggtcggagtctaaaatattcattaagaaaaaaatttattttaaaaaaaaatttattttaaaaaaaaattaaatttttatttttaaaatttttaaacttttgattcggaattaaaaaagttaaaaaataaaaataattttataagggaaatttgacaatatatgcttaaatatagcatatattgttttaatatactatgtaaaaaaaa

SEQ ID NO: 104663 - DNA, 5113 bp, Cannabis sativa
atttttacacaaaatacctaaaatcctatttatatatatatttggaaaatggaaaaaatagaatactttttatttgtaaaattcacacccaaaatacctaaattcaccaattcctatatcgactcctcttgcgattctcttactatttttttccttctcctccgtttttttacaaagtttttgatttgtaacttttttttttttcagaaaatagcatcatttttagattatttaagtatagtagcaatgtgaaaaaaagttgttttgaaaataacaaaatatttttataaaaaataaaatagataaactagtgaatttatgtgagaaattgataacaagtggtgttcatcactatttatagtaacaccttataaatagttaatcatatattctataatatatttaattacataaatataaaactattggtacttttatcatttttaatttttttacttttttattgtagaacggaagtttttttaaaaatactgtgtaaattttatgttgtatactgtgttaaatttttactgttgttctactgttattttttagttctactgttgtttttagttgttatgttttgtgttccttattttataaaaatacagtatttttttttaaaaaatagtttcataatattttataatagttaactcattaaaaaaaaatgacatatttttataaaagttaactcattgaacaatatgagttaatcaattgtatttatgcggcaaattactcatatataattagtcgacatttatttttaattaaagtttaaggtaaataccattttagacctggtattttgtaaaagttactacttggaccctctgttttgtcaaataacaaaatggatcctatattttaaaataaaataagaccatgaacttaattttcaaaaaaaaatattttttaatataaccaacttataatttctaacagagatacagaaaatataaccaattttgttataacatctctagatcatattattattaagttttattttgataaaaaattaatttagggtcttatttgtacaatattaaaaaatacacgatctattttgtcatttaacaaaataaaagatccaataaataacttttacaaaaatagggtgcaaaatagtatttatgctaaaatttataatccaatttaaaataagaaaaagataattcaaataccatctccggccaaaccaggttcgtctcccatctctctctctgccaaaccaggtgccatctccggcgacggtggaacctgattcgaagcagcgcccctcaaaatattctcgcaatcgtcccgatagagtctctgaaccaacgacccagcgcccctctctttcgtcctagccccaactgcccaacgatcccagtcctagcctaccgcagctccgacgacgcaacccccaggtactcccctctctcttacgctgtctcttccgatctcacaccctctttctctgtccatctcattctatgtttagatctctcttttgtttcacagatttcctcgacggtgcacatgtttaaatgtgttatgtattaagccattgattcgttctactaatttaacctatccacttcttgaagtagaagagtcactgttatcccttactttgtgccaattgaaaaacccagaacttgatttgcatcaaaagagttgattgtataatcagtttgggaaatttgacattaggtgactagtaatggggttcaagaatcatggcatggaaagtgttttattgtgtcttggggttactaaagagtgatggtcaatcataattgtgaatgaatgaattctgtattttattcaatagaatagattcatatacaaaattagagacagtaaataggaaactaactaaatacaattaatatagctaatatgttctaacagtaattaatccctatgttgcactatattgatataatttgcatgattttctgttttttttttgtttccataagaagggatttcctgcagtagtaaacaagtactagcttatcgagtttgaagtttgaatatatgctctgagagggttgtttattttctaatttttgtatattgtttgaagcagaagaagatggcagcaaagcaaatggaagagatacaaagaaagctagggttgttaaactatcctagagccaatgctcctgctcagtcccttctttttgctggcatggagcgctatgctctcttggaatggcttttctttcggtaattacagctgttgccattaccactgccactgttttcacatcccctactccatgtttgatttagctttgtattcttcagcttattgggagacaaatcccccttctcccaacaaactcacattggagatactatggatcgtgatgaagagacagctcacattcaatgtaggtcactcattcaccaactttatcattctaatgtcattaatttttattctagcagaccctatattttaatcattttgcagatttggctgagattgccaagtttcttggtattacaacaactatagatacagaagccattcaggtcagttatggtatgctattcaagacattggtcttaaactacatcatgacttttgttatttcaaaagtggttgaatcatttagtaactaatgcttggtgtggctgaactcacagggacggggaagctatgaagatcgcactgaaatgcttcgtcttcttgttgatcttgttgaggcaagcatttatgctgataacccggaatggaggttgtgattattttaattcttaaaatttgtttgcctagtgtagtttctttttgttgaagaaacttttactgcgtttaagtttgtaaagtctactcttatataaaaatgtgcctttgtattttgcatttaggtgctgataattgtgtttgccgaacatctaatttgcatgggacttctacagtgttgatgatcaggtagcaaaggatatacagctgattgattcaattgctgaaaaacaagctcagatattctcagaagagtgcaaattgttccctgctgatgttcagattcaatctatatatccactgtaagagttaccttttttaattggaataacttcccttttgattacttcacacttagctaattggtaaatttaatttaagagaggcttaagcaggagtgacttaccaaattagtttcggtcataacatgtaacattagagattcaaacatgttaaggcttcttagagagaatgaggtggatatgctctgtgcattccttgaagacttgaagtggtccatttaccagtgtgaatttttggatgagcttgtgtttcatgttattttcttgtatgcctttgtagtcctttatgcagggtaacatcaattaaggttccccaatatttgcccacagcctggttgtttacctcttgtgttcaactgtttaaaaaaagtttgtttgcaattgcaggcatgatgtatctgagctggaaaccaagctttcggaacagtcaaagatactcttaaatcttcaacaaaaagtggatgatttggcatctaaggttcctcttcattcctttatcgtagacttgtctgatatcgcaatgtttactattcatttcatttaatttgtgcgtgagtgttaagggggaacgttaaaggtaaaacaaaggaattccagttgcactttcctacccattgatgggtttagtttgccacacacacacaagtgtacattgtcttgttattacataactctctgtcaatagtcttttctattatctcatcattttcctttcatttccatataatactataaatgagagaattatgagttcactcttttcaatggtttcattaatttcatgtattttaagttactttgaatgtgttcatatcacttttctgtttacccgactgaaaagcagcgcccttattccaattgtttaactgcacaactttatgaaatttgatgactgccaatcgacttttaacctattatgcaaatacactgaacgagaaggaaatgagtgaaccccgctaactgtaactgttcattttcccttttctgaaatttaatattttccacctttcaaatctagtttcttattatatggaaggggtttttaccctgaagcagtattttttaatagttccctgcactaatagtctattctttgatcttaacattcactaatggttggtgtagttattattatgtttaggcttttaattttaacaacaatgttctcagaatgatcacttgtgaagtggactatggttgctggactatggttacagggaatatggactgttgctttatatatttgtgaactttatacttgatctgttttatgatgttatgatttacttttctttttaatgctacatgtatttagcatgcttacaacccagatgaagagtatgcagaggtcgaatcccaattgcgggcacatttggaatcttttctggaaactgcaagagcatttaatacaatttataccaaggttaggatgttttatgtcacatatctactttttagtttgatttacctttaaacttttctacttgtattgcaccatatgaagtataggagcaaaagagaggagagggaggtagacagtttacaaataatgttttgcagaattttaaaattctactggtatctgtaggaaatccgtccttggacgcacatgatggaggtaccccaactacatggattcggaccagctgctaatcgcttattggaggcatacaagatgctcttgaaggtagtttttattttatgtcattgaagttagtctaattgtaatgttgccattgaaagctgtttgtgtcccgaagtggctcttttcatctgccgtttatacttgcagtttctggggaacttgaggaatttgagggactcgcatgcagctcttgctgttggttcatcagaaacaattgccagtgagccctcatctgttacaaggataatatccgaatgtgagtctgccttgacgttcttaaatcgtgatcttggaattctctcgtcttccattgctcgcgagcagcagaacgagataaaaccaatccagcacattcattagtgttggatcatcactctttctgcaaagtgtgtattatctagtttttttttttttttt

SEQ ID NO: 104664 - DNA, 833 bp, Cannabis sativa
  modified_base (396)..(404): a, c, t, g, unknown or other
  modified_base (663)..(673): a, c, t, g, unknown or other
  modified_base (774)..(785): a, c, t, g, unknown or other
tagtagtacagattcattgtgactagtggcaaaaaatattccgagattggtcaaggccacatttcactaagggttaccattatcaatatttcgagatttttgccgttttgattaaaattcttgttagtgcatgaaaacaaatttttctctcgacgtgtccaatagaaaagtgatgcacaacggtcttggcttcgtccccatgaaatttcatgacttttggagatgtgtagggtgatattttaatagaaaactaacgagtgaaggagtaaggaaaaaacttgttacaatttccactcaaaagaagaatattttctatttttgaattagggggccatttcaacaaatttttacccgaaaccaatcttcgtattcacgtcttagtagtacgaattcatnnnnnnnnntggcaaaaaatattctgagattgttccaggccatatttcaaattgggttaccactatcaatatttcgtgattttcaccgtttcgattaaaattttcgttagtgcatgaaaactaatttttctctcaacgtgtccaatggaaaactgatgcacaacggtcttggcttcctccccgtgaaatttcacgacttttggagttgtgtagggtgagattttaacagaaaactaatgagtgaaggagtaaggaaaaaacttgttannnnnnnnnnngaaaagaagaatattttctattttataattaggtggccatttcaagcaattttcactggaaacctatctttatattcacgtcttagtagtacgaattcatnnnnnnnnnnnncaaaaaatattctgagattggtcaaggccacatttcagaaagggttac

SEQ ID NO: 104665 - DNA, 905 bp, Cannabis sativa
aattgtatgtggttgatttgaaacttgaggatggatgttgggatgaaaacttttttaaggcaaattttaatgtgtaagatgctgagttaattctaagtttaccgagtggggattgggggatgaaatacaaagtgatgtggcattatgccaaaaacgaagaatacacgttgagaagtggacatcgtttggcgcatgatatgagagaggtttctcatcaatcgaatgagaaagagaaagaagctgggtggaaaagcttatggaagacaaatgtgcctccgaaatttaaacactttgtgttgaaggcttgttattattggcttcctactaatagtgctttagctaaacgaggcatccaagcggctcctatatgttctcggtgtaaagatgattagattgaagatgggccacatgtgttgtgggttgcccgttgagcaaggaggtgtggaaacgatgtggcttgtgggatcggctccaacatgctcgctcaggtgatgttatgacggttttccaaaggcttagtaagttctattcctcatcctcttttgagttttttctagttgtttcttggcatctattgtctattagaaactctcatgttcatggggttgttgtccaaggcacgggatatattagagtggtgtggtaagtttatcctggagtttcagcaaactgctggagggagtaaaaggggtgaaaaaaggagggaggagagatgggaacaaccagcagatgggtgcttcactatcaatgttgatggtaggttttcatctcaaaggggtggtgcttttactagtatgattagagatggagagggggctgttcactttgcttccgctactgttttatgccaggcaaagtctccattggtggctgaactctatacaattaaggatggaataaaagcc

SEQ ID NO: 104666 - DNA, 537 bp, Cannabis sativa
ctgaaaactaatataacataaaaatatagaattttagacgtttaatatagcattactagatgaattaggggtataataaagtaacccctacaaccagcttaatacaatccgaataaatttacaaaaatcctattatttttttaagctagttggaaatcaacgtcaattaataaattttcattttttttttattagttcggatgataacttgtgtttgcctttagcaaaaaaaaattcttacattatcaattttcattagttcatttgaaacttaaaatcgcaaaaattacaaagcaaaaatgcaataattttggagggggttactttattatacccctaattaatctagtattagtaatgctaaaataagaaaacaatctaataaaattctgtcaacacaaaagaaatagtaatatgtatcataaattttgtctagaatgaaaatttttcattaatcatttacaacaagattgcttcactatatcgctctggaaaggaataaacaccagagcatgtcatacaagttacttgaagaag

SEQ ID NO: 104667 - DNA, 682 bp, Cannabis sativa
ttttttttttttttttataatgatctttatactattttttttttttttaaattttatttttttaaatgatttttttatacttgttactcttagtgtgcttaaggctatatcgatgtaatactcaataattggttattaattttttttttgtctttttaattttactcttagtgtgcttaatgctatatcagtgtggtaccctaaaccctaaaccctaaaccatataactagttagcagttttttaaattacttattaaattaaactttgtgggagctgatattaaaatataccaataatagtatgctattttaatatttttgttattaatatgtatatatatttattaactttgattagaattttattttttatggaagctgatattaaaatgtattaataataatatgttaccttaatatttttgttattaatatgtacatatattattaacttggattataattttgatttttttacatttgatttgttaatttaattagatattttatctgtctttatttaaatataattaataaaaataaaatatgtaattaatttattagttttaacacaagttagatgccaaaatacaacctagtattcatatatatatatatgggtatgctcttaatgggtattacccatatatgggtattttattcttgaccattggatcaaat

SEQ ID NO: 104668 - DNA, 529 bp, Cannabis sativa
aagataaatataggggtaagcttaagtttagtaggaagacaactaaggaccagtagtttaatagtttaataaaagtccctgacatggttagttctttcaaaacaaaacatatcatcatttataagcaaagtagagagatcacaaataattataagagacaagctactcgtgcatatcaaatccactagacccctagctctcaataccaatcatcgaaaacgatattctaaaccggccagtagtcgcacctaataactgtcatatcatgggcctcagagtcaagtcacttcatgtacagattcgaagtcttttacttacaagtaagcgcataccttatctacttataataaaacagagactaggtcatgaaacaacaatatgcacaaaatcattagttctaataagaacattattatttgggataagatgcaaattttgtgctaaatttagctcaaaaaatagatcaatgctatatttgatccctatttaataattgttctctaatgcactaaaaataaaataaacatta

SEQ ID NO: 104669 - DNA, 534 bp, Cannabis sativa
aaaacaaaaactatcattcacttctctcttcttctccttcatctttttctctaaaaattcttaaaagctatttatcaaagaacctaaactagaactaaaactaagaactttgattttttttttttaaagaaaaatagaggttgagactcaaaattctttaatggcgaggtcaaagaacattgtaaaataaagttgtacatatctctcctctcaaattatatccaccaaaaaataatttttttttttttggtgaatatgagtatttttgacaaataattataaaaaataactaattgaagaaatgaattaaatatggaaataaaatgaaataatgacacctatttaaaaaaatgactctatataaagtcatttttgatactctaccgaagcattatctaatagtatttagggaaatttatattagccacccttttttttttatctttatttcaaaattaacggctgatcatctaatgtaatataatacggttttgacgttttctatgtaacctgtgtaatatatatatatatata

SEQ ID NO: 104670 - DNA, 907 bp, Cannabis sativa
aactccgcatcaccatcctcgttcaaatttaccacaggatcattgttgtaaaaggaagcatcaaactcatcaaactggtcaaatacattgtcaacccgatcctcatctatattagtaagggcctgctcattcaaacctaccgttggatctgtttctgggacaaaactcccaataacacttcttagggggatagttggcggagtatgccccaaaattgcatgcttttaaccttagtcgcaaacagtgacatcaagttttccacactcatttttgccttcattcttaagaataatcttacttgactatctttcactactaaaactttggcggtatcatattgcctttcatgtacatgtaacacacatctactttcagttcataaacaacaaggtctatatccaactcttcatacaaaatttcatgcatcttctataaagtagtgtcaacctcaaacattaacatcttactttttgggttattgaatatctagttgaaaccttcaactgcccaagccccatcatacagtacaaccacaaacacagttgaatctacaaacaaaaatgagaaaaaaattcatttaaataaataatatgtcacgaaatatcgcgaaaaacatcgtcatttatcgtgaaaattatcattaactatgtagcgacacatcgcttcttgtcgataaatgtcattttggactgcctagacactatgtctaaatatatcgacaaacatcgcaaataatatcgacaaaattgaaaaaaatcgtcaacatgacacaaaactgtagtgtgtcgcgacatacatctcgacacatcgctacatatcgcttaacttcattcctaacctcacacccactgttttattgcttaatgtcgccaacaacatcgtaaaatatcgctaaactcgcaaaaaa

SEQ ID NO: 104671 - DNA, 668 bp, Cannabis sativa
gggttgtcaggatgcatttgaaacagagccaaacgaacctcatcctcctcaacaaaaccgagaagcatttcattttggtcttccgaaatagagggttgaacttcttgtaaaacatgactaatatcaacatttgaagcttcaaacaatctattaaaataatctaccatcaccccaccaagaccggcctcccaatccacccacactccgtcttccctttgcaaacgttgtatgtgattttgccttttcctcgagctagcaaagttgtggaaatatttgctattagtatcaccagagcgtagccaaaactgcttcgacctttgcttccaataaatttctctcttcgtcaaaatctcaaaaagttcctcttgcttctctttatgaagtctgaccgaaacctcatcccttttcttcttcaaattttgaatcaccattttacattggttgatacgatctttaaaattccccgtgaactccttcccccaagcttccaacgccaccccacatccttcaattttgtcaactaaaccacgcccactcaatccctcccaactactcctcacaacctccttacacataggctcacgcaaccaagcattctcaaaacaaaacgttcgattatgcgtcccaaaagagtaagcttcaggcattaaaagaattggacaatgatc

SEQ ID NO: 104672 - DNA, 544 bp, Cannabis sativa
cacgtattttgggcgaattcaggagcaacaatatgcattaaataaaagggtaaagagttttttcgttcgtccccttttataaaaagataaaggggggtttatataggcttagagtcggattaggcaaacatgcattgcatgtttactaatacctaatatatatatataaaagtttttcttaaaaattttgtaaactgaacgttaaatctaatataaaattaattaataaataataataatatttatttaattatatatgataatagtagaaaaaatttgaatataatttgatctaaaatttaagtgaaatttaatttcagccactcataatcaactatcttattattttatttaaataaacatttaaactaagcctactaaaattcttatatataaaagaaaaagatgcaactagaattaggttaatcactccattcacctttttagctataagaaaataagagaatcaagtctcttctctctttctacatagaaatagaaattagcctctatctttctcataaatttaagtcatcactatcat

SEQ ID NO: 104673 - DNA, 1311 bp, Cannabis sativa
  modified_base (1264)..(1273): a, c, t, g, unknown or other
ataatatttgcctttgatgaaaaagaaaaaagagaatatagtatatctagtctctgaacattgtaatgataaagaaaataaaagaaaatatcaattgaaatgtttgaaagtaccacttctactactacgtactactccaaccctcttgatctgctagttccttctccaaatcttgggtccacaacactacttccagtactcgaagacggaaatgatggtggttgttggagatcgcgtttgcaattggggcaattgtaaatgctgccattagagagccaatcaagaatacaatggggatggaaaacgtgaccacaattgggtataatattaacaacttcatcgtctgcgaaaacttccaaacaaatggtacattcatcagcctcttctcttccagaccctagttgcatcttaatctccctgtgagtaaccctccggaacctctcaaccatcgcctcagcgcgttgccgcgcctccctagcctgagcctcagcctgagcctgagcccgagcctgagcctcagcctgagcctgagcctgagcctgaagctctacccccgggccgacattgttgttgttcgcagcagaaccgtggaaatggagattgcctttgatgtattgatcgatcaagatgaagacgacggtgaagaagattattccgagaattattagcactgtggctacgatgtctgaaaatctcgatcggtgtttgggttgaggatttggcgatggcgcttgatgatcatgaggtgatccgatgtaggctaatgccgctgtcgagaggaataggacgaaaagaatggcgatcttttctggtttcgacagccatgaacaataattactgaagatcatcatcttggagagagagagatgggaaattgaagaactgaaggaattgatgaaaagtgagggaattgatggaatgagtgaatgagtctttgtttgagactttgtttatttatatatatagctgatcagtgatacaacagaatggttaccaagatcaagaattagttagttacggtactaactaactctaactgttaataacggactggttatttggacacagaaattaaagaataaagaaagaaatgaaggaaaaaaaggagaagtcgtttagaataatgacgtcagtatttgcagttagtcgagtgtgtgcaacttggtgtctagctaattaaaaaggaacacgtgttaattgccttttaaataattactacttctagggctcgtttggaacgccatattaggtcgtattgtattgnnnnnnnnnntattgtattatattgaattatattttatgcaatatttt

SEQ ID NO: 104674 - DNA, 832 bp, Cannabis sativa
  modified_base (519)..(522): a, c, t, g, unknown or other
acaagtagtagctagttttcttcatttataatcacatagtttctctatcctccttttgagagggataactatgcactgtaggggctttcattgtccgaatagatacggaaggtttctaagaatttgctggccctactagctagtggaagaaatctatccttaacgcacccactggttttggatataaaaattgttctggtgttgatagttgttcaacacaacgtaaggtgttcatgctcaccttaacaaagcatggaggattgatcagaatatgtgaaagtatgcactgtaggggctttcattgtccgaatggacacgaaagtatggaggattgatccgaatatgcaaaaatatgcactctaggggctttcattgtccgaatggacatggaaggttctctaagaattcactggccctactagctagtggaagaaacctatccttaacacccacttgttttggatataaaaatcgtttaagtgttgatagttgttgagcgcaacataaggtgttcatgcnnnncttaacaaagcatggatgattgaatatgcgaagtactagattgatcggttacgagatcaccataaccattgatacaacaacttggttatatggaacaatggaatggacagggaagtatggaggattgatcagaataagcaaaagtatgcactgtaggggctttcaatgtccgaatggacatggaaggttctctaagaattcgctggccatactagctagtgaagaaacctatccttaacatccactggttttggatataaaaatcgtttaggtgttgatagttgttgagcgcaacataaggtgttcatgc

SEQ ID NO: 104675 - DNA, 601 bp, Cannabis sativa
attattttataactttttttattttcttcttttttacaaagattaacttaattagtgtcttgcttctcttatatatcttgaatgtgactcatatctattttgcttccttttacttaaatttctatttattgtattacctaagttttcataagtttgtttgtaaatttaaaattagataaatttagtatgaattgtttagggacaagcaattgtgatgttacataattcgcagagaggattaaaacaacaagcattgcatgatggagctcggtaaaaaaaaacattatgtttttgatgatttggttgtttagtttgatttgatgttacttagtttttggattgaattttaagaaatcattaaagggtcaaattgatgaatgaatcatttcaagttttgagtttgtttgccttatttttatgtgacttaattttgagaagaatgttgtagaatatatttaataaacaaaattactaatgtcatcattatcaaatatctaccctaaaaaatatctacacattttattttagataaacaatgagttgcaactacaagaatattagtgacaataaaaaattctggatcaactagtattagtaataa

SEQ ID NO: 104676 - DNA, 577 bp, Cannabis sativa
tgaaatgagttttatttagggcataaaacccaacatagaggcggctagcggagcagtggctcctgaaatgtaataataaaggattgataacaacgtgggaggtggtctagcgctggttttaatagttaaaatggatcaaaatatagtaggatgtcacctcattttctttagtgctttattttatatttatatatagacatagatgatttatttattaaaaattaatttttttaatttaaaatattttacaaagattaaaaaatgtaaaaatatgtgtaaataaataatatctatcattcacatatttgatgaaatatatataacttaaaaatttaacagtcacagtagtctcatatcacagaagtatatagaaaaaatatatatttaaggtgtcttattattcttataaatatcatatattaataaatccttatagttttaattatttaaataaaattaaaataaataattatataaaaaaaatttatatgaaaaaacaattaactgatttttttataattattttaagggatattggcggctaaaccacctcaactttacggtttgtaacacttaa

SEQ ID NO: 104677 - DNA, 3545 bp, Cannabis sativa
  modified_base (172)..(175): a, c, t, g, unknown or other
  modified_base (237)..(251): a, c, t, g, unknown or other
ctcatcattttctgaaaataaattgtatatatatacatgcagggagcatatttttgtcccatttggttatgtatattaataattaattgagtttctttttttttttttaaattaatatggagaattatttcatatattatttttttgaactttttttttaaatttacggttnnnntttctaaagtggttgcagagctagttacgatagggggttttatacgattttttgttgcaatnnnnnnnnnnnnnnnagttgcaataaggatttctatgtaaaatttcacaaaaatgcaaagaaaattattttgaagtgtaaaaatgaaaaaaccccaattaatatttagttgaattattctctataaataataaaaaaaaaatgagtaactcgatgaaaaaaaaaattaaaaaaaatgatgatatcacttacctatatggctatatatacatcaaataaatataatacgatattgttggacatgtgctagcaatctctaagttatgtattctattaacatttaattgtattaaaataaggtgtggaatatcacatacatatgtatatataggagagaaaattcaacgagcaaggtgttcctttggcatttggtggagatatatattgagcttgataaggtacatatttattagtatagggaaccaaaaaggtcatgacagcttgacaatacgagagagagagagagagttgtgtttgtaagaggggcaatgaacgtgggagattgatgccccgtcagaagcgtctcgacggtcattaagccacgccagcttagttctgggctagccctcgtggccaaatttttagccacaaaaactaatttctctatcatcactacttacttggaccccactctacttctacttctactacttactctctactcttcccactcttgatctctctctagctctccctagctatgttatatataacatcgcgccccgttactttttgtttgcctttaatattttaaaatatattgagagagagagaaagagtgagagatcagatgggtagggctccttgctgtgagaaaattggattgaagaaagggaggtggacttcagaagaggatgagatcttgaccaagtatatacagtctaatggagaagggtcttggagatcattacccaaaaatgcaggtacatatgtatgtacatacaaattaattataatcttctattgcattgcatggcattgccgatgttcctgtatatatatatttaagattaccttgttaattataaatttgtaactttttatactatgatataatgtaggattactgaggtgtgggaagagttgtagattgagatggataaactacttgagagctgacttgaagagaggtaacatctcttctgaggaagaagatatcatcatcaacctgcattctacattaggcaacaggttagttaatttaattattattatttattattgtatatatatattaaaattctatatcttcttaattagtttaatcttgttacatgcacgcataaattaaacataaaattgtcaaatatatgtgataagtcaagtagctataggacatattttaaataaatacaatttgttaaaaaaaattgtcacataaatatgtcactacaacaaaatttgcgactaaaaataaaaaagttgtgactaattgtaaaatataattcatatgttgtgattaaaaaattcgtggctaaatatattagtcacaaaaattacaatttattgtgattaaatttgtttttagtcacaatacttattatgactaactaaattagtaataacttaaatttaaatattattctttaatcacaagaaactttttatacatatttaatcacaaaaaatttattttattactaaaaatatttttttatagtgtgtgttaaatttatgtattgtaagtgcacgtattatcactttctacaaattaaaaattctatcgacaattaattttagtttgtctctgaatataattttttttataaaaaaattggggtcattaaaacttcttgagtaaattctgtagaaaaaacctcaaaagaaaatataataaatgtaatggtaaaaatataacgtatttttttaattgagtacatttgttgttactaatgacacattcattgctattgatattacataataatatttggtgtgtagagaatatttaatattttcaataaatagctttatcttttcaaaaaaaaaaaaaaatggctttattcttttaaaaatatatataaataaataaatagccttattcataacaggtttcttatttttttttttcataatatcgactaatataattattgtctgtttagagaaaaagttgacatttttcaaaattggtttttttgtgctcaatatattttgagaggctatcttaatatcttttagtttgaaaatagtaacatcattctgttatttcgcatttattgggtaaaactcttaatttctcgccccagagcagttggaaatgtaccaaatcatcattgattgattatgttgtcactctcaaaattgtcattttttgtcttcttttgatatatttagaatcactaggattatgatgacacactaaattatacacatgtttatataattgaattgtttattaaataattgaatcttgtaatatattcaatgtcatctgttcaaacaattagacactcacgaattgattaaaaaaattgatagatgaactttattcaattttttaaagtttaaaatgtaattaataatagaaaaatgttaaagggtatacatagggcttaacacttttatgaaatatgatatgatatataatttaatattaaatttaacttactttactttaatattaattataaaaattagtataacttgcctatacaaccctcttaataaaaatataacaacaaattccctgaaaaagaggtaaaatagctcttttctattttagttaaaattttaaataattaggtaaaactgtacttccattatgtgaaatggtgagctaaaataatttatagatattcttttagttacaggtaactcgatggatagtagtaaggtaaaaaaatactataaattattttatttttttttaatttttttaattattatttttttattttaattaataaaatatataaaagatatataatatttaaatgataaagaaaaaaaatttaaaaaaaattgatgtatgatgtaaaattttagtaataggagtagagaaactaataaagagtggtctcatgaattggaaaaacgggaaagaaaagaaaattatgaaaactaattaaaaatgaaaaaggaaaaaacatagtattaattacatctagaagtacagcacttattatattttacctagggagaacgttaagccacttggtactattttggccactcgttgagggtcgatcataacgtgccttgttcatatgtacaaattttattttgaataatttatgaaatatatatataaacgtaaaaatggaattaacgtattaatgagctataacatgtcggccgacaaacttgt

SEQ ID NO: 104678 - DNA, 963 bp, Cannabis sativa
  modified_base (44)..(57): a, c, t, g, unknown or other
aaaatgttatttctgatctttaaagtaaatctgattatattgannnnnnnnnnnnnnagggcacaaaacccaacagattgaaatatgaaataatgacttccgaacataaaaaatatcatactcactgtaaacatgcatcttattaaagactaaattcaccatctgtaaacagtcaaaaaacacacaaatgtgagtttactccagccacttacaaagaagaagaccctgtagaagggctaaagcctccgccacatgaggtacaagcataccatcaggtggagtaatagtcgagcaaagcacttcaagattagaacaagacaaaaccgcccccatgtcaaactgctttcgctcataacagatacgagcatccaaaacaaattaaatttcccttaattcaactcaggacctgctccccctatatgacaagagttagtccttagaactcaaaagggtcgacggatcaagattgttttgggcatacaaaaaggtattgccaacaaaggatgagaaaatttttaacttctgctttggacaagatatccataaccccagccaacagttcataaaagttagatgccatctcaagctatcaaaaccccacccatactgaatggatttatgggaaggacacaaccacaagccatgaagagttgcttcattattctgtaaacaaataggacatactttagaatcatacattccgtgtctagtcagattagcataagatggtacaaaattcaagctatctttccaaaaaaaaatattctttatctttaggggaagagagagcttccaaagaaatttctaccatttagaaggccagaagaggacaaattttgaccccacccaagccaagcaactgagctccaataacaacttgtaaccgtaagctagccattgttagaaaaattataaattaatctatcatttctatcaaagctaaaaaaagaaataaaaaaaatg

SEQ ID NO: 104679 - DNA, 572 bp, Cannabis sativa
tttttttttttttaaaagtaaaaatttatattaatctgatctagagatgttgtgacaaaattggttacattttttgtatattttcgtgttagaacttatcttaaagttggttatattaaaaaataaaattgtcaaaaattgagctcagagtcctatttttaacattttggaaaatatagggtctaaattttgtcatttaataaaacagagagtctaattaaaaacttttacaaaacacaggatctaaaatagtatttactctttttataaacttaaaacaacccaaactctatttatccattgactttgaaattaaccttcatttataaacacacaaaaacaatagtatttatctaccttatgtttagttctgagataaaaaaaaaggagaagaaagaagaaattttagaagaatttgttcgcgttttgaacttggaagagaaatcagaaagagataattaaatagggtcttttttatttttacacttctaaacttttttttttttttttgcatttttacgaaattcaatatagaaacccctattgcaactagcgctgcaacctaaatcgca

SEQ ID NO: 104680 - DNA, 555 bp, Cannabis sativa
atatatatatatatatagaaaatgatgttgcataatattttatgaacacaaaggaagtaatggtggataaagcagttgcttaccacagccttatagttcctgttatttgggcatagtcagatatgttacacttgatatggacatcaagagaatagattgattgaaatgcacttctttttttatattagtgcaagcgggagtttgttggaattttatgccctaaataaaatttatttcaatataatcttatttgttatcagtagaagattagaagtcatttatgtttacatgtattattcatgtttattgtttaatatacaatttctgttaaatgcagaacatatagttattcacaattacagtgatgtcaacacagtggaaggtaattatgattatatgcttcaaaagtttatgtctcatgattcatcagtgcactagatttacattgatgtaatagtcaatgataaagttcacttacaccttggataagtgttatgttctttccaggacattggcaaagtatgctagtatcagatgtattgagtatacattgga

SEQ ID NO: 104681 - DNA, 591 bp, Cannabis sativa
tcttgcaacatactcaacaatgtccttcttcatgcctggccaccagaacatggcctttaggtcttgatacatttttgttgaccttggatgaactgaataaggagtcgtacaagactcatccattatctctcttttggtaccatcatctataggcacacaaacacgatttctgaatcacaacattcctgtttcatccactgaaaaatcactagtctttccagccgaaaccctatctcaggtttttaccaattctggatcttgcatttgcacttctttaattcgctctaaaagagtagattggagggtaatatttgctaactgccctacaaccaactcaatcatagctcaggtcatctcatttgctagttgctgggagatttgtttcaccgtatttatctgactctgtccctttctgctcaaggaatcagcaaccacgttggctttaccagggtgataaaggatcatacaatgataatccttcagcaactctcgccagcgtctttgtctcatatttagatctctcaaggtaaagaagtatttcagactcttatgatcagtgtatatctcacatttcttgccatataggtaatg

SEQ ID NO: 104682 - DNA, 1240 bp, Cannabis sativa
aacaaatatattagtgtacagttcgtatggggatttaggtggaaattattgaaataaaccccccacattccctgtacactgttcagattaacatatacacaaagattacacacagttaaaagactaggtggccttcggcctctaaatacctaggacagatcagcaaggtaaactttgtaactaactcctttctctatattccactacaacagatataatagccacataatctcaatcacaataaagacagagcagagcaataacagaaccagatcagaatatcatatacaacaccagatcagaacacacagaaattagattggatttgagggttggaggagacttacattggggtgagttttggagccctaggattagggctcaaatatccaacatcaaatccaggagttcgtatatgcagaaggaagaagaataagattagagattaaaaatagagagaaaagtgaaaaaggaagaacactatagactaaatagattaccaatcgtacttgtgatttggtatctaccattgtaactctttgatctttgaagatctatagtggaaaagagcaatctgaggcgagctcgaagaggatgtacccagcacaatttttcgggaacctctataaaattggtgcactctttcttattttctttttctgcatttggtaatttttttactggtttgtgtatgtttgtgtggtttaaaccgatctgggaagggtttaatcattgggtttcaggggctggtattgaatttctgggttgttattgttgctgcctttgtgttcttcagagaagaacattgaaggggggtctactggggttctttttaggctgcatgtgtgtatttgagagataaagaaatatatatatatatatatatgttctgatgttaagttaaggtttctggtgtgaaataaatgacctgtagtctttcaaagaagactgtcgtttttttgggggttttattctgggagtcaatccgtgggttgactaggtaaaaaggtcaaaattgaccttgggtgtttgattatatctctgctgtgtgtagggtaaaacaggaataaattcctacagtctaggattctaagtgtttgtgacaaattacaatttttaattgtgatgaagaatagaacctaggttaaattgatttgttgcctagattaatctatctccataaatctcaaagctttatctaagttaaataaattcttacagtctaggattctaagtgttt

SEQ ID NO: 104683 - DNA, 1260 bp, Cannabis sativa
ctaaggcattcaccttccctttgagcctctctacttcagcgttcagctctccctccttggacttcttctctgcttccaacctacaaaagatagttcgaagaacctccctttcttcctggaggtctgtcacttctttggacaaggaggtcatggcagcctcaagttggtgagaaacctctaaatcatcggtcagctcggccaccttcttctcggcagcaagaatctttttgttgacttcacccagttccatttggatggctccgagttaaaccctggcttcatcaacgtccttcctagccaagtctagtttcaccctcatggtgttggacatggcagtgttcttggaagcagtagacttagctcgagaataagtgtaagccatcttcagagaccagtctacacaaagaaaaaacgttagaatttgagccaagtaaataaggattaaaggaaactgccaggaagactcaccctcatgaactccttaagaattctttccatcaacagcttcagggagggctcgttgtcagctccggccagctgctcattcaactcagggaccgaccgattcatgtagtgggtgagcatctctttgcctctcttagtctctggatgcagtgatggaggtggggtaggagcccagatctgttcagatccgtttttggccagctcggattcgacctttccctgttcgggcctgtccgagcttcctcctcgagagactttagacttagcagctttcgaggtagtagggtccacaacggttagttccttgaaagatcaataatagcttcaactggtgctttttctctagacggtgttgtctcaccggccctagacttcttggtcggagaagaggagcctgagcttcctcccactctcttctttagagcttcgagcattttctgagacatgtctgcacgaaataaaagcaacatggttagagaaaagcactagaagtatgaaagcataataatcaagaaggttaaaaacaagacgaagtatcttgcgcttcggaagaaacacttgcccgagcaagacttaaaggctcatcatcacctaacaagtctcttatctccgccaggatggctttcccttttcctactaccggagtggatggctgagcaagtagactgggctacgtgattcgatttgcatgttcaacaggcctgtgctcggcaggaagcttcttcctccttttgagcggactcacttgctcctcctcaacctcatcttcctgctcagaatgctcctgagcatact

SEQ ID NO: 104684 - DNA, 582 bp, Cannabis sativa
atcgtcagtcaagtgatcatctttgtcaatactcctcaaatacagtcaaattgtcttactccattccaaataattcaaaccaatcaacttatggtccgtgagttttgacatcacgagaaccacatcagaaacaacaactgattttgaatctgattttatctctgccataatctcaaaagcaaacacaattgacagagaaaaagaacaaaacgaacaccaaagaatgaacacccaaacacgaagaaggcaagaaaagaccgaattacaaccttaagcagatgcgagtggacttagaagaacaaaggaaagaaccggcaaaagaacgtcgttgaagacacctgcacacgcgcctccacgcgctggcacgtgggaagacgcacagaaacttcaagctgcacgtgagccccatgcgtgaggaatccggcgaccggacttcggggttttgtagatcggcggctgggcaacacgactgagtcagcggtgagaataaattcacactccaaaaagattttcgaaaaagaaccataaactcaaaccctaattttttttttatgaaaactaatttcgaatcacaaagctctg

SEQ ID NO: 104685 - DNA, 516 bp, Cannabis sativa
attttagatgagctgacaactccattcaataaatggtatctttgactctcgcctaaacggaacactaatatcattttgttgaagaccttgaaaattatataggattgcatattttttttagtattttcgattgtcattcctacttgctatgtgctaataatttctgaatgagattttgtgttgaacctcacttgatttctatttattgttatttgtagtatccaatatggaaatgaccaaccccataacgtcactattgactgataataagctgaatggatctaactttcctaaatggaaagagaatagtaacatttctctctttggagaaaatgccctgtttgtgttaactgaatcgtctcctaagcaggcgggtgagaatgtaaccaaagcagtaaaggagaagtacgagcgttggcagcatgcgaacaacaaagctcgctacttcatgctttctagcatggctgtgttgggttttgtgccctaaataacacccatttcaatataatcaaattt

SEQ ID NO: 104686 - DNA, 639 bp, Cannabis sativa
ttatagttgatttatagtgatcattatgttgatttttaattttttttttattttttaccgaacaaagtgtatttttgtaatttaaaactttgaaaatatattttttgtcaataaaaactttaggccataaaattgtaattaaaacttaaaaagaaaaatttacataatagaacaaaaatttaaaaaaattacaaaaatacatcaacacggattacaattttatttttactttttgaacttctttatttacaaaaatacatcttcaatgaaaataatgaactgttttctagttgttttatagtttatttaggttgtattatagttatctttttttttttttttttttatagttgatttatagttattgtggggttgatttcacgtcatttttagttatttttattaattttttctgaacaaagtgtatttttataattttaaaattttatcaaaatatttttgtaattaaaaattttaaattataaaattgtaaataaaacataagtacttttaaaattttcactatacatattttataaaaaccacgtcaaaacaatttaacaatattttaaaaagggttgatatgcaaaatggccctaaatttggaactaagttagtaaatgtccactttttaaaaaa

SEQ ID NO: 104687 - DNA, 641 bp, Cannabis sativa
ctcttcaacaagtttagtaatgagtataacgaccctattgttccgatggagagaagaacctatgattagctttttgagaaatttccaaacgaacaatttcaacgaaattataaaataaccattaattctagcgagatttgagtaaaaacagtgaaatcgacgttaaataaataatcatggcaaaataattgtaaaacaacactaaaataaataaaaaaaaataaccatcttctgcacagcctcaacaccaaatgcaatagtgactatatttgcaagcccagtcttaaaaattcaaaataaaaaaaaaaactactagaataaaactaaaataacacaaaaacaaacgtaaaataaatgaagcaaatataaccacttagaaaaatataaaagaattacacacctcaaaattcttttgccaaatgttaagagaatcagaatcaaaaaactacaaaaataaccataaagaaggaagagaaaatgtatttataacctccatcttccacttccacacccacggacaaaactaccatagcaacaccggaaaatctagaaaacaaccattaattccggcgagatggagcaagaagagtgaaatcaacgtcaaataaataaatcatggcaaaataactataaaacaacac

SEQ ID NO: 104688 - DNA, 1169 bp, Cannabis sativa
  modified_base (507)..(517): a, c, t, g, unknown or other
  modified_base (951)..(958): a, c, t, g, unknown or other
ctgtctcgctatgggaagacttcctgtagctttatccaactaacggtaacacgacttacaaccctggcgagtcagaagaagtctttgcaagtaagagtcgcgatcgacaccagacctacatcgtcgacctcaaaagaaagaatgaccccaacttgctattgggatcactataaccaagtttctgtcgagacatctccagacacaataattaaagatatgtttaatacacgattgtcttgacccagtaaaagcgggaaatcacagttatacaattttgaaatcataaactgcatttacactacatgatatgtaattcaaatcccatgattttagggatgattgttgtaaacatattatggtcaattttataattaactgtctactatataattataaatagtggtagacaagctcaaaaaaaggatgaaaaactctcatatgagagaggccctaaaaaaacacacaatcagaaatctgaatacgattgactcgtggactatgcagaannnnnnnnnnnaaaccacgtaaaaaatcctgtgttcatatgttatttttttatagcttttattttttttgtgtggaattattaccgtgaggctcaaatttacttaacgaaaatttgcgttaacagtttggtgctttcattgagagcctcagtaaaaaagctctgaaaaaaccctcccttctttgtttttcttttttttttttaaaaaaaaacaacctccttcatggctgaaaatccagaaaatgttaacaccccacatgaggaaaccaatcatcgttttgggaaagagcccatgggctccagaagacctaccaacccgcactccaaaaggaccactcgttccaggacggttcaacccgagggtggccccagcgcacggaccacaagttcccagagaactcgacactacgttggtcctagtacgcggacaacacgctcgaggagannnnnnnntgggaatggtcagaatcccgggacgagggatgaagagctcaatcgtcgaggtgcccaatctgtgggagaaagaacttatgaaatggaaagtcatcgcctgagacaccgtctggaagaggcgcaacatcgaaacactgagttagaacgtgaggcagcctcagccagggcggcacagggtacgaatacccaaaatcaacttgaacctggagtg

SEQ ID NO: 104689 - DNA, 581 bp, Cannabis sativa
atatagcttatttaacaaaaagtgtgctccaatggtgtgccataaagtgatgtaaatttgccacaaagcacattttgggccaaatttgacacaatatttgctatgatgtaaaatttacaccacaataaatgcactactttttcatttatatttatgtcatttttaatattttattaatatatttaactatcacattaaattatgaaacatgtatattattttttattgtcttacatattaaaataataataaaattgatcataaagttatgagattttatttttttttaataaaatattaattagatattaaattttacatcgaaatttagcaattgtatattggagcacaaagctaaaatttggtgtaaatttaccacaaaactattttttgtgctaaatatagcataatttttacatatcccattgaaaatgatctcatatgttacgtattaatttgttacacagatttaatctttacattatattagcaaaaatatgtcgttgtactattttaggtttagaatacattttagttttttttagaaagtagtataaaaagaaaattaaaaaataataaat

SEQ ID NO: 104690 - DNA, 868 bp, Cannabis sativa
  modified_base (830)..(837): a, c, t, g, unknown or other
aaaaaaataccattaatatataaagtatttatacatgatattacttacactacactagcatttcttttctcatagtagctagatcatgagattaagggttaatcaggtgaggttctacacgatgcatatggagctgtgtgagtgaagtcaagtcgttgggaaagggactttatacactagtggaagaccgaatcagtaaatttgtaattaagaaaacttgaagtagtataaatgaaaagtataaacattaaaaaagataaaattgccgtgtggcaatataaatgtaaaaaatatattttttttgtcattttgtgtaaaaaaaccctttatattacatatgtttcattgtatgttaaaagtcaatactgtataactaacttgggtgtcatggtattgtaatagtaaattatcttaggaaaatatggttacttggaagcaaagggagactattttgcaacaagatgtgtgatttttctttttattattacttgtttattttattaattgtttgtgaattgctgtacttggcggtgtttttgttctatcagtaactggagttcttggtttactacagcctagtcgatttcgggaaattgacattatttttaattgcattttaatcttatttcaattttccttttgggaaattataaataaaacaaaacgaacaagttacataatccattatttaggcatattggtacattgtatttaacagttttcatatagtacatttaacaaatagactatagtacatataatgaaatgatgttatatatgaagagatgcttattagaatatttttatttaaggaaatgattttctatttnnnnnnnnaaataaataattgattttctgataaatgaat

SEQ ID NO: 104691 - DNA, 587 bp, Cannabis sativa
agtattgcttatgttcatgttcccaatcagaagagaacgaagcttgatgacaaaagtgagaagtacatctttatcggctatgactcaagatccaaaggctacaagttatacaacccaattaccagcaaaactatcatcagtcgcgacgtaaagtttgatgaagaagattcttggaattggaacacagaagaagacgagtatgattttctttcttactttgaagaggaaaatgtagaggagcaaccaaggatggaagaagaacttcaagaacctaatactccaccaatctcgccaactggaaatatacaagaagattcaagtgagagctcaaatgaaaagacaccacgctttagaagcttgcaagaactttatgaggtaactgagaatcaaaatgatatttctcttatgtgtctatttggtgattgtgaacctctaagctgccaagaattaagcaataagaatcaaaaaatggagagatgtgatggatgaagatatcaattcaattacaaaaaatgatacatgggaaccagctactcttccacaaggatacaagccagttggattaaaatgggtgtacaaggaaaaga

SEQ ID NO: 104692 - DNA, 1424 bp, Cannabis sativa
tattaacttttttttttttttaaacggatgtatatattaacttacaagtgataaatatatattattaaatgacctatttatcaatatataaataaaataaatactttgtctttttgatgggggctgaattaattaattactttcaaatcgtactacatataactaatagtacatctcaaaaaaaaaaaaaaactaatagtaataatgaaaaaaaaaaaaaaaatagtgataatgaataatttataattaattattatatatgcgtagtgttccctacttttgaccctttcaatattgtaattaattatatgtagacaggcttcaacgacgtattcctaacttttgttatgtcttcttaattttaatgataataaatattaattcatgcatgtaatcattaactatcttaaccaattgtttacttctctttttcacatttcacccatatgcatcactaatatattaatttttattttttattttcaaattaattagtatattattagtttatttatatatgtgtgtttaattataattatattatttgattagtagttattattattattatttttagaataagaataacatgaaatgttatttttcaatttatacaaccaaatttagtatgtattatcgattgaaattgagtttttcaattaactaatattatattatgtgtttttgtatatatacatgtaaaaatatttgtaatattattttatttgttacaattattcagaattttgtaaaagtgaatccgaaatagaagaaacatgatttaattagctacaaattaaaatagctagtgtactaattccattaaaaaaattaaataatactaatttaaccaattacattaaaaaagagaagaagaaaaagaaatattggaaagatgaatgggatatcaaggaatataaagtcttcatctttctattggtcaatgtcttaattttttttttttaaatatatatttatatattggtcaatgtcattagatctaagtataggttgatctaattaatagcatttttttatatatatttttcttaaaattaaatatcaatttgttctaaaatcttggtattataatatataattttttttaaatcacatcaaatatattatttatttaattatcaaaaaaaaaaagttggtgcaatagttgagatcttgtaaactcttactattatatacttatttaaaatgttatcttctctctcttcaaaaaattaaaaaataaaaagaaatgttctgaactccttttttcttatgacttttaaagattctatataatagcaaaataattaattaaatataagaataattacataaaataatatttttataaaaattttatatttttacgtttaaagattttttttatattgttacggttttacgaaaacaacaagaaaattata

SEQ ID NO: 104693 - DNA, 682 bp, Cannabis sativa
  modified_base (622)..(625): a, c, t, g, unknown or other
gagcctgatctggacctaaactgaaatccggacccgaacccaaacttagactaggactcgaactccatctcgaactcaaaccaaaactcgaactcagaataattaatggaactagaaccgaactaggactaggactaggaccaggaccaaaacccaaaccaaacccagatcaaacccagatcgagacctaaactcgaactgagactaggactcgaacccgaacctagacagggaccaaaacccacacaataaccgggaccttgacccagaatcaggatagggacctgggaaacaaaattgggaccgggacctagtaccagaccctgacccgaacttaaacctaggacccagctcgtgacccggcaccaaaaatggaaccaaactgggacccgcgattgggatccgaatctgcacccagggcttggacaaaacccgtagtcggtgtccagattttgaacccagccctagacccgaaccctgacaaggaccccaacccacacccggaccggaacccagtcccaaacccaaaagtggactctaacccgtaccttgtgacccaaaattagaactaaaaccgcaaggttacccggactagaactacgacttggacttggaatcatannnnaaattggacatagatccagcaccgtaaccggacaaggacccaaactccaaataagac

SEQ ID NO: 104694 - DNA, 1358 bp, Cannabis sativa
ctatgattgaggtactatttgctgtgtgtgggcacttctctctcacaaaggatttcgaattctctctctgttttctctcttgatttcctgtgtgaatgaagcataccagagagaagagaggacggctgctatatatagggaaaagggaagctcaactttccaaaataaacagtttcctcttttactgagtaattgattaactgccttatttggtgtgatccaccactttctatttataaatagctgctaggtttagattagtaattacttggcaattaaaaaattgaaaataataattgggaaacacacaatagtgtctcttttacttacatccttcttcatgggagcatgttttttatatgggaccattgactaggttggcatgtagattgtctctaggtcgtcagttaggacaaagaaggtaatgaatttggaggtatcttctctaggggtgtgttcagctttgcctgggaactttcccttcttcccgttgcttggcctgccattgttattggacctttttccactcggagttgagccactaggatattgtgggctttgagtaggtgctcctactaaggggacctgtggttggcccgacctaggttcgacatcatctcattgaatggcctcttcgggcttgataaacctatatgctgggtccaagaacttcgtcgtagatcccacagggccccttttcttaatgtccttccacagttctccaagtacttcaatgcccttagtatggcagctagcctcccctcttcagttaatcttgctactttcatagcttctgtcatgaacctactaatgtaggctctgaggggctctcctagtctttgttttacttcgaccaggtcttctaaatgtaatgggatttggcgagaagaggagaactgcgcatggaactctaaggagaaagctttccatgaattaaaccttcctggtggtaacttaaaatgccattattgtgcagcttgtgaaagtgtggcagggaataccctacaccgcacatcacctcgtactccttgtaaatccatttgcatttcaaaatatttaagatgtgacaagggatcctccttctctgtgtacatcttccaggtcggtattttgaatttaaggggtagctccagaacatatatcttaagaataaagggtgatctgcgtgctcgttccagctcgagattagtgaattcatggccggctaggccttggaacatattttttggttaatctaactatccttgcatatatgggcgaacctattcaacctcttgaccgacctgtgtcacgtcaggatctcttagagttgggtcttggatgtggatacctgactgagtggccggttgaacgtattg

SEQ ID NO: 104695 - DNA, 1670 bp, Cannabis sativa
aatgggctggggcagtaaaaaagttgtttttgccgtgtcccagtatttttgtaaaattttgatccaaaaacagtatatatgtaaatttcccaaaaaatatatatatgcaattggccctatagaattatgcatgggcttgatctgcccgatagtaaaatttaatttcaaaacattatttagaaaatatgacagtttttaattcgtcaatttttatgacattagattaatttttacttttttattgtattttttatgccatatttttattatattttctttcaaatgtgccatatttgattttttataaaaaaaattaaaatacaaaaaattgatttttttatcaagaaattattttaaatagtgggttgatgatcgagtcttagagtttatgagaagtttgtgtgattagttttagttttggtattatgttgatttattcaatattccatacagtaaaataaaaaacaaaacatgtgaatttatatgagttttggtattcataactgtttttttattaaaaaattagtacttttaattacatatgaaagtgatagatttcttaattcattgctttaacaaaattatttgtaactggtttcttaatcagaaaattaattttttcatcaaggaactagtttcttcaaaaataattttgattatatagaagtaaaatttatatataattttttaaattttttatggtattctttcttaactatgatgatttatcttatatttttaagtttttttttaaaaaaaatgtcatattttgctgcaattaaatttgcttgccatgtaaatcaagaaaaaaatttcccccatatttttgtaaataatcctacataatattgtctactttaggtctaaaccttcaccattttattttaggaaaaattatataaactactatttttggtaaaaattttacattttttacgtttaatatttttatatatatttttacagtattctataaaaaaacaagataacaataagaaaatcactaagtaacaaaaaaataatatcaaaataatgtaaaaaataataaaaaattaacaataaaataacaagagtacaacataaaaatacattaaaagaccttatattttatgtaaataaaattataaaaatatttaaaatttcgtatgatttttttttttttgtaatttttatatatatttttttaaaaaataatccatttattttaagacctcatactaataaaataaataaaacgcatatatttaaaataattcatacttactcttttaatgtaggacataagttgataacccaacttttttgtggagaatataaaaaaatttatcttctttattatttatcttttattattatatgagatgttttcatgcatgcatgtgaagccaaaaacatagttccattgcatgcacttttttaatattagtattatttattatactttcttttttggggtgcataaaagctggttttctatagtggtatataataaggtgaggtaacatcaatatacatgactaaaaagagcttcaataaattggaatatcatcttttttctttatctctctacatatactacaaaaaaaatatttttagtgacaattttttaattataatataatttttttaattaaatgtaacttttagtcataataaaaaattatttgtaa

SEQ ID NO: 104696 - DNA, 579 bp, Cannabis sativa
cttgtgactgtatatggtttaatgaagagaaagatgtaaatatcgactactgcaatacaatttttcattagttttttttttcttttttctttttgggggtgagagtttgaccaattttgtccccagattatttattgatgtgtatgttcaaaatctaaagggtaaaggcaatttgtgtataatgccacaatgcttgactgttgaagtttttaatagattagactgttttcagtatgtgaccaacaaattaaatttaagcaagttacaaatctttaatttctacctagttttgttcctcactcagtcttccaatttctttttctttaacttctgaaaaattaaagtttattctctctaaagaaaaagtgtttctatgactactgatgtttaacagtacttctttagaccagaactcttttgaaaacagcttttactttcactttgaaggattctttataattataaatgtttttgtaatggccctattggaatggaatagctattcatgtaataaaaataaagttcattccaagacaatatttgctttgtaattttcattggagttagtgaattagaaaa

SEQ ID NO: 104697 - DNA, 502 bp, Cannabis sativa
attggggcgacattacactttcttttagagacgatttttttttttgctcctaatttgcataaaatatgagcgattttaatatttttaggggtgacaaaaaattgcccctaataatcacttttaggggcgatttattttgtcgcctctaaaaatgagcattagggacgaagtattaggagcgacatgttagtggtgacttgtcgtccctaatactttttagggacgattataaaggtttttagaggcagcttttgtcgcccctactactatcttttgttgtagtatgaaattatgtttgcgactgttcaatattcccttttgtttcagcaagtgttttactttttctttaaaaaatatgtatatttcataatgttagaagtcttttaacacgatatcttttctttgtttgtgtgtggttttcagatcaaatcaaagtttagattttaaagacaataaaatattatagtattttgtcattagcaaaatatttttacatggagac

SEQ ID NO: 104698 - DNA, 1059 bp, Cannabis sativa
attatttatgtataattctaaaataaaattacctatgtgtatatatattaaaaaaatacgtatacacagctataaattattataaattttttaaaaataggtgatacgactaccataactacaaaatgtacacaaccataaaaaaatttaaattataatttctgtaaatgctaaaaaaataaaaatatgcctaccaacaaaaatgatatataatacatataatataccctaatataagaaattttcaaattatattttttaatatagttatgtcaagtgtgacataaaacatatttaatcaagataatgtctcataataataacaccaacaccaagagccccacaaagcactaagtgatcaccaccccacccccaacattatcacaaagtaggatatcatcaatcttttaacctattttcttctttatttctactttttcataaagctggttacttggctaccttagtttcttttaattttctttcctctttaataattaaaatggatttagacaaaagaaattgcatgctttgaacaacatacatatggattttcatgccaaaaacatggacttatcttttttaaataaagaccactcacttccctacataagggtcccatatacattgagtacaccatatgatcagatagcacttctagcaggttctaaattggaaatttgtgggataataaatacctaatgtttacactttgttgtaattatatacctaattttttttgaggtattattttaataccaatatttgtaaagagaaatattaaaatgcattattagtactcttttcggtattatactgttattggtgtaattaaatattggatcttatatatatatatatatatataactttaaacaataatttttaggaaatatcgttaactaattataaaacgtcacttatagaaattgttggacaccactaatatccaataacaatgctaatttatataataacaattttgttaaattatgattctttgaacacgtgcttactctttattggttcaaattgattggttggagcaataaatctaat

SEQ ID NO: 104699 - DNA, 546 bp, Cannabis sativa
ccctttggctagtagcaactaaactctttcatttgattttgatatgtaatctagtaacaacaaataaaccctgtaatgctctcataacctaggataccaaaaaattcttttggaaataaataaaataatgaaataggcaatgaataatgttttaatgtacccactatgactaacctttgaggggtttactcaacgcaacgtggactatattattttctgacaagataacaacacctagtccaactaagctcgtggtgctcaataacgcaaaatttcatatgaaaacttttatttctcatgaaaacatggaacaatgaatcatattaccctaaataattaggggcaagctataaaaataagtgcaaaagccttgaaaggcatcaaagccaacaaaattgtggtgcaacgaatcttcacaatgtataaaatattaattggctaactatttgactaataataattgcttacagaaaataataatagaaataaatataaagactattataacttaatgtaaactaagggaaagaaaataaatataataat

SEQ ID NO: 104700 - DNA, 672 bp, Cannabis sativa
  modified_base (178)..(182): a, c, t, g, unknown or other
ctacttctaccattatttcatactttgaaagccctactcttaacaaccattattggggtgatcgttactaagaataaaagacttacaataatacttatcttttgagattctacgatgttaaattgctaatgaacgaacatatattagggatgaatctcactaaaataagaactatgtnnnnncaacaatggagatcgaatatttttatactaaagctcattatttaaaaatatatattttcatctatcatttattttaatatttatttttatttaattaaaattactaatttagataactctaaatataaattttaattaaaatatttacaaaattatacttagataaatttgaaaataacaaaaacttattttccatcttagtattaattttcaataaatattataaaaattacttaatttaagttggtccaaaattaagtaaaattagttttcaactcaaatttaattttctaataaatatatgtaactaaattcgaaatccaatgtgtttaaagataaatacatttatgaaatttatataaaataaaataaaataattcctaaataattattcaaatttatgttgatataaaattaagtaataaattaattttcagcataaatataatttttctttttaattaaattcttaagaaaaatatcaaatatt

SEQ ID NO: 104701 - DNA, 687 bp, Cannabis sativa
tgaggaagagcaggtgactccgcttaaaaggaggaagaaactttcggcccagcccaagcctattgaacatgctattcgcattggggagcccatcttggctgctcggccgccttctcctgtgtttggaaaagggaaagctattatgtctgaaataagaggcatgttacgtgatgatggactttcgagtcttgtttgggcaatcaccttgcatactacttcgtcttgtttttgagcttcttgactattatgctttatgtttctgatgtctgttttctctaaccatgttgtttttgttccatgcagacatgtctcagaagatgcttgacgctctgaggaagagaattggcagaagttccagcgcatctcctccagccaagaagtccaaaggcggtgaggggtgctcctctaaggaaaaggcacctgtcggggaggtcattgatcattctgaggagctagccttgcaaacccctatactccaaaagttgccaagtccaaggagtctcgaggagggagttcggacaggcctgaacaaccgaggagtgggtctgagctgactaagagtggacccgaacagatgcgagcccctactccaccttttcaggtgcttccagaggccaagaaaggcaaagaaatgctcgcccactatatgaaccggttggttcctgttcctgaggttagtgagcaact

SEQ ID NO: 104702 - DNA, 1030 bp, Cannabis sativa
atgtgcctattgcaacatgctgcccaatgtgtactgctgcaccagaaacaacacttcatgtgcttgttcgttgcccttttactgctgtgtgttggaggcagacgaaggtgcctgctgttgcaccagctgcaatgctattcacgagctggtttgaggcaggattgatctcttcgagggaagaagagagtgttgaagcagccatggttctttggtctatttggaatactagaaatgatgtggtatggaatgctaaaattccgatgatggaggaggtaattcagcttgctaaaattacctatgtggactggtttaatgcacaaaaagctgatgcagacattcccaaagattaccatgagcctcggtctgataaatggaaggccccggagtttcctatcatcgaagtaaatgtggatggagcaatttttttctatggagaatcggtatggagttggtctaagtagctcgggctgcttctggtgtggttctacaggccaaaacagtgtgcaagttgggcgcactacagccacatgaagttgaagcaatgggaatgaagaaggctttgagttggattaaagctaatgcttgacaagatgtgattgttgagtcagattgtctacaagttatttcagatttacattgtaataaaaatatggcttctccttatggccatattatttttgattgtaaggcgttgtttgccgaaatcgatcatgtttcgttatgttttgttaagcgatctgctaatagggtggcgcattgtctggcgcgatcctctcttggcgaggctgatcatattttcagtagtcactctttacctactgttattgcttccctagttcgggatgatttaagttaataaagtttcgattttattcaaaaaaaaataacaatcaacaaacaactttataataactttattataatatgtgaattaaataagcatcaaaacaactgtacatgttgcatcaactctaagaaataaaaaaaaaatcaataatctataaaataaatttaaaagcatctacaaaat

SEQ ID NO: 104703 - DNA, 788 bp, Cannabis sativa
taagatgagatgcttaaaagtgttaaattctatgaggtttgggaggtacaagaacaactcagagagttttgttcgtgcatttgctgtaataattcatatcttactgtcacatgttaattttaatgaggggagaaaagatattgacaggagtagtaagcactggcaaggtaaaaaagatactgatgcgtttgatattgtcgtggttgataatttgccacaacaagaggataggtaactatctttgttttttttttatatttatgattctatgttattgtttattttttgttatctgacaattgctatgggtttatttttgtgatgtagtgattgtggtgtttttatcataaagtatgctcatttctttatgcatggattgattgataagattcctaagaagttggacattgcattcactcgtaagaagttgtgtgttgatctgtttgttcatgcaaagaagaaggagttgggtgggtacgagtctacttcggagaatccaggaaggatgccatagatttctgtaatagaacaacatgttggattattagtttacatttttttgaactttatgtgtatttttatgtcatgttgttttgtttttaggtttatgtttgtgtttgtttaagtaactgtttggaacagtaatattttaggagactctcgcctattttatttttgaagtaaccttttggtttactggcacagtatgtttgcagtttttatgttatgtatttctgtgagacaatatgttaattttttggatttagaaattagttttagtgttctgg

SEQ ID NO: 104704 - DNA, 2567 bp, Cannabis sativa
gaacctgaacaagaaccacgagacggaccctcgaacaagactaggattctgaccaggtgtcaaacataaacctagaaccgaactcagacctatccccaaatctaaactgatatcgaaactggggcctagacacggtcatgtacccagacctggaccgaggtctggacccggacctaaatctgggacccgatcccaaacacaaactcggacctagatagggatcgaaatacaaatctagactcaaacccagacccagacagggatcaaaacccaggacctaaatccagatagagatcctgaacagaacccaaacctagacctgcacgcgagacccgaactcggacctggacccgagcccagacctagatcagggtctagacccggacccagactcggaccaggactcagacccggacccagactccgagtgtggttatgtttcttagtctaggtcttggtccgattacaattttgggtgtaggtccaggtcctggtcctgggtccctatccgcttctggtttcagttccagtttcaagtcacggggtacgagttgagtccaatcatcgaatcccagatcccaagtcctgaggttggtcgtaggtccaggtttgggtctggggtcaggttccagatcctgatccaagtttcgaggcccaagttatggtccttgttttgggcccaattcccgagtctgggtgccccatctatgttcgggttgtaggtcctagttcgggtccaagtttgtgttccgattcaagtttgggtctcggttcccggtccgataatagctcccggtttgggttcgggtctgagttcgagtcctagtcccagtctgggtttgtgtttcaggtccaggtctgagtttggttcttaggtcctgggtccagccctagtttttgggtctgggtcctgctccgggtcccggtctaggtcagagtcccgtcttggtttagctgccaagtcacaggtcctggtctgagtccatgttccagtattggttttggtctgagtttgggtttaggtttgggtcctgttacagtcccaggtctgggttctcatccgagtcctggtcagattttgattttgggtcttggatcgggtctaggtacggatctgggtacaggtcctagattcaaacaatgactataggttaggtcgaagcctaaggtccagattcagatctcgatcttggatctcagtcttgtttaagttcaggtcctgtgttccgggccgagtcctaaggttgggtttgggtccgagttaggggttttttttctcggtagtcagttactggtatccgggtccaaggtcgggtcctgtgtctcgagtctggggttgagttttgggtctcggtcgcagtttcaggggcaagtttcagctccaagtcccccatctaggtctgcatcctttgtccaggtgcgcgtttggggcccaagtcccccatctagttcacggttcgtttctcaggtcccaggtctaagtctcgggttgcgggccccgctcacggacccagaagtagacccagacctaaacttgggaccccgaacctaggaccctaacttggactcggactcagacttggacccagaccgagatctgaaaaacccgaacccaaactcagactacgattcagacccagacccaacctggacccatacccgaacccagaaccaaacctggacccagaatcagaagtggaactgtgacaagaaccgaacccaaaccataaccctaactcagacaagaagtttgactgagaccttgactaggactgggacttcagacctgggacccgaacttggatcaggacccgcactgggacctggacctgactgtgtcctaaaccctcgcgggacgtgatatccgctacccaaactaagatccagaccctgagaaggacccgaacgttaaccaagaccaagactaggaccaagacctggacccgaaccgggacctggactaaaaacaagactcgggactcgaaccaaaacctagacccaaaccaggacctaggaaccaaacttggatgggggacctaaaccagggacctaggccccataacctagacccaaatctatattcgggactcaaaccccaaccaagacctgacctggacccaggaatctgaaacccagacccagacccgaaaggtgctctggaccaaaaccaggacaagttcctggacacgaacccataccagtaccaaactcgaacccaaaattggacctgaactcatacccagacccaaaatcagacccaaacctagacctgcacctggacccaactcgaacccagaccgggattggaacccaagacatagacctaaaactaaacccgtactcagatcgagatcgaaacctgggactcagacccgatcctggatccaaacccaggaccgtaatccacaccgtagcccgattcagacttagaccgagatccggacctgaacacaaactcggactcggactagaaccccgacccgaactcgatctcagaattacaactagaactggaaccggactaggactaggaccacgatctggactaggacccaaacccgaaccca

SEQ ID NO: 104705 - DNA, 1112 bp, Cannabis sativa
aaattactttatgtattattttttcaatttttttgtttcaaatttacggtttgggtttttaaagtaatttctatgtgggttgctatacgatttttagttgcgatttaggttgttctgtaagttgatagtagtttttatgtaaaattccgtaaaaatgtaaaaaaaaaaaaaactgtttaaaagtgtaagaataaaaaaaccttataatattttatttttttttcacattatttagacatttttaattttaagatattacaatattaaatacctctaaaaattattaaaataatattatattattatgtaatatatattaatcaattaaattttcttattttaagataaaatattaataaaaaagaataagaaagataaaagataaaataaaaaataccatacacattattaaggtcatgagagaataatcatctactcttctctttactattcatttttttttcttggcttttattttttcttcttctttttacttgggttgacttgtattctcttgtttccttggtcttgtgtctggtgtgcatcttgtgtgttctgcttttatttcaagtgtttttcttgtatttttctctatttttcttgttagttctctgagtggttggattgtttcctttgctcttgttttgtcatatacattattttttagtactttttttcactctaaaggtaaacatctatcaaaagatgtcaaaatatatccatttcatcaatttttttttttttttaaaatatcacactgtagatgatctaagtgctgttattttagttctctctcttttttttttcttcttattttattttgttttctacggagtatcctgtctataattactccactttttctatataactccagtgtacaactttctctgtgcttaatttaatagagaatttgattatatatccatacattagggagaaattaattctctaaatttatgtgtaccgatattagaagaataggtcaactttctccttattccgaaaatgtcctccccattttgaaacccccgactcatctctctttcctcttttctttctcgctctcttctccttcttccctaaactgaaacgcaacaagtttctgttgg

SEQ ID NO: 104706 - DNA, 665 bp, Cannabis sativa
cgtgttcgtaacaccgtaaccacactaatatacaacactatactaacaccctaatagtcacattcatattagtgctagtagtgcaaacaactaaaagaagcatatattcttacgctatcttacctcgttccgtgctcaagtgtgccgatcagcctgagtgtgcagctcgacgctttacagggccctaaatcataatattgaaaactcgatgagagacacgctaaaacacttatcggggatgtaaaatccaaactaagattaaccctatcgataattaggatgataataccctaaattacgcaaaaacgggaaaaactaaggctcgggaaaaaaagccccaaccagcagaccggttgccaaccggaagtccggttcctggcaccaaccggtcgaccggttgcagcaggcccccaggaaccggaattccggttctgagtatggaacccaaaaattcttccccttaaatcaaatcaatcccaaatcttcccaaaacttgcagaatacctgtatgcattatactaaaccaatcccaagcaacaaatcacaacaaaccactcaaattctaaaaacaccattaaagacctaactaatgttttctaagctttaacttgaacaattcacaacccaaggcttaatcccaacttaaaatggtaagaataaacatt

SEQ ID NO: 104707 - DNA, 563 bp, Cannabis sativa
taaagcaatttacattaataaaattattagagattagatttataccttaatggacgttaagattcaacgatttctccatcaaaagcggcgaccggagctaaaaataccacaaccaccacctctaagcttgatttagcctaaaagaccaaataaaaaacgatcaaactctggggatatgtttttgggtataaaaaatgcaagatttatttttttaaaaaaatgggtaaaaacaaatgaaaaatgaagaaatagaggaaaaatggggtggttgggcgagggtttcatggatttgagaggaagaagggttgctggttattttagggttttgaggaagatgatatcggagagggttatataaagatatatagcgtcggttattacaaaataaccgatgcgataatatgtgtttttttttattaaaattaaaaaatcacctacggagtcggttaatacaaaataaccgatttcataggattttttcattaaaattaaaaaagtatcacctacaaaataaccgactccgtaagtgtttttattactttactgaaaaaaaaaaaaaaaaa

SEQ ID NO: 104708 - DNA, 1006 bp, Cannabis sativa
ttcttcttaacaaacagtaccggagctccccagggtgacacactaggccgtgaaaaccctatgtcaagcaacccctggagttgaatttttagttctttaggttctgctagagccattttgtaaggggccttagaaaccgattttgctccaggtgccaagttaataacaaaatcaatttctctctgtggtggtaaactcggaagttcatcaggaaaaacatctagaaattcccgaaccacctcgatgtcttctggccaaacagagtcagtccgagtggtatccaataccacgactcgaaaccctagacatccctctcgtaaaaattccctagctgttggtaccgaaattactgggatccgagatccctgaactaatccgacaaaaacaaacggttcttcaccttctggttggaagatctacctaatttactaaaaattttggctgccacatatgaatgagtggccccagagtcaaacaacatagagaaataagagttgttgaccgagagctgacctgataccactgaagggctggcttttgcatcagcctgagttattacgaacacccttactggattgggtttcgttgtagtcttccatacttcaggcttcagttagggataatcccctttataatgccctagcataccacactgaaaacaccccttccctttacactccccagatgatgctttttacaattagggcactctaggtaagtgtattaggtttcagagctaccctaacgattgcctcgaccctggttccctcggaacctcttgttctgacctgagccactggatgcagtaggttcctttcttttctgatcagtggtcgagccactacctcccctactaaagcctgatgtaggaggagtaggagccccaccaacaactggagtccctcgatactctagggtgcactccactacgccctcagctcgcagtgccttatccaccatatcagcataggtggggttgtcatcagtagtgatcattaagtcatgt

SEQ ID NO: 104709 - DNA, 1973 bp, Cannabis sativa
  modified_base (1921)..(1928): a, c, t, g, unknown or other
atcttaagatttacttgattttctttcaatgttcctttttttggattaatctgatacctactcattactcccactcaacagctggtatttggtctaatgcgtaacaaagcatttctacatatctgagacaactcactgttgatcctaagaaattattttattggcctttatcttttctggaatagttgaaacttttccttaaataaataaaatatatgtctagaagtcgaaaagcttctatagattgccattagaaaaaaaatgcttcaatatcttactaaagtaagttgcacgcactagagtaagaaaattaccaggcatacctcaagccctaggcttagataatctcaaacttttaatactataggatcaggaagttttgttaagtccattgaatagacttattttcgaaaattcctttatattttcgaaaattcctttattgttcttgtaataaaaaacctttggttactccatatgaatgattttaaccatagttctcttgacttttcttcttagttccttattctcactatccattactcgtttaaactaacaatggattttcatcacaagtgtcttccaagtcataatatggtgagttccttaaaaccctcccactatgacaaggtaccatgactttttgtctaagaatctaaatggcattgtcctcatcggttgtgtcaagacaaccgaggtagtgggatcatcttatttagaataagatgataaaagactttagaatcaaaaaaaaaaaatatctcttctactttgctactttcttttcagactttctccattttggtaagtatgccattctataatttcttaataaagtgatcttttcccataatttcaatagtctccttatacaccaaattgaccatccggtcaaatataaaagtattttccatcattactgtatcaccatatgtaatccaggtaatcttccttaccttagtgatatcactactctctttggcattgttttatacgttaccctagtaacgtcccggcttcaatcctccattgggcccttatacaaaagtgcatcactctaactgcttcctagactgacgactttccctagagaccaatccaagtgtttccaatgtgctttgttctggttcgaacgcttcatggggaaacttcctaaatgaaatcaccctaggtcaaggacacttaactgtgtagtcccttcatggtgggctaccaaaacaggatacttcttgttaatataggcagtcccaaacaattcattcaagtcctcaacactatgtagtcccaagcctacataatctcaaaatcactacatataacctttccccatgcaatgtggattgtacaacccctaggctttcctttgcagatcacgggactctaattgtcacaacttgactcatgctctttggtagtgaatagatccacccaaaaatggtcacctttacttcacttagggtttcagacaatactcataaattgtcccacttatactaacactagatcacttcatatcaaaagattccgttctccaaatcaattagatggatactcccattaactactcatatcctatgttccacttgggaatatcagcaaatttaactcatattactatttttctaatctgtctaccttatcagatgagttaccactaaataacatacacacattgcccatttagatattttaatatcctctcattgagtgtacaatgtttgatattgatatcaattgaaacaacaactataatattacccataaaattctaacttaagtcagccgaaggaccgatacccgggtcctcttgaattataacaggcacttgagcaggacccttacatttttcttttttaacatcaatctttcttaactgagggtaggttcctttcggatgacccatgtaaagcccgcttagttnnnnnnnnaattagcagttgtttatgtttaaattatgaaattatttatagcta

SEQ ID NO: 104710 - DNA, 1325 bp, Cannabis sativa
tttgaggttggagctaatgtaggttgcacaaaaaaattatatacagagaaaagagactaacataagtcaccaagatcatattttttttaatacaagacaataaataattttgcatgtggataaataccctaatattattttctattacttttgataaatgtgtaactatgatatttttatgtttttcattaattttccaactgagtcatctaggaatattgcttcttgggacattgtcttaccatttcaccaaacttttacattgtttcacaaatctatatttataaaagaaaaaattatatctcaaaatataataaaaatatccgaaaataaataagctgaataaaatataatcataattaaatttcttatcagaaatatccaagaacaactaaagaggttcacttaatatccttctcatttggattatattttatatattttttttttgtgatttgctctattattttctcatatgccagcttcccctaacaataattgtcaaatattagtagattgtccactagttgcagccatttaagttcattactgaaggacttaacattattataaatgcactaagcaaatagataaaacacaacttcactctgtccctagtctttgcttctctaagtatgctatctagagcactagcaacattctttattttaatagacatcatgttcttgaagtacttttcctttaacttgttcttacaaaaaacaagcttcatttcttcaggtgttaagccaccattagtgtacaatccagatactattgtaaactcttggagataaaatctcacaaatttttcgttaatcaaaaatcattactcatgtctcttttgataatgtatcctcctcaaaattatctagtttactaaggtgtcaggagaaaatcctttggtgtcaaggtccaagagacgatccaattgggagtaatatttaaaaacagtctggtagactttgtgagccaattctttatttggcctattacacttagcgaagatttcatggtaactttagattttgcagttgtattagtagtaatggcatgaggtatgcatggaagctctgttgttaatatagttttgggcatctacaataataatgcgtgaaatgaacaaaaatatataaacgataataatatagatataacaactataaaaaaagtttacaaatttaacaaaataagcagggttgcacatggtatgaaaatagactgtgcaatcctatgatggttgcataatgtaaattcaaggtcgtttatggttgtttagagaaaattcaaattctttaaacttggttgaagaacataaaagacca

SEQ ID NO: 104711 - DNA, 5348 bp, Cannabis sativa
acacaataagtgatgaaaatacttatatttctttattgatattcaaataatagagattacattgaaatagagttttatttaggtcataaaactgaacaaaaaccacatatagttttacataaaaatattgcataaaatataattcaatataatgcaatacaatacaatacaacctaatacgacattccaaacaagcccttaaacatagaacatttgaaaggtatattctgtctaaagacatcactcaagagcaatgattttaagcttactatactttgaaagtgttcacctgaccttagtactagttattttttgaacctttaagcgagatcttcttagaaggccaccacttaagagtggtgttcgagcattgtgcaacatgtgtggtccccagaccttttgcacttactgttagtattttcttaaatgttagtcattccaataccttggtaccagaacttagctccatgtcttcatcatacgtaccaagcttgtatgctcttgattttgtaacttcagttacttggtatggtcaatcccaattaggtatgagcacacctactgcactgtcatttgtagttgggaatacccttctgagcaccatattttccacaaaaaatttcctttttgagtcactttttgctgatgagctagtagatgtagatttattaaatctcttttttcttcaatttcatcaagtgattctgtcgggaggacatggttagtctcttaatcgtaagttaatattctatgagatggaggttctaattcaatgggcaatatttcctcataaccataggtcatggcaaaaatgtctgcccaactgttgtccttttagttgttctatatgaccaaagtacctctagtagttcctctagccagtttcccttggcttgttcaaaataaataagcagtgtaatcagttgcttctagttaagcaactcctctgaccttcttgaaggctttttcaagcttgatgaaatcaacaactctgtctagaaactcttgaacggtgtatactgatttgagcttcaagtctttccataatggacccattactgttagtccaactgtcaatgcaatgaccttggcgtcttcactgagtatctttgtctgcgtggtaacctctaagaatcgttgtcagtaatcgtttacaagttcttctttttgttgcttgatgcagaccaaattattgggctcgattggtctattctttgatggagagaattggtcatagaatgatttcttcagtgtctcccaagaattgatagatctcaggcagagctttagataccactgttgtacagattctgatagtgtagctagaaagactcgacaatgagaatcgtctctaatgccttgcaggtcagtttgtacttcaaagttgtggatgtgagagagagggtcttctttgccagtgtatggatgccacactggatttttgaactttgaggggactcctaaagccttgatttgattcgagagagcagaaaattgctctcgatctaactcgtaccatgttggctttagagtagtgatacccttaaccagagcagcaatggtgtcaaatttgaccctacacactgtggtgatctgtgtatcaactagccgcttcttattgaagtttttatgcatgctcttttgtcgtctaagttgattaaaggcattggtcgacctaggtgctttagttttttcctggtcgggtggccttggtagcaactacagggatttatcccatataacgataaagtcgtctcttaattgtttgcttcatgagcagctgctcacagtactacaccaattattctcttcaaaatagtcttcctcagagtgacatgtgtggaggaagttggactaatttcttaagttcaacatgtctccatgcacccatgggaagtattcctacttttggtcgtcaggacctcaggagaagtacctacaccaagcaccttgttcatcacaaaagtatttccgagtgtggagtagttcattgaccttcaccctccaaatctcatactcttcatttttgtggtaaagcttacgcggggtcttccccttggtctgactgcatgtccctttaccttttttagggtcatggggtggtctagagtcattaaacttgtgaagagaatcccacagaggagattggtttccctaaatgtttgaattgcttcaaaaagaattttgattggtcttatcaactgcatgaggtggacctgtaggcctacaatcttgagtttgaatcctttcagatacttgctcgtagctcgtttccctaataggcgaccgctccaaatcaggcagagatcccataaatccatgattctgagtttgagtcttttcaaacgcttgcttgtagttcgcattgttatggggaatctcactgcctgttgcttgctaagtagtggcatggcaaccaagagtggtagtgaggcttttaatgttcatggatgattactcggttgaacttatgaatttctatcaaaatagagttccaagtagagaattttaactattgtaggggaacttgagttatggcttcaatgaaagtaccaaaatattcacgttgaaaagtggtcaataccagctcactagattggtgagatgagtagtgaatgtaagtatataatttagaaagacgcacaaaatttatagtacttcattccccatgtcacgttggtaatggaactacgtttatttcgagtttttatttctcaccagatggtaattacaaaaaggctaagtgtttaagctctagtttctagagagagatgttttgaccatgtgggtagttttttgaatgtaaaaaatgagctaagggagctctccttttatagttgacggaggccaaaaaaataggagaaaaataaaaaaaaaatagatattttttgaccttagatgatgatacaatggtgaaaattagcttctaatggtgatattcattttttggagcccagggagacctactatgggtaactcagagcatattcttgtaactccattagggtcaaatttgaggtcaataactttagaatttcaatttaagtgtgagacatgacttgaaagagcattgaaatagctttgaaacgcaagttgaatcgcatcaatcggatcaatattgagaaattacgactattttactgaaggtagttcatgacccagcgcccaatttaacatccagcgcccaggttgacatatgacatcaacttaaacgctgggtaagtgtaaaaatgtccaagggatgtactttgagatgcctaagtgatattttgacatcacttactttgtttgtatgttctggcgaagttggtcactagttcttggagatgttgcttctacagaaaagagagactcgaaactcttcatttctgagtgagtttcccatgtttgaaattggaaatgcaaagttatgaatttgatttttttgacttcatgaatcttagttattgtgaaaaaaaaaagatacacgatcgaaacggaatcagaattggattcaagttgggccctgggtatcccgttttcaagctctcgagttttcattttgaaacatccaaggttcttgaacttgagaacaaggtacatcctaccctatttttgaccattccgtattcattggtcgaatcacattcggcatttgaataatcaaaccagcacaacaggttgattgacaacctgggcgctaggctcaataccaagtcaacttaggcgatgaccctatttttaaggacttgggtttgtggttttctccccgagtttgcttgaaccatcattatttctattaatggaaaatatattcaaaacacttttttgagaacttgatcggaaatagccaaggttgagaatatatcaacatatgcgttgggcctatagtgtcaggtgttaacctgggcactgggtcccaattacagccttcgaaaagtcctgtttagtccccaaaaatagttgaatcttaatattttttgaagaaagagaagacgctcggaagagctctcagaaaagatcatcaaaatcggcccagattgataaattatcaacttgggtattgggccagccccaagtgtcaacctgggcgctgggccttttttctggcacccaagaagtgttgtttcttccttgaaagtacatatttccctattttgaatgaagacaaagaagatgcaaaagtcgaattatcgatctgatacttggaaggtgccttgattgacaaaaattgttaacctaggcgttgagtgctcgagcaccgggtgctcaaaaatgaacttgctccaaatctaattctaatatcttaaatatgtctgtggtatatttagttgatgtcccaattcaaattttgatccattttcactaagacggtcccaaaaactgaaaccctagttaggactgtaaacttgggcgctgggtgaaaccctaggtgctcaggttggctttgggggtgcaggttcgtgtaattttagcttccatggcctgaatttgatagctcaatgggttcatggtacagaatactaagaaatagttagttggaataaagttattgaagcccgaatttccattattgagttcccgaagtcaacatgggctcaaggctagggacccctcccaggtccacttgctatgactcaggactactcaactctgagatgtcatatttcttctcacatatatcaaacattgatgttcatgtcatcagggatacttttggtgtaaacaaaaccctttatttaagacaactttattatcatattagtatttagtcttaaaataataacatttattattttaattggagttaagacaacttctatcttaatacgattataagtttagaatttgaatttgaatttcaaatctaaaataaacttatttgaaaaaatagttaagataattactaacttatatttgaattttaaattagtagccttaatatttattttgaattcaaaattaaattttaaaaaataaaaactcaagacaataattaattatttacattaaataattatttataatttaagtctatatacagtgtatatatattgttgaccgaggttttcggcaacgaattaaataatatatcaagaagagttgtagaaagtttaatgcaggagatttttacgtggtaggggcattaatgagcctttagtccacgagtcttttgtatttataagagtgtttattacagagaatgttcttggtggatttctctcctcttttctctcttcgattttctaactaaaatcgatcgacccctttccaatctgtttgtggggtatttatagtatttttctgaggggattcctagaaatggatcacttgtctttctgtgctaacttcataggggcacatattcc

SEQ ID NO: 104712 - DNA, 685 bp, Cannabis sativa
tggtgtcggaacaatcgctgaaaaaattattatcgttggaaaagtcatcatcgccaaaaaagtaaccaaaaattcaccgtcgccaaaaaaatcactagaaaagtcatcataagtagatgtctcagatataataaattagaaatgattttctaacgtaatgaataaaaacaaataacacaaaataactcaaaccgataatagttgaaactgtaacataatgaataaaaacaaataacacaaaatatcataaaccaattataattataatagaaccggttctataaaagtgttataataaatcaaatcaaataacacgaaataactccaacaggttataattaaaatagaaccggttatataatataatgaatgagtatttttggggtagatatggtatgagtataattatttgtgagttggagcatattgaatggatatttttgtttgagttattttatttaactgatttttgtgtgtgagtttttatcttggttactttatggaatcattttttttgtctcaaatttttaactagttgataaagataactagtttcttttattatatttgatttattgtgtgttattatttgtgtttatttattttgttatggaactggttctttttatatttatgcctcaatattttttggaattgatccccactttttttttagaaaaaaaat

SEQ ID NO: 104713 - DNA, 1166 bp, Cannabis sativa
tttcctttacctacacatggaagcagaactgtgagtcgacagactcataagaaaagcgtataacatatcatataattaccgacttgtatctagccgcccatacacctatttacaaggctcaacagatgagtaagaacgttccataccagggtatagccactgtaccacatacactacgtacctctctgtacgagtgttggtagggtttgttactctaagtgatgtaccacacatactcagtacctctccgtacttacgctggtatcacggtactctcagataacaatcactataccaatacactctataccttaatcgtataagtgttggtagtgcaactaacattttaagcatgcatatacacataacatatacatacactcacttattaataccacacattatattcatttcttaccttctttctgaattcaagtgtgttggccgacctgaacgggaagtctcgtgctagatggatgccctaatcacattatgaaaccgggtaagttacaagcacaaaaccctaatcccgagaaatccaaaaccataaccctaggtttttgtatactttttagggattaatctagctctggaaatagggaaacatccaaccacggcacggaaaggatgaaaattgaaaaaaatgaaaggcccagggaaccctgttaaaaccggctacgtgtaaaactggttacccggtttgcaccagttcacccaagaaatttcatttcttgcacaattctccaccaaacgtcaccaaaccttccagagtacctaattagggtatatacaatgtattccaaccaatatttcacagaaaaaatcaatgaaactcaacttgccattaaagatcaaagctttgagttcaaagctccaacttgcataaattcaacacaacaccactaaatcagctactagaagttaaaaccaactcaaagaaccctaaaatttgaaccctaagcatacataaacctaacagccactaattctcaaaatcataaactcaaaccaagcaaaaacttaaaaactaaagaatctcccaagatttcccaagatttccttgctgaaatcaccacaaatcagcagctatcccccttgtttttgctggtttcgaagagagagagaaggaaagagagagcttctcttaattttggtatttttctctt

SEQ ID NO: 104714 - DNA, 559 bp, Cannabis sativa
tatatgtgatattataaaaaaaaatttattattagaggtataacaaataatatacttactcaatgaatgagtccacgacattgcaattaaatagcacatatcgatgtgccttaactttagtatcctcatttaaacttttaatatacttttttcccaaatttcggcccgtcatttggaaaataggaagcaaattttcattgacttccaaattactgtaatttctaggcttgcgattaaactttgtctccacgccttccatgtatcttgagcaaaatgtcaaacattcatcagctaaatatccttcagcaatacaaccttctggtttgcttctgtttcgaacgtatgatttcaacttagacaagtacctataattattcatatgaacattagaaaaaaaaattagaacatttcaaatttaataatataaaaattaattcagattttacctttcaataggatacatgcaacgataaactgatggtccagcaattctcgcctcataagctaagtgtatcaccaaatgaaccattatatcaaaaaatgacggagggaataattt

SEQ ID NO: 104715 - DNA, 584 bp, Cannabis sativa
tattattttattaatattttaatcgattttcttgcctataaaagaagagctccactagctcatttttcacattctgtaaaagccctataaggtcagagcttctctctctagaaatatgagttctttccttagttgattctcttgtaattcttgtgagcaataaaaactcgaaagtagacgtaactccattaccattgcgacatagggagtgaactattataaattgtggtctctcttatttaatttctttcatctattacttttcttgtcaatgtagcgagacgatgttggccaatttttagtttcaacaaatagtcatttcaccaaaataatgaaaaagtcaatctgctaaaataacattataataaattaaaatacaaccaaacaaataaatagaataaaaattatttgcttctactctattttattacctccaccaaccaaataccacataaatatagtctcatctgaattaagatggcatatgtgttaaacttcacatagattatgaactatctaaatatacattaaacatcattgttcataatcattaaaaccaaaatcaatactttatttagagcatc

SEQ ID NO: 104716 - DNA, 700 bp, Cannabis sativa
  modified_base (171)..(174): a, c, t, g, unknown or other
tccatctatagtaacccaagccaagatgaagaatttggagagggacggctacttgggaaatgtcgaatgttttttcctttctccaaatcactgggcaactagtccaagatagggattttgtgcctagtcgggtgctcatactaagaagggtgcaatgctgcccttgcttcnnnncttcaagaggattgcggactactatcatctctgcctaacccagttcactccgaagggcatcaaatatttattcgccctgttcatcctttatgcctcccaaggatggggtgagccatctccgcacgacaccaactggcttttcgacctgaagtcaactcctaagcaaagcaggttggggcaattctacttctattaattggatgagaaatggctgaagggtacatcgaacaccaatgtcagaaaaatagggcattttgtggacgagtaatactttgtgcagtgcatggataccgtacacactcggttccagcagattccctcatactaccgccctcctttcacaatgagactcagggagagagcacaacaaattcttcaatcgccagaagttgctcggaacatcactttgttgaccactgaggcaaattatgtgaagtacaagctcttcccaaaggattttgtggcgaagcccttaaaggaaaagaagaaaaatgccaagccaaaccgggctggtggtaccaagtag

SEQ ID NO: 104717 - DNA, 613 bp, Cannabis sativa
tttatttgggtctgcaaatacaattgtgcggtcagattgacaaaactatgtgatttggtttacggtttggtcgtatgtctacagagccaaaatcatgtatgttcctagtagaaggctaaaagctcagaatgctctttaagagggtaccctggtgtcagctctccagcaccccctggcaccttggtgctaagtgagctactactggacagcgggattagtaggacaggcatatgaggaccacaaggggactcatatgtctccatgagttggagtactcatggacattattgggccgacccggtagtgcgtttaagaagctgccagaggttaatgggtacgtttctagtggctttctggtatgccgcttgcatgagacgtggcctaaacttccaagagatgttgtggtgcaccttggccacgagtctcaacacaagatgacacgagtagtcattcgttggctagtttgtatacgcgcatgggacggatgcacaatgttggaaagagacagaagtctagcgtatgcaactaatttggtggcttgtctcgggggcctgccaacattcgtggaggcatggcaccttgagaattagtccatggacttatggaagtcctt

SEQ ID NO: 104718 - DNA, 519 bp, Cannabis sativa
ccatctcgtcatcctctacttcatgtatgtcttcctcctccacttcatccatgtcctcttcattgggtggattgttatctatatctacaaactctattggatctcctatacattaaaagttaatttttggtaatggaccaagatcaacaaacatttggaaatcagttgtatcatgcataacatctacttcaatatcctctaaatgttcttcaatttgtggaatatcccatacatttcgatgatgaacttcttggatgactttccagacaaatttatttttgagatcatcaatgaagaaaatttggttagttggagatgccaaaataaatttattatctttgaatccttcaaaactagtattgatactaattatgttttgttcagacttcaagctctctaagggtcaactagtgcaaaccatttacacttaaataatacaacagaacatccactaagatatgacatcacggtaacttcttctaattggccataatcagttttatcttcaactccaactac

SEQ ID NO: 104719 - DNA, 813 bp, Cannabis sativa
tgttttctgagtattaagcaaggtctttatgaatctaagcaaaggtaaaaccctagaacccatgaatatgtattttgaagctttttctttagtttgagtatgtgattttgtgaattgatggttgttagggttagaattttaaggttcatttaagttagtttaagcttcttgcagctggttttagtgtatggatttggttttgtgcaagtttgagctttgagttcaaagcctcggcggatcctgtttccagagaaatttaaataacattactattataatttattgtaagaaaagaaaaataagatattatttagtgtgcaactgtacggttttttttagttgagttatttttatattattaacaatattatgtatatgcgttatacataaattttatgcggatagtgtacataattagcataacaaaataaatgacataatgataaaatatatatttcttttaaaaaataaataaaataataaaatatatacgaatgttgattttaattaatcaaaaatacaataaattttttatatttactaattaatacatatatttttttacgaataatttcttttttattttatgtataattaacattaaataaatataataatttattattattattttattttgattttttaaaataatatataataatcctgtgtacaaccaaataatatataaacacaaactgagtcgtttacacaaatgataaagaggaagttgtggctagattgcatgtgtaattcatttcagatacatcattatgacaacagaccataaaaacttgagcttatgttgcaaga

SEQ ID NO: 104720 - DNA, 516 bp, Cannabis sativa
aaaaaaaaaagtcgaatttatatatgggattttaaaaaaatctttcaaatatatgacaggttttttgttaggccacattttatggcattttatactttttgggcttttgtatatgaatggatttttagagaaaattatatggtatacccactttattttatttgttttaatttttatctttatttttatatcttttaaaatatacccacttttatagataatatctccattagactccttagattaatgtaaattatatgatagacttaagtagagaataaaagtataatgggcaatctactcaaaaagtgagtatatttaataaaatataatatgaaggtatttttgattaatggatacaaaaaagtagtatttttcaacttatcccatatttgtaagggaaataatttaggatctagtgtacacgtggtaaatttttagtggctcacgtaatattaattttaaaaataattataaatatttataaaattaaaaaatcagaaaaaaaataatttt

SEQ ID NO: 104721 - DNA, 1335 bp, Cannabis sativa
aaactgcatttgtaggttagttgtgtttctattgcagttatgttttctcaacaatttgtccaataattatgtgtatttgcagttttcttggatgcatatcccagtagcttcgaaaccagtgtactgattgttctcatctcaatgtccattgctttgaactagaacaagtattgattctattttttctacaaatcaactaaacattttccaagaacttaaattaacttgtattttacatgtataaaaatattttaattgcataaattaaccaattaatcaacaataaactttatttatctttttaaggaaaaataattatttatcaaaacaaaatttataattacaaacaagcaattaaagaaatcaattttgttccaacttattaacaataaatcaataatttatatttttgtatgaccaaaacacattaacgtttcaagatatatgtaactcaattttatttattttatacatgaataaattgaagattataattactaacaagcaaggaatgattggatatggaatgagaagattataattactaacagcaagtgtcagatttgatacagcagtttaaatggagtgtaaagagtagagtagtgcttgtaatgtctaaaaaagtaaagctaaaagataaggaatggtttgggagtttgtaaataatattgtatagataatgttaaggccttgttaaggcgcttataggatgtattaaaaagtttagtgcaataaaattcatctgattcataaaaaaaatgaagattataaagaattacagaaattaaacaattaatcaacaataaacattcattgttaataatatttttctttaatttttttaaatcaaatttttcaatcatatcctcaacatattatccagttagtaattatcaaattaatctatattaaatagtaatccaatacattgttatttttttttttttttttggatttgatagggagctttgatcaatattttttcaactcattttagtatgatccgcaacatttaaacaacaatcatatgttatgtagtatagatctttctttgttcattttgagttttgtgcctctgatgtttcatacctgttttcaatataaatttagatttagtagggagctccgatcaataatttttcaactctttattatatgatctgcaacattcaaatgataattttagattatgttgtgtagatctaacccagttcatttcgagatttttgtttcgaatgtttcagacttgtttttaagcagatttgttctatgagatttattgttgatcgattgatgtttgttgatattttttttttcaacttgactaatcgaata

SEQ ID NO: 104722 - DNA, 578 bp, Cannabis sativa
gaacgaaataacttttaggacaaaaatccttgagtcttggtcaagcttattatatgttattcttcttcttctctagctttcttgtaatcttgatgtaatacttttatttgtattttgatattttgattgtaatcctcctattttctcttgtaaagaaaacattttctaacaatctaaaagtcattttgatggcatatatttatttctaaaagacttgacgtggaggtcatacaatcaaaaaagttatccatgagggagagcatcaatcaagatcatgagaagaaaaacatgtgataagagattcaagccatccatgggtaagcatggtggatttattttgtgatatactatttatttgatagtaatatcttaacatattcatataatgagatatgatattttggtggagattttttacatgctaatatatatgatatatatgtgtatattaaattattatatatagtgatatataatattataattgagattataacatattagtatatgtatatatgtgagagagatatattatatcacatgtgatatatgtaagttatatgtacattatatgaaga

SEQ ID NO: 104723 - DNA, 810 bp, Cannabis sativa
tttctctaatattaataaatataaaaaaatatatattcaagataattgacttcttaaatttattaataacattaatatttataaaataattaaaactcattaaaagtgtaatacattgttaaaaaaaacaaatgttatacaatttaggacataattaacccacgttaatggtaggctagtgattagtagtcaattatattggtaattaagttatttggataccaattaataacaagttgttaattttagatactaattagtatcaaatttcatatgatactaataagtataaattctttttagattttttattagtaagtggttttggataccaaattaagaatatgtcagtgtactactaaattgtattaaaaaaaataagagttttaagtgatgatgaattaaggttgtcatataaaaaataagatactatatagtattaaaaaaacaaaataaagctatcatatagaaaataagataccaaaaagtattcaaatgagtcaattatgaatattagagtagctaaagtttattgtagttttgggtaaaataaattacttaattcttataaaattaaaaataaaataaagagaacaagtgataataaagtaaagtttggaaaaaaaattctagttgaagtaaaaatttgatttgaaaatttgattctacatataaagcataagtataataatgagatattgattgaaaatgaaataagaaaaaaaaaaatgggtattagaatacgtaagagatgattttttaaagaaagaaaaactcggttatattaagtttggttgtcaaaattgtaaa

SEQ ID NO: 104724 - DNA, 503 bp, Cannabis sativa
  modified_base (40)..(40): a, c, t, g, unknown or other
ttaataagtaaatctaattatatgaaatgagttttatttngggcataaaacccaacaattagagggttgaggagcaaagggtccggtaaagttatcattgagattcaagaaggatggaaaattgatggcgtgaccagtaaagttttggggaggtaagttgagattcacaggttgataattcatcatgtttatggtagggggtgagggtattgaaaaggttgagacttgtcagtgattttttccttacctctaaggagaatggtataagggtatagtggttcagagaaaagctcatcacacttttgaagaaaagcaacacaatatctcttagtgtgatcaagctttccacagaaaaaacagaaatctggaagtctttcatacttaaaatctaaccatttgacaaactccctgcccatacggatgaatttgatattcattcccctccttaaaggcatattgacatccagaaggatgcgaatacgcatgtaaggaccagtgccctc

SEQ ID NO: 104725 - DNA, 753 bp, Cannabis sativa
tgctgagtgaacccttttgctactagtcttgccttgaacttgattggttcaacaccagggatgccttcgttctgtttaaaaatccatttgcagcctaccaatttctttccttcaggcttcttgaccactatccatgttttattcttcttaagtgaagtcatctcttcatcaatagctttcagccattttaacctgtttctgcatgtagtagcctcaaggtagctagttggttctgaagattctaattcctctgcagtgatcaatgcatatgctatgaaattaacatatccaaacttgcctggtggtctagtttctcttctcaccctgtctctagcaagttgataggtgcttaaatcagttgtaccttcatgtgtatcagtttttgcactggtttcagaattctcttctgcaatttgagtgtcaggttggtccacctcaagttgcagactttgaactggtatagcaggttgtatatcattgagagctttggttttcattgccatttcatcctctttgaagacaacatctatacttatgatgcatttcttgaaaccaggttccaaacaccataatttatagcctttaactccatcaggataaccaagaaacatacacttcaatgctcttggttgcaccttattctgttttatgtgtgcataggcagtgcacccaaacactctaaggtgatcaagtttgggaacatgccttgtccacatttcttgtggagttttgaacttgtttgcaacagatgga

SEQ ID NO: 104726 - DNA, 1289 bp, Cannabis sativa
gtggcagccaccaattgcaaatagtattaaggttaatgttgatggcgctatatttgctgacactaatcagtatgggttcggttttgtggcccgtaatgcacaaggtttattgatcgaaggtgttaccaagagttaccaagggacggtcacaccagaattcgttgaagcattgggtgtcaaggaagctttaagttggatcaagagaaatcaatttagacaagttgtccttgaaaccgattgtttggtactaatacaagctttgcgtagttcaattgaaatgatatccatgtttggtcaaatggttaaagattgtaaagctttattgaaagaaattcaaaatgtttctgttctttttgttaggcgatcagccaataaggtagctcacaactttgctagagcttccttattttatcttgattgcagtttcaacttggggtctgtcccggttgatttgctacctgtgctggtagctgattttaatggttaataaagataagattttccattcaaaaaaaaattctaacaaacttatgtttatttttcaataaaaaaaatgtttacttcctttttttttaaaaaaaaaatccctaaatgcgtaataatattaataataacaccaatttaatatttaatccataaataactaattcttattttcttaacacagtttattaatatttattctgtcaaaaaaaattttactttttattttaaagttaattacttcatatttattggctagatgtttttttttttgtcatttagtattaatctttcaataatattgataattgttttcaaaaataaaaaataaataaaaatcaattacctaattgttatctaagcgtcacgtggcatcctcaaggtatgactggtttgcataattccagacccagtccaagtcgaaaagatagacctgagctcttctaaactccaagagccgagcctccaaagacatgattattccattcccaaaagcccatatagtcttctaagagatagagtaaagaaagtcctccagacaataattaaggcacattcagacatgaagtccaagaggtgcatttggaagcccttatagggtgacgtggttgccttttgacacctagtcccactaaattagatcttgtctcctatgtcaggatatggtagtgcgcataccgtaaaaagagatatattttttttgtccaaaaacgtccatctgacattcctgtctactgtagcagcacccacgcgtggtgtaacgtgcgtgctaagatgacacattacaagctaagtgatgcacacaa

SEQ ID NO: 104727 - DNA, 598 bp, Cannabis sativa
acgggttcgggtccacttttgggtttaggactaggttcaggtccgggtgtgggttctggtctttctcagggttcgggtccaaggctgggtcccaaatccaaacaccgacaacgggttttgtcaaagctgtgggtccagatccgaatcctaatctcgagtctggttccattttttgtcctgggtcacgagctcggtcctatgttcaagttccggtctgggtcggatactaggtcccggtcctagttctgtttcccaggtccatatcctgattttgggtccaggtcccagttattgtgtgggtttggctctcggtctaggttcgatttcaagtcctagtctcggttcgggtttaggtctctgccttggtttagatctgggctcgggtttgggtttaggtcttggtccttgtcatagtcgtagttctgttctaaatccatttgcgattctaatttcgagtttgggttttagttcgggttggagttcgagtcctggtcttattatgtgttcgggtcaagattttagtctaggtctagataaggctccaggtctgggttcgcgtcttgggtcttggtctaggttgggtccgagtcccaagttc

SEQ ID NO: 104728 - DNA, 565 bp, Cannabis sativa
  modified_base (28)..(39): a, c, t, g, unknown or other
aaaccaataatactaggaacaggaagtnnnnnnnnnnnnattgaatagacttactaacgaaatttcctttcatgtccttgtaatagaaaacctatggtaactccatatgaatggtattaaccatagttctcttggctttgcttcttagtttcttattcagacaatccatttgtaataaccgctttagtaatttggattagtaaaggcaattagcacgaatttctgttaattttataattatgtaagaatttatttatttgtggaccccaatattagaaatgtgtattagagttataatttctcaatttcggagattttatttaactctaggggtattatttatcttatatgtgaaatttgttatttttgtaattttttctccgcgacaacggaaaatgcgatggatggctagtttgattacatgggtaagtttagaaccttatttcttagtgggaaatatttgagagataataaaataccgggattagacggggttacagaatttgaccattttacccctagttttggatatgcctaagtcgtaggcttaagggtatttttgtaa

SEQ ID NO: 104729 - DNA, 715 bp, Cannabis sativa
aggggagttcttcagactatcttctgtcggctggaagaggagaagaagaccaaggaggaggagcttacagctgagattaagaagtacaagttggaggcagcgaggcaggaagaaaaagtacatgccttagagacagctggtctcgagattttttatgacttttggaaggctaaccctcaggcaaatttcaattacctaggagaggccaaagacatgtatatcgagtactgtgcttctcaagtggcttacggtgaacccgatgcgactgcttcttcctctagcaagaatgttgatgtacctccggttcagacaacatatcctccagctcctaccgggccagaggatccgaaccgagagcctgggactccatctatttaaatacttctcttttatcattctttttatctatcttatttggccataaggcctttttttatgacatcatgaccagccaagcggtctttaaacttgaaatcatttttcattttatagacaacaggctgactgggcagcttttaatcccagcattacgtgttttgttatctttaatgaatttcattctttgtttataatcatcgtgcaattgtgtttgttttatctttcccaaatgctttgtaaagatataggtccccccaagtgaccgagcagacttatgagtcttggtcacttgttttttacaagtatacttttttatctgtcggggtcttgggttcga

SEQ ID NO: 104730 - DNA, 1288 bp, Cannabis sativa
tatctcatgacattaagaatagaattgtgagacaacaatttgcacgttcgggtgaaacaatgagtagacaatttaatgttgttttgaatgctttgttgcgtcttcacgagctattattaaaaaaggctaaaccaatacttgatggttcaactgatgagaggtagaaatggttcaagaattgtttgggagcactagatggcacacatattaaagtcaatgtgcctgccatagataagcctaggtatcggactagaaagggtgaaattgctactaatgtattaggtgtagtctctcaagatatgcaatttatttatgtcttacccggatgggaaggatcagccgcagactttagagtgttgcaagatgctatatccaagccaaatgggttgaaagttccacaaggtagactttttgttccatgtgtaatatcaaacatatacaagttaatttcataataagtttacaatttcgccaatcaatttacaggatattactacttatgtgatgctagataccctaatggtgaaggcttcttaataccgtatagaggagagcgatatcatttaaacgattgggatgtaccacctaatactcctgctgaatttttcaatatgaaatattcttctgctcggaacgagcatttggataattaaagggacgatgggcaatccttagagatcggtcatactatcctatcaaaattcagtgtcgaattattttgcttggtaccttcttcacaacctaattataagagaaatgcatgtagatcctctagaacaactcgtagaggaaagtgaggatgattcctctgacgaagatgaaagtttaggcaatgatcattatacacatattgaaatatctaacgcttggacttcttggagggacaacatagctagagagatgtttgacctatgacgagaaaggaggcatacttagattgtgtttctttgcattatttgtgtttgatttgcttgaatttgtatagatttttatattgttggatatttctttaaattgcattatttgtgcttgactttgtatgattttttatattattggatatcagttttagacttatgtgttggatatcaaatttatatatcaatatttttaatttaattacatatgttaatataaatattgctacacattgttacaagtagatatgagatgctttggagcaagaattcaattacaaaagataggagcccttaggcccctttggtgcaaatagagatttactcaaatattgcatacccctcaattccccttaatattctatatatac

SEQ ID NO: 104731 - DNA, 618 bp, Cannabis sativa
tactattttatatcattttacttattagaaatttataatttttttttaaaatatttaaataacttagatatttttgtagaaatttgaataaggcttaatttaagatatttataattaggaaaattattatttacttattattttattcttaaaataataattatctaaccacacctattttaaaattggtttattttattattttaatttttattaaattataagatttaaagatgatattgaagatattttttttttcaaatcatttatcttatttgacatttaatttaatttgattaaaataattcaaataaatctagatattttaaattagtttttatttttgaattttaaattttgatgagatttttaaggttggttttaacaaacctaaatttttcaaaatttagttggttagtttaaaattataatgtaattatattaatattttatttcacaatctgttacatggacattgttggtttaattttatattgtttattcaaaaaaaaaatttaacaaacctattgtttatccaataatctgattttaatcatagtcgaattgtcaatagatcttataaataatttgtatcaggtaaattttgtacttctttca

SEQ ID NO: 104732 - DNA, 1015 bp, Cannabis sativa
ttttagagaaaataaaatatcgaggttgagtggggttatggtttttgaccattttacccctaggttggaaataagctagaattaatgcttaagggaattttagtctttagccaaggttaatgtttgggtggctgccttgtatggtgacacctagcagccattattcagcaaaggattaataggaatccttttcatttagtgagaatagaattaaagaaagaaaagccaaaattcaagaaaacactctctctcttttccctctctctcttcgaaccagccaaggttaaggggattcattgctgaacttggtgttttcaataaggttggaggaggattcaagcaaaggtaaaaccctagaacccttgaatatgtattttgaagctttttctttagtttgagtatgtgaatttgtgaaatgggggatgttagggttaggttttgatgcaatttgaattttaagcttagtttgagttgaatttagtttctagcagctggttttgatgtttggattaggttttgtgcaagtttgagttttgaattcaacgctttggtctttaatggctagttgagtttcattgggatttttctgtgattttctggttggaatatgttgtgtatacatggtttagctactctggaaagtttggtggcaattggacaagttttgagcaaattggtgagtttttggggagactggtattaaaaccagtttactggttttaccagtacctgtcaaaccggtaaaccggttttggcagggttccccgaaaaatcagttttctaaattctcctccatttcagtgccgtagttgggtgtttctctgtatcctaagttagtgtgattcatagagagtatagcagaacctaaggttttgggtttcggattcccggattagggtttcgaccatgtgatttactccattttattatgtgattagggcatccgtctagcacaagactttccgttcaggtcggccagcacacttgaatatggaaagaaggtaagaactgtgta

SEQ ID NO: 104733 - DNA, 3709 bp, Cannabis sativa
tctactttttcctgttttctttttaatgtataaattttatagaatctttttgctatttttattatttatataagcatgcatatttgattatggtaacgaaattatatcattaggaaaagctcgacgagatgagattcattcgaggatgacaatacccaattcttatggacttgttgctgttgcatcagagaaatatgtaagttttatttattcgtcaatttatataaattcaattaaattgaaactatagggcatcagatcttgtttttcaaacttaaggtgcagagttgtctagaaaaggtatgtacttgttactttatcattaaattaattaatttccttagaattatatttcaatatccttgtctcttgttgataccagccaaagatggtgatgattcttgctttactattttgttactgccccttagtttataatcagcttgttaaaagtttaagatcagctttttgaaaatttttgttttcttatataagaattcccaaattggcatgtgatgcaaatttagctatgtcaattattgagttttccatgttgattaatgaaaccatgaagttaatcacagcttcctgctcagtttatttttacagtgaagcatgatgtttatgtgtgcctgtttttttaccaggaggaggcttacatgcagaaatctccggctgaaatctcttgtagtaaatttagtggagacagagatgggtttgtcctgccacaattttatgaaattgccaaagattttaattctgctactcccacagctgggttttctccaaatggtgatgttaatagtactagttcagagctagaaactccaaaagcttttattactttagagaaggatgaatatgagcaagagatcagccatcttcaaaatatggttagaatacttagagagagggagaagaatcttgaagttcagttgctcgagtattatggccttaaagagcaggaaaccactgtcatggagctccaaaatcggttaaagataaacaacatggaggctaagctttttaatcttaagattgaatcattacaagcagaaaaccaaagactagagaagcaggtggctggtcaagctaaagtaatagcagaacttgaggatgcgagagcaaaaatcaagatgctgaagaagaaactcagatatgaagctgaacagaacaaggaacagatattaaaacttcagcgaagagttgcgaagatgcaagaggaggaatacaagtctttttcgagtgatgctgatgctcaattgcacctgaaaaggctaaaagaattggaggatgaagctgaagagctgaggaagtctaatttgtcattgcggctagaaaattctgaactgtctctgaggttggagtccactcagatccttgcaaactctgttctggaagatcctgaggtaatttacttactctattaatcatatttcatcattattaccttattataattattctggtaatgcattctaaatctttgttatgatgtattttgttgcagaccgatgcattgaaagaagagagtgagagattgagacaaagaaacaataaattgcagcaggaaattgagcaactcaaagcagataggtgtactgatattgaggagttagtttatcttcgatgggttaatgcttgtttaagatatgagctgcgaaattatcagcctgcagctggtaaaacagtggcaaaggacctcagcaaaacattaagtccgaaatctgagaagaaagccaagcagctaatattggactatgcaaaaactgagggagtaggggaaaagactatcaaccttattgattttgattctgaccaatggtcatcctcccaagcttcctttacagactccagtgagttagatgaatctccttttgataattcagctgcagccaaaaccagcctttcaaagaagaagaaaattttcaataagctcaggaaacttgtaatggggaaagacagtagtcatcataataatcatgtttcatcaacagataaaattgaatctgcagaagaaagcgattcaaatgcattaacaagagcttatggagctgcggagaaccatcatagatatagaactccaactctgaatttatgtagacattctttggatttgcacaaattaaaaagtactctgaagaaagaacaaggtgtggacatcgaaagggtgcaaagaaagagtgacgggggttcctcttatgtgtacaagagctttgttttgggtggggaagttgatttagattttacagctaaagatcgaattgataagcactcggataattccactgatagatctgagttggtgaaatatgcagaagctttgaagagggctcgttatggaactcacaagtcacatcgaaggtcatcatcttatagttctttgtgagtaagaagtctccatatgtaaagatttttacacttgtttataattttgtatatataaaatggtcagattcattcaatgccatgtcccatttttctttcttttctttttgtaagaaacataggagaaagtttagagaacaagaaagcttgttcgtatagtgattattgtttgagttaatggtgctgtataattataggcactgacaacaaggttctcttataacttcttatactttgtagttatatataatctcattacaaaaaattgaacccttgataaactcaacattttataatcccgtatgaactttctagttcttaacttgaatatctgtgtaaacagtcttgtcttgctatcgtttattggaaacatcttttttttttggtggaagacatgcccagtttcaaaggctgcttggatattacatgtttatttttggtctcttttgtttttcaacatcaattcttttttgttaatttgattgtttggaaaaaggatccagattccagagtaaaaatctttttataaaacaagaagattttttttttaaagaaataaataaaatagacatgaactcatgaagttggatacaatcgacaagttgcatggtctccagtacattatttatacctattaaacatataataaattctttaacaaactctaaattaaattaatacatgtaaaataggtataaatgatgtgtctcgaaacaattagaggagactgggaggacacaccaatttaaagacaataaatttttttcgttatttatggaattatttttgctacttgtgtattttgaccaacatttcaaactaattttataagcatcattattcaaaagataatgaaatcacgtgatattattttttttttttaaataaaattattttatcatctattaattttttgagaggatgtatataattataaaatttaattaaaattagtatgtggtagttgtccatattagagtaatttttgtggaaaacaatactaaatcttacgtagttaaaagaaaaataaaaaaaaaaaaattttttaagatgatttgtgtaatttggtaggagatgctcttgggtgtcaataaaacgacatagcgtttggttatatgagaattgagaatctaccaggacaatgggcctgtggctatccaatgcaattaaagcccaaccaacaaacagttaactttcccgctctttattttttttttatttctcaggcaaagtaccgaatctagacgccgacgttaaaaacccagatttaatttgtcgttatatatacccttcgcctacctctcatagagggaaaaaatta

SEQ ID NO: 104734 - DNA, 4875 bp, Cannabis sativa
actggcaatgatgtatagtgcttttatagcaacactgaagcataatctgaatcatctgagtgctttcattttcatataacaatagtaaaatcattcccttctctattcttttttctttctttctttctttctttctttctttcttaaactaatttacattaattatgagaattacaacaaagttaaatacaagcctagtattgggaactctatccttcggatagcaatataatgaaattttggcaaccaggaggagaactcaagagcagcccaaagaataaagcgctataggaaagagaagaaaaaggaaaacaaggatttgattaaaggaaaaaaaaatcgtaaaatcaccttgtcatctctgttgatgatccaatattggatccaattctttttgtacacctcctaaatctcttggaccgccaaacttctcagcttccctggcaatctgaacgtcacaaggacagtagtactggtaaagaaattttacgacaaaccgaggaagaagagcgactacaacaatcgcaagcaaacacaaccaaaacaatccggtccttgcaacgtgaaagatcgccctgccaaataaaattggagttgcaccattaatttatagaaacaagaattatacatgctccttttaagtatcaatataagaagaactaatattactgataataagcacaatttaaaaacatatgtgcatatagcattaactgccaatatgaaatgagaacgacttgtcagattgagtcacagaaatctattagcaaaccagataaacagcactcacttatttgattaataacatagaaggaagaaaaagtaagaaaaacttttaacaacttgcggtgattaatattaaaatgctggaattcttgacaattttgagacgcttgaatcactattctttgctgacactacaattcagcttgaacttgcacaattatcaagatatagcatactctctcacgcgcatatgattaacatgaagtttaccatttgattagccaaaaaattgagggggagcaatatgctacactatgagacaattctttgatcaaaaagaaagaatgaaggagaaaatacaaaggcttgaacaattgttttcatttttcaataaaaaaaaaaaatggtccttctgagtaaaccaactctttgctaagaccaacaatttagcacaaactgtattaataacaatttatcatctgactgaggtaagatattgaatttgattgaggtaagatattgcagaggagaagaaatgaaatggtataatttcattgttcctcaggttaactacaacaagttcagataagagacatggattatatcatgcagaaagaaaaatgtgatattttatactattagatgaaggacataccagtaaccaactaatgaaggaaaagcatcgatgacagtaacacatatccaggaggcaacaatagatccccaaatggctgcatgagtaatccaagtccaccgaataacatccatggccaagtgtaaattaaccaaaattaccacagcaattgtccagagatctcctatactggatgcatctagggtgctttcccagtatgcaagaagaggtataaagaaggctactaaactttgccacaatgtgtccatcattgttaaccaaaacaattttgaattgtagcattcttttctgtgaccagctccatagagctgaggatactttagaagtgtttttctgcttaggtccttgtcaagaattccaacaacaatagttggtagtgaagtatagagtacagaatacaatacgctgctccactcagtaattgcagtcgtcaaagtgaaagatgtaaaaagtacatacctacatcaaattcatcatgcatacaataataagaacactcttctaattactagaatgcaactcatgtaaaacaataccaggcgagttaattaaaatgagctcatccacaaaaggaattataccaaccaatttatattattaaatacagtgctacgttattttataacataaacaataaggcagtactcaccaaaataaaacaaaaacaaacaccgcattcctgtaaaaattgtataaaattgcgtatcccattctttggtaattccaatgtccatgaaccaataaaaggggaaccaagaacctgaattgccccattgcaaaatctgatgccatcacagcttgccgaccctcttggccactgatgccaactccaacatcagccatttggatcattgacacatcattagcacctgttaataaatcagaaatttccaaaaattttaaatttcaataagagaataggccaatacatgcttctaatattttggaagcataacatattcattcattacattacagtacagatattaccatctccaattgccagtgtcatgtccgcagtcctactctttacaagatcaacaattccagctttttgcagtggagctactcggcaacatagcaccactgaacatttactcgccaaccaaaagagctgaaattatcaaataaaaaaaaatgtaagattggagtttaaggcggaatccaaaacttactaaaaacctaggcctataagaaattacctgttcttcaagatcactgtcaagaatataacaaaggctggttccatcaacaatcaaggccgctgaagttaaagcatttcccgaaattccttctgtggcttcttgtaaacgcgttctacaagattcccaggagttacaattaataacatgttgggtcatcatgggagtcaggagctttgaagagtatccaatcgatatggcagtttcttgcttgtcacctgtcaaaacccacactttaatcccagctgttctcagagactctatagcttcaggcaccccgctttgcagtttatcttcaattccagaggcacccaatatgcagagattggtttctatgttgccagcaaccttgcgtagcgcagcagcccgaccgctcaaagctgtgcttgctgcctcaaatgaagagtgccactcctcaaattctaaaggagacagttcacgcattccaacaacaagtgttcttaaacccactgaagagtaagcaaggagatgagcttctgtaatatgcattaagtttgtgttgaccgattcatcaattacacttagcattgttgtatcagcaccttttacaaaaacttttacagttttatctgggcacccgagtattactgacattctcttacgatcactatcaaactcatgtaaacccaaaacattgaacctgcactgcccatgatcaagaagatcattaaaaagaagtaacaacatctgtatatttggaaataaaggttcaaaattctcataagtaacagtagaagaaaaaataaaaagaatcatcacaagaatcccttagtgtaaatttttgtcaggaattatgcaaaacaactgagataggataggaaaaatgtgacaagatcactcacgttcattacaattgaattctgactcctatctccaaaaataattcttagaatattgcttcataataagaccaagaacttattcctaaaatattatttcttataaaagcaagattgtattatatgatatcattgtattcttacaatctcaatgccatgcagataccacttagtgcttgaataagttaccttatcttacaaaaaatagacaagccaaattttatagtggtgacataagaaagattagtacagtacaaagtaaaatgaccaggtacaattttgataaaaatttataagcatctagaattgagaataaccacaataaacagcattttggattacctttgcctttgtccttggatgtcaataactatatggcctgaagttctttcaacaagcataaaaccataggttgcagcagcataaaccaacgcttgttcatcaggagactctccttggtaatctatcaacttaactctaggatcaggtgtatctgtaacaagaggaacaattgcgttgcaagctgccaatgcaagaaaaaaatcgtggacttgttttccattgtttgtattccttccgctctttagtagttgaagaagctctgggtcaacattcaccttcatctttggcctcaaaatactcccatcaactgatacaagacattaaggaggaaaaaaaatgacaacaagtaaagatgattacaaatagttttataaaatagatgagtgacaatgataaattaatgacaacatgaaaaacattatcatcactataagctttaacggaaagaattttcaaaagcacaaaatgttttaccttgcactgagtaaccctgctccctttctgaaacaacttttccaccactgtaatctacccccccaatgctagcacatttaaactccattttgttctctgtaagggtacccgttttatctgaaaacacatacttaatttgccctaaatcttcatttatgttcaaagctctacactgaaatcttgaatttgaggcctcatcatacagctgtgtatccccaatcataaaataagcctgtccaacccgaacaagttccatggaaatgtacagagaaatggggatcataatctggaagacaataacagacatgaggaaagtgaaaattatctccaaaccccatccatagtagttatagtctctcactttccccatcacttttcccaatgaaaaatctttttttctgtaaaacggtaagtagttcaatacatccttctcacgcttcaaccaaacagcagcacaaacagagacaactgtacacaaagcaataagaactaaagaaagaatgatgatctcaaagttcatacggctctcaagcctgctcctcttgcatgaagctccagagctattaagcatagcttttgtctctcgaccagcatacactgcaaccccaatggccca

SEQ ID NO: 104735 - DNA, 734 bp, Cannabis sativa
  modified_base (662)..(662): a, c, t, g, unknown or other
ttgggatcccaacttctgtaacttttagattgtaaagtttaaattattacaagttttattttcatttcgtttatgattaaagtttaaattccgagctaattttattaggaatcccgcttaggggattagggtttcttaagtatcttaggtagcgtgcttaattatttaggacgttacaataatttattttatacattgtttataatatcacatattcattaaaaaatactaaacaaataattttacaagctaaattaaaatttaaaaataaacatactaaattttgtgttaaaaaataaatgtttattatccgtttcaatatgaattattataatattataattataaaatatgaaataaaaattatatataataatatgtatataaccttcataataattttattattataattatggtaagtacatttatatttaaattatttaccatatatattatcaaaaaaatggaaaaaaaaaagtttctaattgtatagaaaattgtatgagaaaatagtaataagtttttttgcacatattttgtaattaattaaaataatgtatacatttatgtaaaattcccttaattatatttttattggattttttctgtgcagaatttgcaacactcggttgttttgtgtatttattttcatgatgttntgttctattttattacttagaaatgttattattttaattatttaaaatttttagttgtattacacttgtaac

SEQ ID NO: 104736 - DNA, 1073 bp, Cannabis sativa
taagtttcaaattgtctcataaatttataacatacttatagtaataaatcacacaaaacatagcattttatttaattactaataaattttgtttgaattatttttttattcctactaattaaatacaaaagaaactaaaaagaaaataaattatatcttttattatgattattttttttttcgtgagaaaatataacccacataataaaatgataatcttatttatatagcattttagaaaattggaataattaaaaaattataagaaagtaagagagagatataatttcatttagtaaagaaaaaaaagacaaaaacaaacttgtcttaaaaaaaaaatagagaaaaagacaaaagataataaataaaaaactcattgttaaaaaaataagagagtttaaaaaaacaacactaagaatagcatcagcccaatgacccttttctttaattttcagcccagtaagaatagcatcagcccaataagttaaactctaaactaaacctaatatataaaggaaagaaacctacggctattgtcaaaagaatattcaaattctttcaaaatcattttctctcttcagcacaaaaaagcagtaaaaataaattctaggagttaaagtttctaatatttctttctctacttcttcttttcactcttacggcagagctatattgttgtaatgggttcttatactatgttttctcttataaatttcttctaaaaacagtaaggaaatattagggttttctaagtttttttcttatttcttttttgtacacacctatgggttagggttcttaatttttctcttctcacttctacccgaaaacaataatccagaaaactttcacaaacttcgccctaatctccacacaccaaatctgaaaatcacaacaacaccaaacacaaacaaatacaaatataaaccatatagggattaggatgagaaatacaaataggtaaagatggagacacacatatataaaatgaaattaatgtcaatctctttctttcaataatacctgtacagatcgtgagaactttgaagattttagcagattataaagcttca

SEQ ID NO: 104737 - DNA, 527 bp, Cannabis sativa
  modified_base (151)..(152): a, c, t, g, unknown or other
gtccaggttcgtatccggatccctatctaggtccaaatctgtgtttgggatcgggtccaagatttaggttcaggaccgcgtctcaatttttgtctaggtacacgaccatgtccaggttcgagttccagtctcagtttgggtctgaggctanntctgtgttcgattctaggtctgggtccgagtcttggtcacggtcctaatcttgttctagggtcctggttgggtgattcttattcaagttccaattttggctcccaggtcttagtctgggttcgggtttggttcttcgtctaggttctggtcctagtctgagtccaagatctagacatcgactactggtctgttccaggccccgttagccgaatcccgagtaaagatctggatcactttcacgagtctctgttctattccggttcaggtcccaggtccaatttcagagtttgggttcgggagctagactagggtgcagttctcggtcccgaccctggttctgtgtccttagtctggttccatgtttgggtctgagt

SEQ ID NO: 104738 - DNA, 840 bp, Cannabis sativa
gattcccaaaaaatccatttttttgatttgtgttatatttagagccttagttcattatttccttgataattaggatattgtcatgctagttatcgatagaaaaacttatagttctgagtttaggtccccagtttgggttttagcgtgttatttacctatttgcgtaaatgtgacataggacatacattaaaaggctgattttttgtttaggtcggccatcacacttgaatttagaaatgaggtaagactagcataaaatgtattttatatgaatgtgtgtatgtgtgatatatgcatgctatttgtgattcgtgtactaccaacactagtacggtagcagtactgagtgtgttagtacagtgtacgatgtttaaagagtacagtatggtattaccaacactagtacggataagtaccgagtgtatgtggtataacacttaggggtactcgatgggggaaaccttaccaacactcgtacagtagcggtacgtagtgcaagtggtacagtggtcgtaccttagtaaggaacgttcttacttatctgataagccttgtggatatatgtatgggcgcctagattcaagttggtattatattgtatgttatgtgttttttttactgagtctgttgactcacaaatattatattctatgtgtaggtaaaggtaaggggaaagctgaacaggagtgagttccgagctcggatggtgattgtacatgtcaagacagcacgacctagagtgtttggtttcgagacgacttggcctgcattttttagtcactgtgcgataagttcgtaaaagtattttgataagattgtaaaagtttaaacacgagatcc

SEQ ID NO: 104739 - DNA, 518 bp, Cannabis sativa
atagaaccggttctataacataatcaataaaaataagtaacatgcaataattcaaatcggttataattaataatagaactggttctataacataactaaactgctttttagaatagagaattgaatgaggaagtctatatgtctcaacctaaaggctacaaagagaatggaaaagaaaatttggtttgcaaattgaaatgatccgtttatggtctcaaacaacatctcaccagtggtacttgaagtttgataaggctgtgacactgttaggtttcatcgagaacaagtttgactagtgtatttatatgaagatcagtgggagtcttcatattgttctttatgtggacgacattttacttatcagaaatgatttgtcattactaaatgagactaaaaattttatggctacaatttttgacatgaaggatcttggagaggcatcttttgttttggagaatgagattcatcgtgataagaatcaaaaaatttcttgacttatctcaagaaagcttacatta

SEQ ID NO: 104740 - DNA, 970 bp, Cannabis sativa
ttttaaataaaatatataaattaaatgacatggactaatcaaagaatgacacgtggacactaacctggcacataacggtcaggtacgtacggaagttccacaataatgacggaagatatttttacagccaaaaatacgacttaaatatttatctgctactcggcataaaacttaggtattgatgccgcaaattactcttaaaatattattttgtgagttgtttaaattattgcgattaatcttatctatgtgaatttttttttttttatctatgcaataagttatttgcggccgaaagggttactagtagttcggttacgtacttagtacaataattgaatgctcaagctaagaagtttaatgaaatttctacaataaatttattgttgtgttttctgagcggtaaagtaaactgaatatagttgttcttataataagattaactatgatgttgtaatttttttatctgactttattttaattttaattttttgttaaaagatataagaattacatatggctaattaattagtttacacttttttttttattctaatcttaattgtattttcaaccaaggagatgtctcaattaggttgcagattactattaataaaattagacaatttccttaaaaaaaaaaaagatagttcatattttaaatttatataatttactattttatttataattcttattattgttaaataaataagttctttatgaagattccacaagtccaccgtagatgagggatatgaagagataaggtgggaagaaggattaaaatggctaatgggaatatgaggatgacgatggaaataagtccttgctcgttcctccatttccattcttaatcattacacttcttaaccgtaatacctattaatgcgaattaaaaaaaattaataaggtaataatctaataacctttttatcgtaagtttctaaaaattattttttttaaaaaa

SEQ ID NO: 104741 - DNA, 535 bp, Cannabis sativa
cgagttaggcgccactccaactcttacacacttcttaccacaatccttaattattcacataaataatttctatccacataattaattagtacttacaatatataatcatgcttttatttatcatcattattttttagacgctcatatattgcatattattgaaagaaataaatatttaatcacatatgcagataaatatttactatcaacacttactacaccaagagtcgagcttgtctttgacgataattgtacatgttcatccggtcttcaggaaatttaaaaaccttagcactctgataccaaattgtaacatgctactcaatggaatgccacatatcatgattacaataaattaatcccgttaattggggtcaataagccaaataatttaaaattaataattaaacgcttaatttaaattaataacgtgcaatagtacatatttcaaaccaaagtatttgagttacatatctaggatcctgttaaatttattttcaaaaaaaatactacaagtcatttcatacaggctcac

SEQ ID NO: 104742 - DNA, 577 bp, Cannabis sativa
caccaaaaatatgaacataaaaaataatctaatcttatcaataaaagcagaaaccttgggttacttgcctgttaaagaagtattgtaaacatgagaacttctgggcagtcgaaccaaagcagagtgactcgtactgctggaggaacattctggaagttcgaaatatcattctcaaaggatcgttaactatagctgcggatggtaagacgacagatgcatggagacaacagtggatcccttggttggagtatgatgagtttcgagatttaatggatcaattgaggagtcaaaggtacactttcaaaactctagccgatctttccaatgataactcttggaatgaagagataattgttcagatttttggggaaactatgggaaagagaatattggaaattcctagattacaatcttcacaccaggaccagctcgtttggaaggaaaacgttaacggagccttctcagtcaagagtgcttatggagtagatcaaggatatcggtggaacccaaagagagacttgtggaaaatgatttggaaaagtgagattcacccaagactctcggtatccctgtggcg

SEQ ID NO: 104743 - DNA, 656 bp, Cannabis sativa
  modified_base (41)..(56): a, c, t, g, unknown or other
aaaataattttatatttttatagaatttttaattatttttnnnnnnnnnnnnnnnnaaatataaataagtttgatttttcttcaaattatttattagattgtgaataattttagtttcattttgtaaggtgcgtgtttataaataaaataaaatttaaaaatatttttttaataataatttaggtttattttaagtaaacttaatattttttaaataatttaaaatttttatcagtttttcaattgttataatttttttttaaaattaatttttttaataaaagagggtaaaattttgcattggtcaaagttcaaggggtaaaatactaacttttaatggcaaaagaaacagaatctaacaaaaagagcataattatgcaactgttatattttaagaagaattttaacaagctgcatattttaagggacaaaatcaagtaatatcgaaaatttaaaaggtaaaaatactattttttttttgtttgtgttttaggtgtataaacaacttttttagctaagaataagatatttaggagtgagctactttatacacaacttactttaaaatttatagttgaccccttcattttaatttcttctttttggcacccctaaagttcaattctaactccatttttaaagatattattcatatt

SEQ ID NO: 104744 - DNA, 683 bp, Cannabis sativa
gaccccctatctccctatcttttccttttaattgctgagggtctttctgcagcaatttgattacaagaagctcaggctcagttttctggcattaagatttacaggggtgccttgcccttgtctcatctcttgtttgctgatgatagcatggtcttctctcctgtccattctcaagccagtgcttccctaaatgttattcttgatctctgcaataaagctacaggccaattggtgaatagagataaatcttccatccttttctccccgaatacctctgctgaggcccagtttcgttttcgtcaagctcttcaccttgtgggggagggattcattagtaagtaccttggtgctccccattgtattggcagggtctccaattccatgttccattatctgcttcaaaaagtctcatccaaacttaactgctggaacgaaaaatttttctctagggctggtaaggaaactcttattaaagcggtggtccaagctattccctcttttgcaatgtcctgtttcaaagtccccaaatcgatttgtcacaaaattcaaagcttgattgctaaattttggtggggatcgcaaggcactaacaaagttcactggaaaaactgggattctatttctgtttcaaaattttttgggggcctgggattccgtattctttcttctcataaccaagctct

SEQ ID NO: 104745 - DNA, 1867 bp, Cannabis sativa
cgagatcgatagaaagaacacacagtccatacattttatcaattcttatctctcatttgtcaattcatacattaatttgtcattttgataaaattataagggggtgtactaatagtaatgtatccctatttatttcggtatcacaaataatttttcagtctaatttatttgtgaagaaattagaagatttatatttttttttatatgtattgtcctcttttatttttattttcttttttaaagtctattattcttacatattttcttaaatattgtactaattttgcctctgtcacttcaatatatattctctatgtgactcattatgtcaaggtattttgagtacattacataccaaaaaaaattataagtaaatttagttaattgattaataaaagaagtattttttaacttacctctccttttttcatagtcttaggtaggcctggccatttttcaagttaattaagagtcttgagttaaaaaatttaattaggcttttttatttttatatgaaactttttatgtttttttatgtatataatattttgggaatataattggattttttaattcttaataaaatattaatattaaatgtagtattttaagagcagcttcaacacgcgttgttatgcgttggagttggagaggttctgatgagcacctcttgttgctacacagcaacaactagctataatttcgatttttgtttatattttattttctaaaaagaaagtaaaaattaaaattgaaaacaataagggtatgaatttaaaataatgttatattaaataatattgtgttaggtatggtggcaacttttaaagttttagtgtattggagtattattttttttagaagagattgaaattatgtggattagagatgctttaaaaaataaattacatatattgtttttagaaaataattatgatttttactaaataataataaaaatataaaatatgatattttaaaaagtaaatttgagacatttttattaaagaagtatttaagtttaggcagagggctttgagcatggacttcagctgttccacccttaaaccggcaatgattattaattcgtatttcgtattataattttgaataataatcctatacaaataaatattatactataaatattgtaaattaattgttatacaattaccagtttaccaagggattgacttgacccaagaccaatttaattaattattttgataaaacttcaataatatgcaacgtacgtacgaaatttcaaaaaagtaaagtctcttaaatatatatatttttgataataataactttgtttaatttgtttttttttgttacatatatgttatctcatatgtactacgtaagagtgtactgtcataatgcatgactaataaaaagtatattaatttcactttatttaatcacaaaagtggttttcactttaaatttaggcttaattaaataatagtccaattacttaatatttctttgtgaattattacaaaatttaattaatattaaataaattagaaaggtatatgtacattattttttttttataaatttattaataaaataaaactggtgaaataaataatttggtaaagaatatttttaatcaatcatttggtaaagaataatttggtaaataatttggtgaaatgcataatattatttataaactctcgccagtttaattttaactgatgattatttagaacaatattagctatatataatttaacttaatttatcattatattatctatttcatcatgttttgtaggtgtcgaatttatgagcaaacaataataatttatagtgcctataaatatactagcaaaaactacgtgcgaggcacgta

SEQ ID NO: 104746 - DNA, 608 bp, Cannabis sativa
gtaaaatatttccaacataaataacatgtagctaaacatgtaatcacacaagcatgtcattatactaatcttacctcgtttctgaattcaagcgtgccagccaacctgagtggaacagctgctcgactaattacaagcccctatagcacattattcgtaacactggtgagtgacacactcaatcacttttcggggacttaaacttgagactaaaagtttttcctttcgataaacaacatggaaataccctaaataatcaaggaatcaaccaaccaaatctctaaaactaacacgaaaaatttgggaaaagagtttctgatgtggttaatcggttttatatggcctgtaaaaccggttaaccagtttacaccaggtaaccaaaaaattttgaaaccttgtccaattcgtatccaaaccataccaaaccttccaggcctgtttaatataccccaaataacatatttcaagcaacaaaataacccaaaatgctcacaatcaaaaattggcattaaagacaaaagtttgagttttaaaactcaaactttgtctaacaaccaaaacaagctaccaactagcttcaaatcagcacaataaacataattctaacc

SEQ ID NO: 104747 - DNA, 1891 bp, Cannabis sativa
atttttgatttttacgtgattatttattgttctttattcaaataatctcacctaataactaataatgttttttctttaattttttattgtatcactttcaaatgatatgaaaaaaaactagcataaaatttaatatacgtgcctcgcacgtaatttttgctagtatatatatatatagctattattaaaacaaaagttatataattcaatcgtgttttatcttgtactcaagtttctaacaccctttaaataaaatagtaaaaactcataaaagtcccaaacattagatatctaaagacaaaataacaatgaacaaacaaaaaataaaaagaaaacctaacacaaaaagacaaaaagaaaatatgacataggatatatagtgcaacgtggagtgcactcatttacaaccaaaatttaaaattatatggtgtttttacaccaactttttaaactttttactcttttttaatggtggttggaatttttatatcgtgtattgtgttaaatttttactgttgtttcacggttattttttaattatttcactgctgtattaattgttcaattttattattttatgattgttttaaaaactttaatattattgtaaaaaaaaaatgtgttgagtccataattaacacttccttattatttttttcaaattctatataaaaaccattacttgcttgaccaaattgcttaactttttcatattgctcttcatgctttaatttttgaccatatttgctctattgatcccatatgctttaccaataattttatgctcaataaaattgaaaacttttatctaaaatccaatatttttataaaaatctcatttataatttagtattagatcctgtctaactgccatgataacaaaacgtgataataattatctaaaaattgcttttattacgaatttataatctcacaaggagacaaaataaaaatatttcctttttatagtggttgaaaagaagattggccttagaattagtgatcaaattaaggcaaatggcaataattgaagcttcatcagctttactggtttcagttcttctcctcattccattgcttattacgctaatacagaaatgtgtccaaaaacaaaacaagaaccttcctccaagccctctaaagctccctttcataggcaatttacaccagcttggttcattgcctcaccaatctttatgccaactctccaaaaaatatggctcagttatgcttcttcaccttggaaatgtgccaagtgttattatatcatctgctgaggctgcaaaacaagtcatgaagactcatgatctcagcagttgcagcagacctcaattgcatggtcctaagcaactgacatacaattttcaagacttggcattttcaccttatggaaaatattggagagagcttaggaagatttatgtgcttgaggtgttcagtgtgaaaagggtaaattcataccaatcagttagagaagaggaagttgctaagttggtcaactccatatctcatcattcctcatcttctcctggtgctgctgttgatcttactaagaagttgtatgctcttacagctagcataattttcaggactgcttttgggacaacatttaaagatagtaaattttctgaggagaaattgtataaaatacttgaagaagttgtaatcagtgtgggaagtttctgtgcagctgagtactttccatatgtgggatggatcgttgacaagctttcgggcttacagcgaagacgggacaggacttttcatgagatggatggtttcttccaaagggtgattgatgatcatctcagtccagggagagaaaaacaagagcatgaagacattgttgatgtgcttctcaaaatagtgaaagagcaaactggttttggag

SEQ ID NO: 104748 - DNA, 671 bp, Cannabis sativa
tggtggctgcctaggtgagtgacaaatggccatttaatttcagccaaggattaatgtagaaatccatttttcatttagagaaaattaaaggaaaataaggaaaaaaacagaccaaaatccaaagaacctctcttccccttctctctctctctttgaaccagctataaaccagggaattggtggctgatttctggtgttatcagcaaggaattcaagggggactgaagttaaggtaaccctagaaccgatggttgttgtattttgaagcttttacttggtttgagtttatggttttgaaaagtaggagctgttagggtttgattgttgtatgattcaaattctaagtttgatttgggttgattatagcttctagcagttggtttggttgtgttgtgatgaaactatggaagtttgaaccttgcaactcaagtttaggtctttaatggcatttcttaatttagtgtgtttttctgtgatttattggttggaatatattgtgtatatcccacaattacgtactctgtaaaaggtttgattgcatttggtagagttttgagcaaaatatgggatttttgggtgagcttgtataaaccggctaactggttttaccagtacctgtaaaaccggttagccagtttttgcagggttccctgtgttggaaattattttac

SEQ ID NO: 104749 - DNA, 555 bp, Cannabis sativa
ttgaactgaggaattacataagacccctcaaaaaaaatatactaggtcaactatgtattttttttttttttaaaaaaaaaggtcaatgatagaaaaataaaatattacggtagctcaattttttttaatttgctatactttttacagtagaatatatatatagataaatatttgaactattatttatcttatatatatacttatttttactatatatcaaattataataagaaaatataaatgttaggatgagtacactacatagtatgtgtctattctactagtatatatatgcaaattgtctatatgaaaaagaaattaaaaagatatatgtaaataccacaaaagaaataaatagaagtatttaattacatatataaatatattagattgtttattgctgtatttatattgataaataatataattataataattattaaaacattattactttttcagaaagaaaaaaagatttaaattgtattaattttattatgcataatttcttaaaaagaaaaaaatatatatattttatataaatattaattgtta

SEQ ID NO: 104750 - DNA, 1205 bp, Cannabis sativa
gggtactctgtgtgcaggtaaaggcaaaactaaacagtgaggatggcgagctcgaggcatggattacatgttaggggattgtcacgatgttttggtttatttcattaaagattatatgactcgaatatttttgtaaatgttaatgtttaaaaatttataagtgaatcaagtgtttttgttttaaaataatgagatctcatgttttagttattttcaataaattagtttattgtttttattataaatagttttaaacggactagctagtgtgacgtctcagaaattatggcgttacatattaggtcttatttatggggtatttctacgtatataaatggacgtactgcaatttcatagaaggctttcaaatattttgtagagatatttctgagaattaatgtcataatatataaagtactaattcatcttttattatttaattatgatttttatgtcttttattgacattattgattgttgatctcatatattgtctagatttattgaggatagttgccaatgatgattcatgacttatataatagtgattccaataactactttatcaaattataagaatatatattaatggaatatcataattaattactaaatttcataattaaactcgattggtaatcagatcgatttatgtcattctttgattctttgatagttttagtcaaatttttggatgattggtgaatgttaagggaattttattgtaacagttagtcggttaagttagtttactaactgtctgtcacttttcggttagtaggttagcttttcggttgtaactaattttgattagttgttttagctccactgtataaatatggtacttgtacaaactgttcagaatgattatataattcatctctttcactctatctttgtgtttctttctcttctctttcttctctctctctctgttttttcagtttcagtgttgttaagagtcaaaactcttactctgccaaggagagacattgttaagtttgtggtaataaatcctttgaggaagaaagagaatttaataaaaataaatccatatacgattaataaattcatatacataaaaaataaaattgttctttctcatggggaattaccctatatactttttttttaattttttttttcaaatttactgtttgggtttctaaagtaattgcagcgctagttgcaataggagtttatat

SEQ ID NO: 104751 - DNA, 1486 bp, Cannabis sativa
  modified_base (205)..(214): a, c, t, g, unknown or other
  modified_base (1459)..(1460): a, c, t, g, unknown or other
atcatcaattaaaattaataattatacgtgtataatcaataggttaaaaaaagagtattgacctatattatagatagatatatagatatataaattataggttaaaaaatattagttttacatgttttacttaaaaaaataaaataaatttaaaatacggtttgttagagagatatgtgactaatatgatttttttttttaattnnnnnnnnnnttgtttaatttttgggtttaattaaaaaaattgtttaatttttttggtttaattattgagtttatttgttaacgggagatcaaacctattaacatcgttaaatttaacagaatattattttattttgaaggtatattctgttaaaccaagaaataccgttagatagacacttttaatatataaagatataacaataatttggtaatgattttacaaattatatggccaaaaaatatttatatattaataaataaaaaaattgggaccatatattataaataaatatatattatatgttggccaccttagctttatgagctgttaaatgttacaaacaataacactattcatatatataccactacatatatatttgtatgtatgaatatgatctgtcgagaacatgcctctcttttgctttttaggccatgaaaatcttgctaggcatgcaagtgtacaacgtgccattttctctattacttagttttcgtatttattagattaatttttatatttaattatatatatttacataattattatgcactttggtgggggtgatagtgataatttttattcataataaaaataatgtataattaattcactttgaattgatattaattacgatcagtacatgatgtgtgtgtataccttaccaaattattaaataataataataataataataataattggttatatatattgaccctatggctatagaagcataaatgtcatttcttattaatttgtggtattaatagtaatagagactacacttttcaacacgagaattataacttgattaatcgaattaaattatatttggattaaaagcataaccctaattaagaatttttattttgttgaggcttgaaaaacataataactaatagtctaatatattatctattttaaataaaaaaaaattataattattttaaatatatatatataatgtttgagctaataaattattgtaaaggaaatatatattatatgaatttctttttgttcatatttgttaaatatacttaataaataaaaaaattataaaatacaaaattttaagtatttaattttcagtaggacttcatcactatattttccatatatgtgggtacaaaaatcataatttattatgattaaaattatagtagcaatttataattaaatattagactaattagcaatttttctcccgaactttgacatatatcaaatcatgcctcctgaactttnntggccgttaaaaattcctcctgaact

SEQ ID NO: 104752 - DNA, 549 bp, Cannabis sativa
  modified_base (294)..(299): a, c, t, g, unknown or other
taaccattaaataaataattgttattaatagaataagcccaattctaattgggcctaaaataaaattataaattaaataagcccaattctaatagggcctaaataaaattacctaagtgaaattttattttagcaacctagttcatttacttagtaaaacttaaataggcttcctatatgcatctaagcccaataagctaatacataggctcgcacaggtcaaatgatttggatgggccctatcttgttactaggtttacacagatgaaagaaatgtaaaatttacctgttacnnnnnntttataagatctattgacaattgaactatgattaaaatcagatcactggatctgtcaacaagttaatcatatcaatttagatcagataaataataggtttgtaaaaaaaacttttcaatatataataattaaataatacaaacaaacaagtaactgatctgaaattcctggaaagtaagctaaaatatctaaattttaaaattttttaaaaaattaaattttaaaataaatatcttaactagaatttaaa

SEQ ID NO: 104753 - DNA, 1124 bp, Cannabis sativa
  modified_base (1077)..(1089): a, c, t, g, unknown or other
taaaataaattccaacacttgccatatctctataatctgattcccaagttatagggatttccttgatgactcacgatgcaaaagctgaattcgctaagtgtttgccgttctgtgcgggtcactgactgcttcgtgtcaagcatgcatatgaggtatcttgttcggactgtatcttgcgagcagataaccagagtcgattccaagtgtcaccatcgtgtcacgtcagagtgccaaaattgggataataatttatattatttttatttaatgtacacacatttggagatcctttgggatatggtacaatgataatcagataataggaaacttttccatattatacttgttatccgcatttctggcaatggacaaatggagttaggtttgcatccaaggcccatcagtgggtccctcaacaaagataaagtgggccaagcccaattggataagtccttccagaaatgtatctcagcttcacaatcataaaaccttccgccttcggtgaatttttctcagaagcatgtcctgtaccatgagattgaagggacgagacaacatgtttctgaaagactcatctagtttcctttttactcatgcgtgtaaataaggaaactctagctgccacagattgcaacatagtatctgtttataagtagccgacgtgctcgacgtcttctggaacttgtcccgctttccaggttccttagcagagggagctgctcccgaaattcattacctcttacttctttttgggtccgagagtaatttcttttattctctctggtgccttatatagaaatcatgttcccactctgatcttgccacgtgtctgcttgaaggaaacttggataacatttacccctaagctttcaagattctttgagtcacgatagcttcctattgtcctgatagttgtttgcgtacatgtgctgcaatttgcagtcacaaacacctctcgaaatgagctttaactcgatggacacctatggctcttacttccctttgtgttgtaaccacgcaatgttgggttttaagccctaaataaaactcatttaaatataatcagatttacttatnnnnnnnnnnnnnaaataacatttaatgttgcatagatcggaagagcg

SEQ ID NO: 104754 - DNA, 621 bp, Cannabis sativa
tccaattggatatttaaaaatagcatccaacccgatccgatcacaattggatatccaatgtttggcggtcggttctcattggattggatcgatcatgcacatccctaattttagtatctgaaataattttttagtcaaattttttctcattgtcatgtaaattataattatttaagacatcttgcaaaattttaaaaaaattggaaagttttaacacgctgaaaactgcattcaaatagtgtattgcacgtatgactattttattttatacgtgtgtaaaatagattatttgaacattattttttttatattgtaaattatttcaaatttttcaaaattttgtaaaatatcttaaatatagttataacgtacttattcgaaataagtattgtattcgaaataagtattgtagaatctctctaatactttaatacgttatccctaatgaagtagttaagattaaaaagagcgtactgcccatgttcatgctctgtggcagtttttcagttattttcatggttaatgtgaatttccaactccccatgttcatctcgatcccccactacccttgaattcctgatctctactgtataattttgtgtctatttcttgtttatatct

SEQ ID NO: 104755 - DNA, 615 bp, Cannabis sativa
  modified_base (30)..(46): a, c, t, g, unknown or other
acatatttttgaaaaatattttcacttttnnnnnnnnnnnnnnnnnaaactgattaaaaaagtgttaacaaacgactatattgttttggtcctttgctatcttcctttttatattatgtattcttttaattatttttattatatataccgtatattatatgtatttattacttaattaatggtgaaaaattcttagacatttatatataccgtatattatatataggtaatagtagaagaaaaaaaaaatctctaaagaagaaatagtacaaaagaaaaaaaatatatatttttattttttttttgttattttaaattttatttatttacgtttgtcaattaaattgtgtcatgtgtacaccataaatacatgaacagtccatcatgacatctaacagcaaaaaatgaataaaaatatcaaaatgctaacagaacccgaattttgtcgccaaaaaataaattttgagagttaattactagcaaggtagaacttttaaaaatgaggtctctttcacctatttggttcttcttctcttccacattggctttgtctttcctccaagcttgttgcaaggtgacggaacacattgttataataaacccgatcactttgtg

SEQ ID NO: 104756 - DNA, 615 bp, Cannabis sativa
ttttttaaattttacccacaaaataattttattttaataactaaaaatctgatataatttttttttaaaaaaatgttaaatctcatatatataatattaaagatcctaaattaaagaccataaatgccataatttttaattaaagatcccaaattaagtctctaattacattttaattaaaaataattatccaataatattttagttctctttcacaataatattttttaaataactttcacaataaatttttaaatacaactaatttctaaaattatccttttattgaaaatatataaattctaaattttccaattttataaattctcaaattataaatttattaaaaaaatttcttttttattttttaaatttgaagttttttttttggtattttattttattaaatacaaattttttttaggaaaagaaaaaagtacaaatttctttatttttttttttaatttaaaacttttttaaagtattttcttttattaaatacaaatttttttattaagtaaaaaaacattcattttctttttaaatttgaaactttttttttttttttggtaaactaaaaagaatattttcctacagtttataactgttgggaat

SEQ ID NO: 104757 - DNA, 569 bp, Cannabis sativa
tggtaaaataattccaacagaataaagtgttcttcctcttaaaagctcttacaactgatatctgagtaactctctttgatcacgattttctctttagagtatatttctgcaacagttctctcgatccctttcatagtgaggctaagtcactatttatagggacttaatgcgttagagatggtttcccttttgcttacaatgcataaaataagaaagtacaatgattttataattacaagatatgaaataggaaactagaacatgttgccattttcctctgactcaatctcacgattatagggattgtcttcatgtctaacataacgagattattctgaagttgctatctcttgttagtcgctcgatacaacaggcttctacctggtgggtatcttctccacaactctgctcgggtaatcaacaattatagatgctgacgaattatgtgcatgctgctagggataccttcttttgcccaggtatcaaaattatgggacacgtgtcatctgatcctattgccacatcaaggtgcaaaaaactggataacatttgccctccaagtctgcatg

SEQ ID NO: 104758 - DNA, 578 bp, Cannabis sativa
attattttctaaaaaatttctaaaaaatatataaatatatatataatatatatataatatttaaattaagttatataatttttttagtatatcatatcattatattgtaataaaaataaataaatatattagattattaaatatatacaacagtatttgatatatcgtatcactaaaaattaatatatagtagtaataaaattatatactacaaaaaaattataacaatactaaattaatactcaaaaaatatatatcatgttaacaaaattatatatattactattaaaatatgtatacataccaaaaaaataatatataataaaatagaaactaaatatcatcttaaataaatagtatagtatagacaacaaaaatcatatagcatacaacaaaacatatatatacctacgataaaaaaataaaataaaataatataatatcattaaaaaaaattgtatacatcatattaacaaaattatatattacttttatatataataaaagaaaaactaaagatccatgatctaaaataaaatgatatactatacaataaaacttatataccatataacaaa

SEQ ID NO: 104759 - DNA, 1047 bp, Cannabis sativa
tgtatgtgggagtgagatcattgacataatatatttaaggattatacttaataaagaagtatcaacacaagcagttctctatgaagataacgcgaaatgcattgctcaactaaagatataatgaataaggtatttttaccaaattcttcttaactcatgatctttaaggaggatgactatattgatgttcaacaaattcaatcaaatatcaatattacaaacttattcacaaaatcattaccaacatcaatatttgagaagatagctcacaagattagaattcatcgattaaaagatcaccacaaatgcctaaatgagggggaattagtttacactacactccttttcttttgatcaagtttttcagcaaggtttttaatgagacaatttttacggacatttgagggggagtattataaaatattttttatggatgtttaactcaccatattaattatcaccattaatgcttgattgtattttcctttattacattaatttagttttttattcctttagtcaatacttttgtataaatagagatgaccccattgaaataaataactgagaaattttcatttaatttctctttctctcttcatcttcttcttcttttcttcttatatattttatattactttataacagttatttctttgttaataattataaaaagaaatagaaatattacttttattttgttcatctttttttatgccaaaaaaaatgttgactgaatttttagtcaaccgacacggagtcgtaataaatgagatttaaatcaaaatcgtaacaataaatgcaattaatgacgccagaatttgcaataaatgtaaggaaagacaccagaatttaaagaggttcagtcccagatattggtaatagcctactccccttgtgttttattgatcaaggttgtaaaagtcaagaacatgctcttgattgcaaagaatgaaaagtgtttgtttctttctaagtgctcatattttccatgcacatttcaaaatatggtgtaaagttgttaaagaaaaaaggtaacgtcaaggt

SEQ ID NO: 104760 - DNA, 567 bp, Cannabis sativa
gcactttggttttcggagatgacttcttttaggctgtccttcattcgattggcgagacactttgtaattattttatagctgacattgcaaagacttataggccgaaagtcagcaactttgtttgggcacttgacttttggaattaggcacagtaatgtcttgttgatgtatctacagtcggtgtgattgttgagtatattcagacaaagccgtgtaacgtccttccccacaacatcccaatggtgttcataaaagaggcttggcattccatccattccaggtgctttcattgcattgatttgggacaatgcattcagaatatccgcttccttaaactcggagagaaggaattcgttttgaatcctactcactttacagggaacaaatctttggagatgagccaccatatcaccctcataatctttggccgagaatatctcttgaaaatggtcacagatgttcttttcaatctcttcctttgagctgatccacttcaaattgttgtcaaataatccccgaattctattttttttccgtcttgaagaagctttttggtggaaatacttg

SEQ ID NO: 104761 - DNA, 599 bp, Cannabis sativa
agggataggtgacccgaagtggcccgctaaccaatataaagcagtagcatgacgaaacacttaaggcatacttaagtcattttagcacggctgctgctagtgttagaaagttggatgatagcatgcaacttacagcccttcaggtggggatctccactgatccattaaccgtcggggcgagttgtgggatgatttccaaggatgttcagtaagaaacatcattgagttcaacgagagggctcaggtgtttgtccaaaaggaagaagcccgaaaggaaatgaacttgatgaaatcaagcttgggaggtaaaaccagcaatgtttcaacagggactgcttccatgagaattgataactcgggggcgtctggtccgaaaagaaaggatggaattagggaaccatcgaatgataaaaagcaacaaatgaagcatgacaaatacgtgccaatgtatactattcatatcaagcttaatgaaactcaggaaaatatctacctcgcacaagagaaaaaggtagccttcggcgaactcgagcctatgaagaattcgaggagcaaaagagatcctaacaaatattgtaaatttcataaggatattgggc

SEQ ID NO: 104762 - DNA, 1179 bp, Cannabis sativa
tattattgcggattgaaagggaaagtattttattgatattgaatgaatgaatgaaatacaatgaataaaggccttataaaggctgctaaaaagggaaaactaatcccataaaatcagggatacaatcccatgaaaaccggactgtaacaactgtaacagagtgtgagtttataagcagtattcttgttaccccctcctcaagatggaccatagatatcatgaatggccatcttggacaagtgggaagtaaggatagtggaggggagtggtttggtaaaggcatcggcaagctgaaggttgctgctgacgggtataagccgaatgtttgaagctgcaatcttttcacgaacaaagtgacagtccaattcaatatgcttagtgcgttcgtggaaggttgggttattagcaatgtgaatggctgattgattatcgcagtaaatgaatgcaggaaccggttgatgaatgtggagatcttggagcaaatattgtatccatgtgatttcgcttgtggtggcagctaaggcgcgatattctgcttcagcagagcttttggagatggttggttgtttcttagtcttccaagagataaggcagtcaccaataaagatgcaaaatcccgtagtggagcgacgtgtcattggacaagtagcccaatcagagtcggagaagccgcgtaggtgaagagtggacgtggatgagtaaaggattccttggcccggtgagcctttgaggtagcgaagaagatgatgtaaagctgtcaaatgaggtgtacgtggtgaagacatgaactggctgagagtgttgacagcgaatgtgatgtcgggccgagataatgtgaaatatagaaggcgtccaatgacttgtctatagtgtgaagggttgtcaaggatgtcaccatcttgatcattgaggcgttggcgagggtccattggtgccttggctggtttactgtcggtataaccggtgtcatgaagtagttgaagtgtatacttgcgttgagagagaaagagatttgagttggctcttgcaatctcaaaaccgaggaaatacttgagggggccgagagttttgagcttgaaccttgcttgtaaggcatcttgtaagtggtgtagaagtggcaagttcggtccaacaagaataatatcgtcgacatatacaagtaacacaacaaaggtgttg

SEQ ID NO: 104763 - DNA, 564 bp, Cannabis sativa
  modified_base (358)..(369): a, c, t, g, unknown or other
cttcgggtcgcttatccctagcgacttggaattggttcttaaaatccctggacagctgctcccaggaaattattgaatgacgagtgaacttgttaaaccaactactcactgctccaacaagcgaggtggagaacaaaatacagcgtaaattgttcgtcatgttacttgctcgcattatcatgttaaagttattcaaatgcgataccagatttgtggtcccatcatagaacgagacatgcgggtttttaaataccgaaggaaaaggggtattcataatatctgggttatacagcttaagctcctcatcagagccgtatccagatgatttcctatttcccccacttgatatctcctgaannnnnnnnnnnnctcgtttatccgcaattgaattggatcctcttgctttggaccaagttgttggcaaagatcaggtttcttctaattcaagtgctctcgcagatctggttgggagtaattgctggcgaatctcattttactcattgattgcgtccgacttatagactttgtttttaagtggcttgcagatttacttgttcccatact

SEQ ID NO: 104764 - DNA, 714 bp, Cannabis sativa
ttttgtaaattaattgtaaaagaactttattagcagggaatccccatattacaatcgtatttataatgaaagtttttagtttaatttaaccaaaattttaaaatttaaccacacctttttcctaaactaatagcttagtgataataagtttgtaaaagcacacacctggcgttcctgagagtcagggtgttacaggtgcaatcgttacacctatattttgagtagcaatatggcgctgacacgtgtaataaagatgaaatatgaacaaacctgaattatacaataataaatacgttcagaaaacttgtcttggaaaatactgtttgtagaaatattcaaactcaccctcttaaagataacatcgagccatgaataataactactgactgatgagaccagggagatgaacaaaaaacaaagaaggtccatctcattatacatagaatacacaacagaatgactatttggaaagggtatataatgaattattcaaagagctaacaactcattgacccacatactcgtgaatatgttaaaagactaaagacaacattccaagcatggttcacctcacagttgtcatattgtgataagcatctcacgtatgcctcactcatcattagtagaagaacgcaagaagtaatacttgaagtatacttaagcgctatttttatgataaagcgtcttaaggagattgattgcattacaagaaga

SEQ ID NO: 104765 - DNA, 642 bp, Cannabis sativa
tggacgaaatcttggccactcttggtggagcccacagtcctgatgtttcccctcctcctacttcttcccagttggtcactcccgggaaggcttcttctagcgctccttcgggccctattgtcttagtggacgaggaggaggcacttcttgagcaagctgaagaaggtgaagaagagcaagatgttgctcttgtgcgcaagcgcaagggcaagatggtagaagaggagccttctaaatgcccccggagggtggacactccggccccgagtcatgactctgggatcccctccgaggtggaggaatacgcagtgcctctcggcattgtgttgacttcgattcctggagatgaggagaggcagaatcttcggatagccaagcacaactatgcccttgatgaatacacccaggggcatgccgaagtggaggccttaaagagggtcctacgggaggagcagcaaaacgtcctcaatgcggaggacttccggaattcgtgggacttgaatatggatccgctgacggactggtttaatcgctttctggggcgcaccttggctccttttgccgcagagatgaccagcgagtatgtctcccacatgactcaattcccgcccaaacggtacgctgcttgtgcatccttgaact

SEQ ID NO: 104766 - DNA, 654 bp, Cannabis sativa
  modified_base (119)..(127): a, c, t, g, unknown or other
  modified_base (242)..(249): a, c, t, g, unknown or other
  modified_base (302)..(308): a, c, t, g, unknown or other
  modified_base (604)..(607): a, c, t, g, unknown or other
gatttcaaatgagtgccagcaattcatcaattcgatagggaagtcagttcggacagctttcaaacatcctcaataaactaacgtaaccacccagttgatggttgtgacgccacatgatnnnnnnnnngtgtcccctatccttctgacaatgaagtctgtcaagatagctttcaaacatccccaatcacccaacgtaaatgcccaacgaaatcccatcggagggtggtgacaccggatgattnnnnnnnngtgtcaacaatacatcacttcgacagtgaagtcggttcggacaactttcaaannnnnnnaatcaaccaacgtaaccacccagtggatggttgtgacgctgcttgattgtgaggtggaaaagagagagaggtagggtcggctatagagagaagtggaaggctcagtttttcttaaaaaggcaattttctgacagaaggcttgaaaaaaaagttatttgactgagccataactttttatttataggcaacttctaggattaggttagtaattatttggcattaaaataatgaaatattaatttttaaaagctcaccaagtggccggccacaagtgttattgggcctcacttggattnnnnagttttcacaatttttatttcttttttctcagaaatgccaattttct

SEQ ID NO: 104767 - DNA, 1392 bp, Cannabis sativa
ctcatcatatatagtattttcaaaatttttttccatgatcactcctaatccgaacaattttaccaatgttacaatctttttcaactcttattttcacacaaggatttaaaagcttcaaaagtattagatttttctctcaaaaaatccacccatgaaaatcgagaaaaatcatcaacacacacaaaaatatacctcttaccattcaagctttcaacctggattggacccattaagtccgtgtggaggagttcgagaactctggaagtattcacatcaggaacactcttgtgagaaattttcagttgcttaccaagctgacatggtccacatttttccaaagattcctaccttctaagatttataaaatgaatatgaccaagtttttcatgccataaattagttgtattatcaatgacagaatgacaagtagcatacgtagtgagagtataacaattgtcactagatctgagcccttgcaagacaatttcatcaagaatattacacacataacaatgattactatcgaagctcatagtataaccctaatcacaaatttgactaatgctaagaagattagcttttaattcatccaccaacatgacaatcttcagtttaggaagcccttcaaaattaagagttcttatccctatgacttttcaaacaagaccgttgccaaaagtaacttctccacactacattggtctaatgttctcaagatattctttttcacctgtcatgtgtctagaacaaccactgtcaaagtactacatgttagtagcaatagttttaaaacaagaagaacctaccaagcatttatttttgacaacctatttttgtttttgtaaaacatgtttatttccaagataattagatttaaacatgttttggatagtaacacatttaggtcgaatgttaccttttatcccacaaaaatgacaaataggaatgtatcgtcttctattccctttagaattgtaaaacttaccatgctgcttcttttctataatagcagagcgttttgttgaagtgacaaaaccctgcgaggtagaaacagttcttccagaagcaaaaatattatatttaacaaatttggtattggaatcagattgagtagaaacataacctagactagcatgattagtttggccagacttttgaatcttttcaaaaatgttggaacctggatttaacattttgacattctttttaatgttttcaagttccttagtcaaagaaataatttcactcttttaagatcaattcagattcacaacattaaattttttcttcaagctcattgatgttgttacacaagtctttattatctttaaccagggaacgattttcaacacaaatttccaaccacttaccaaacattaccttgtaagattc

SEQ ID NO: 104768 - DNA, 591 bp, Cannabis sativa
gatatatgtgagtaatagtaaccgggaatagggttattaccctaacatgagcagtttaatagcctagggttattaccctagtgatatatgttatgtatatactatgccatgtcggagatacgtgtatattgagattatgaattatgcgcttaaggcataattaaactagactcggtaagctagtaccttgagtttaattttaatgcagactagggttattaccctagattattatgaatccagtgaaagcatgagttaggttaacactcttagtaaatgttatctgagtatatagaaatgtattatatgagtgattacatagtatgcaagttagggttattaccctaagattttatatgttatagtaaatgttgaattcacgcatgtatgttaagagttatgagtataagacatcactgggttagacctggtatatatctccaggataaaccaccgaaagaacgtaatacatggattacgtatatacatgaagaggatcatgcgagcaaggcataaccaggttaggctcgataactagaaccgaggtaaaccctactaaggtgttattgtaattagacatgtgagagcaac

SEQ ID NO: 104769 - DNA, 1489 bp, Cannabis sativa
aaaaacctagtgttatttctgtttctattattcttacttagatctctgataatttctgtaccgaatctattacgaaaataggctcataatcgtttatctgcgttaacactttgacatgtaacaaatcatgtcccctgaattttttgaccgttaaaaattttcccttaattattgagattatcgaatttcaggacttttgtcaaatttcattcaattttactaattcaatgattgtttatgtactaaattatgctctctagactttaatatctaccaaatcatgcccctcaaactttgacatgtgccaaatcatgccccctaaatatccatccatattagaattttcttactaaaattagataaaagcccttaaatctaacaatctcaatagttcagggagatttttaacgactagaaaagttcagggagcatgatttggtgcgcatgtcaaagttcgaggggcaaaaatcttaattagtcataaataaaaatgatatataaaaaataaacaatttacagcgtaaatacttaagtaattcttgattgtagataaataccgaagtttaattttttacagtagtaatacttaagttatatttattaaactttcataaaaatctaactgttaagtgtgaagtcattattcacgtgtcatttttatattgatatattcaagttaatttttaaataaaaaaaattaatgacctgaaccaatcgaggttttccacgtggctatcaacatgacattatttggagctacttacggaaattgatttataaaatataacttgttattaccgtcaaaataaaacttaagtacttatttataattaaaaattaaacttaaatatttataccctaaattaatttcaataaaaatatataataaacaaagaaacacaatacagttacaattacaaagttacaaagaagggtggaaaactatatacatataataaacaaactcttatgaagctgaaacctgtgtgatacaacaccaaattgaggaagatgaccgttattaattataaactacgggaatcacgatatatatgaatatgaagatattagatatgtatgggtggtccgttcatttatatatataatattctatgaaatatgacaccttccaaatattccatattggaaccactgaattactaacacataaatagctttgagtcccatcaaatacgaactagattcctattcattttggtacaaacacaactcatcaaccatttttcaagttaaaatattttcattgaatggacatggaatataagtaatgccatataaatctgtgtcgtactttatcagcttagtctaatctgaactcattatcagttagaaagaaaataaaaacaaatgttttgggggtgttaatatggtaattaagtgttagagatattattacaatggaagaaaatcaaaatattacaactctattgtaatacaatacaaggaccaacaaagagattaaataaat

SEQ ID NO: 104770 - DNA, 1058 bp, Cannabis sativa
gaatgcatttcaaaggaatattttcttgtttaattggatgagatttttcttttgatgagtgtcaagtttagtataatttataaaattcggaaattcaattaaaaaaaaaagagagagagagagaggttggggtattaaacaccaaattacaaaacttgcaattttcaacttatgaattagcctgctctgaatttaggagcaaagttaactgtagccaattataacataactccccattactgacttatggaagcgttgtaacttattcagtatccttgcccagtacattaaattaaaaaacagtaaacatcagtacccatcacttaatctactttttatacatttaaaaaaatctaattttacacattaaaaataaaaaaagaaaaaaatacaaacatagatctcgatacgaatgaagacatagatgaccacacatacacattaaacaaattacaatccatgaaaaacaaagattagagaaagaaaaaatataccttgttgttcaagggccatcatgatcatgaacgtgatcaagaacaagacgattcagatctccctcgaaaattttccacctaattaatccagataaaagacatttataaaaatcgcaaaattaagataaggagaaagaatttagaagagagtgggagtggggggagtgggaaagagtaaaaggaaattacatgctatgaaggcgaaggaaaggaatcggaagagcaaagaaataacagttgttattgttcttagaaacctaattgagaaacagagaaaggaattataatagagaggagaagtaggcctcaaggaacttctctctccatactttctcttcgtatcgccgtaggaaatgggctaacatggaaaatggcccaaatacattgattacgttaatgaaaattaagtattcctgccaaaaataaaaaattagttaataaaaattataaaaatttacttattacatatttatttaattttaatattggaaaaaaataggaaaatacaaaaaagaaaaaaaaattacaaaaatactatgggccggcccattaaacatttataca

SEQ ID NO: 104771 - DNA, 912 bp, Cannabis sativa
cctggggagctcccgtattatttgtcaagaagaaagatggattttgcgtatgtgtattgactaccggaaattgaataaactaacagtcaagaacaagtgtcctttacttaggatcaatgatcttttcgatcagcttcaggggaagacgatcttttcaaagattgatctctgatcagactatcataagttgagaatccgagaggaggatattccaaagacggctttctgcactaggtatgggcattatgaatttctagttatgtcctttggactaaccaatgctcccgcagcttttatggacctaatgaatagggtattcaaggatttccttgatatttatgttattgtatttgtcgacgacatccttgtgtactctcaatcaaaagaggagcatgagcaaaatctccggatggttctacagcggctttgagaacataaatcgtatgccaaattcaagaagtgggagttttggctatctcaagtgtcttttctgggacacattatcagtaaagatgggatcaaggtggatccagggaagattgaatccgtcagggattggccgagaccgaaaatagttatagaggttagaagtttcttagacctggctggtcattaccgttggtttgtagaggggttctctaagatttcaacacccataactgagcttaccaaaaagaatcagtggtttgtgtaggcagacaagtgcaaagcaagctttcgggagctgaaacagaaattaatcacagctccagtgttagccttaaatatgaataaagttcaagaaaccttacattgattgcagcggaattaaatgactccttccactcagatcttcaacccttgtctgtagcagagtatcaccaagatctgagcctgattctccttcaatttattggattcttcacagtctta

SEQ ID NO: 104772 - DNA, 750 bp, Cannabis sativa
  modified_base (32)..(45): a, c, t, g, unknown or other
  modified_base (232)..(246): a, c, t, g, unknown or other
tattaattgaattaaaaagttaagattataannnnnnnnnnnnnnattgttcatatattgattaatccttaatcaatgaacaataattgaattaatcttataatcttaactttaatcaaatagggtttataaaagaggcataaataatcaaataggttagaaatacggtaattaaagaaaatttagaaccctattttttttggatttaatgagatttattttatttttattnnnnnnnnnnnnnnnaaaaagtgacccatgaatttttcataaaccattttatttttataataataaaccatagggttagaaatacggtaattaataaaaatctagaaccctatttttttttgttggatttaatagaatttattttattatatataaattaaaagtgactcatgaatttctcataaactattttatttttaataataaaccatcttatttttaatataaataaaaagttacccatggatttctcaaaagccaagaattctgttatataggcacactttatatggaatagatatatatatatatatattacaatgtgtatatatatatttatatgagggtgaggagaaaatagaaattaggtctatttttttttgttggatgatgataagaatgagtgaggagattagatttaggtgtaattgttttttgggaaatttacaaaaatattgaaatttgaattaacttttacaaaaatactgtcacacgattttttttttaaaaatactgtgt

SEQ ID NO: 104773 - DNA, 553 bp, Cannabis sativa
ttggctagtcatacggaggctttttgtgttacgtttgtgtatgggatgaatggtttagatgagaggaaggtgttatggaagggcctagctactctgagattccccgtcaagacttggatccttttaggtgactttaattccttaattaattatggggatagagttggtggtaaaccggtttcaagggctgagattgaagattttaatggttggcttagtttgggtatggtggacactttgaagaggcaggggtctttcttcacatggtaaaataataaagggagtaaggatagaatatattcgagaatagatcatgctttcaagaatgaggattggttggacttgtttcctaactctttagcttctttcagttgggaagaggtctcagatcactgtgctattgtcatttcttcgactgttatggtggagattgatgttaagccgtttagattctttaactattggacagagcaccgagagttcaaaaatctggttatggatagctggcataaaccggtgttctcttctggattattggggatttggtctaaat

SEQ ID NO: 104774 - DNA, 600 bp, Cannabis sativa
ttttcttttgaaagaataacaagattagtagtgcttctaaacatatggaaataaagtatctcactgtcagagacttgatcaagaaaggagagacattgtcattgacaattgcaagacagagtcgatgttagcagatcctcaaaccaaagggttaagtgtcgtgttgtttaataaacatgttgttaatatgggcattttagaatttttttgatcttttgggttagtgggagttttcttttctgcttgtttttagaaattatgatttataattttctaaagttatgaacaacattttatgtttcaatattttattattgaatggatatgtttttaattatgttttgttatattctcgagaatgattgaattgaaagcatgtggtttatattgttgtgatcattgtcttttaaatttatttgcttaatgacaatgatattttgttggcttaattttaaagcatatttagtgacactaacttattttaagtagtgtatgattaatttgattgacttatttattaatcatcacggtatcagtgaaattgaggactaataaggatattatgttattttaaattgatcacatgttgaacataattcc

SEQ ID NO: 104775 - DNA, 677 bp, Cannabis sativa
tatgtaagatatgtaattgcattactaataactcattcagtcgtagaaaacttgttattactaaccaataacaatggtttgatagcaagctattgaagaacaaagaagaattaacaatgaaaccaaaacaaaacaaaaccatatcacacatacaagactaaaatactcaaaattatgtcgtggggacaagactaatcgcagtaataaaatatatagatttaatcacaccaaagtagcattaatttatccaattactaaaattttatcatggcgttaagacttgatagctagaatacatgcatgcatctttgttggaacacaattatgaattattaaaaaatgaaaatgtgcattttgaagtctttagataactagtcccatattgcttgggaacacttatttatgagtgtatatatattgtagacacgaacaattgggttggaccccaaagggtacccacttttgtaaaaaaggggaggagtcacataaaggttctcccgaatatcacatgtgctctaccgttcgaccgagttggtggtgtgtaccttgtttttggggaaatactatttattaaattattagttttacttatttatttaattaattaaaattatttttaaacgtgtttaattaattggtaatcaatagatatttgatacagtggttcaactgagttg

SEQ ID NO: 104776 - DNA, 672 bp, Cannabis sativa
aaagagggattgaggcaaatccagaaaaaattcaggccctcctgaacatgccatccccaaagaaacacaaagacgtgcagagcctaaccggaaaggctgctgctctgagccgttttatctcccggtccacagataaatgcattcccttcttcaacattttgaataagtgtcagaagtttgaatggtctgacgaaggaggcattcaaaaaactaaaggaacacatggccaagcctccaatcctgtcaaagcctattctcggagaggacttgtttctgtacttggccgtctccgagcacgcggtcagcgcaaccttagttcgagaaaaggagaaaactcagcatcccgtgtactacctcaacaagcgcatgataggggcagagacgcgacaccccgtcattgaaaaattggtcttttgcctcctaatggcctcgaggaagttgagaccctacttccaagctcacccaatcaaggtctttagcttcagacagtgagattgaggaactgggggtagtacccgtggaacgcttggcagagccaagcatcaaaataaaacaggccatagcaacggtagggcaagaacccaactggatggtccccatcatagaatacataacaaaaggtgaattgccccaagaaaggccactgttcagaaagattcagtatcaggctca

SEQ ID NO: 104777 - DNA, 703 bp, Cannabis sativa
  modified_base (653)..(665): a, c, t, g, unknown or other
tttttattttcttttaattattgagtattatccatcacaatattactttatcaaaagcttgaaaaatataaacttttgtagctttttaaaaaagagtttattttgagtaaagcataaaagggctgtaatttgtgtattattgttgtcattttatgtataaaaaataaaaaataatatttctatatagaagatattatatagtgaggtatggagctagtctcttgggagtccataataattgatgacagcttttatttttattttattttatttttctcaatacacatatttctgacatttgatgatttttatttttttatttatttagatagacaactcaaattctcttttaccattgttatttgggagttctcaactttttgagcttgagtatgaatagaagtgttatatcttcaagtagattttgttatgtttttggcaagggtctgttttgaaagatattatgtaattttgtaatttagagtaattaagaggtttagtatatttattcaactaattatgaaattagaagtaatttttttttttgtttttaaaatggtaattgaagagtttcaattacacatttgaattcttttggtccacatgaaaatgacataattacactactattatttttagggtaaataccattnnnnnnnnnnnnntttacaaaagttactaattggaccttgtgttttgttaa

SEQ ID NO: 104778 - DNA, 1045 bp, Cannabis sativa
gtatagtctagagttcaaagaaaattttttgaactgcatatatcaattgcttcatccacccctaagtgttatagagatcatgtggagttataaatataatctacactgcaatagatataaaagatcgttgaactgcatatattacttcttaacttcttccacctctattagatcaaaagatctttatattaaacaaaatctgaataattgcttaagaaattaacaattattcataaacattgaattttaaattctcagtgtttatgtggtattaactttgtgcagagataaatataccgtaaattttgtatcaataataaaacacaaacacatacaaacattataaacatataaatataatatggtattggcatacaagttaaagaaaacatgaagctcaattcataaatgcaattcgtaatgaaaatttcttaaagagaaaactttattaataatctcaaaattgtcataagaattgtctgcaataatatgaaatagggaataaaataccaaaccaataattgaaactaaattgttcataaacaaaaaaacaatttattcaaaaattaaagaagatttcaagcttcatcttcacttggacaatctccacccttttgtccaaccatccgactcaactcgctaggatagcaatccaagtttaagcagctggagctgaaataagaagaaaacaaacatggttagtagatctagaattaataacccaaggggataataattctttaaaaaacatgagtttaaagcatagatagaaataccttgtttctttgctagattcttagggcactggggtttctagtggcccttttccttgcaatagaagcactttcctttttgctttgcatcgggattttcagcctttttctttttagctattttaacagtttaagagtcttcttgctattcttccaattcttcttgttactaggtctccaagtaggggcaatgtttgcctcaaccttggccgtacaattagcagtgccagaactaggagctttagttcctcctttctgtggtcctccaatca

SEQ ID NO: 104779 - DNA, 682 bp, Cannabis sativa
catacgtcagaccactaccatcttccgttggtatccctctcatctccatctcatacgtcggaccaccaccacctctcgtctgtctccctctctctctttctctctctccgagctcgttataaatatatttatttatttatatacttttgtatttattatatatatttattttgttattgtataaatttaatgtgttttaaagttagttgttattgtaacaaaattaattagttgttttattttaatttaagtaaaattataaagctaatggaggaagaaaattggggaaaatataatgacagaaaaatctgtattttttcttttttttttacattcccgacgttttaaaaccagcgccgatacccagttataggcaacgattttaaaccgtcgggaaacccacattagcatcggttttgaacctataagatgctgaaattaatggacaataaaacttaataagtttagttttattatttttattgtattgaaagatactaataggaatagcaatatatagtattaggaaaatattaagatatacattactattttccattgacttctctctatcttaatatactaccagtagtatattataatttatttaaaatgcactcaactccaatagagtcaaataatagtgtttatcctattggtaatgtcaatcaagaaagcttag

SEQ ID NO: 104780 - DNA, 884 bp, Cannabis sativa
atttttactaccaaaaaattctactgcaatatctattttcagggtgtattcgacggttcactaattttattaaataaatatcacagaagaaattttttggtagtgaaaattgaattttttttgctcacactttaatttttttttgaaaatttatttaataaaataattattttttattatttaatttatttgagaaacctgtttaattaaaactgattacttatttcattagtctatgtaatgcgattgaattaacaggagaaacacatcttttcataccgaaaaaaaaaactttgttttcactactaaaaaattccatctgaaatatatctattttcatggtgtattcgacggtttgctaattttattaaatagatatcacagatggaattttttggtagagaaaaatgagtttttttctcggtatgaaaagatgtgcttctctcgttaattcaatcgcgttatatagtgcagtggtgttccaatacagtgtacaacaactaggttgttttctcccgctacggtgtagtggtgattcgaggtttgttggtgtggtgtgacactttattttttttagaaatttatttaataaaataattattttatgatttaatttatttgaaacacatgtttaattaaaactgattacttatttcattagtctatgtaatgcgattgaattaacagaagaaacacatctttccataccaaaaaaaaaactttgttttcactactaaaaaattccatctgtgatatctattttcatggtgtattcgacggtttgctaattttattaaatagatatcgcagatggaatttttcggtagagaaaactgacttttttttctcggtatgaaaagatgtgtttctcccgttaattcaat

SEQ ID NO: 104781 - DNA, 648 bp, Cannabis sativa
tggattggtggcttagaggggcaaaagcctcttccttttttcccctttcataagtgtttgaaaaaaattaaaaaaatgctgaatgagatcagttatgcctaattatttatcatatgctctgtatgacatcggtttgaatcttaagctcacttgtaatgcatttttctcctctttatataaagataaatctattgagatttcaatatcagaagtataatttcatatttattgcgcatggattgtataggtttgctgctgaaatatttcatgatttgcatgaagaagtaatggcgacctctgcaagaggtcatggtctaatggttcgtgttcaacaattggaagcagaatttcctccagttgagaaggcacttttgtcccaaactagtcattcgtcgtttttctgcaattcaggtgagattaagtggttcacttcatgttttatggttagattagtgatgtacttacactatgctatatttatttttttattttcttttccgaccatctcacatcaattgttctggaagttaatgttgctcatacctcatattgctattcctcatctgaacctcttatattttagaactgccatctacatagtagaacctctatccaagaatacacttgggaccaagtaaattatattct

SEQ ID NO: 104782 - DNA, 1117 bp, Cannabis sativa
ttttttttttgttattctactatttttttgtatgtttaacaaatgttagtttcaaattacacaagttaaaccaaccactagaataaaagaatcatggacagtaatagtcttacctcccatttaaagggtgagatttggaagaccaaaaaaaaaaaggatggaagttggttagaaaaagaaataacataacaaatgcagcaaaatgtggggagctaagacacaacaaaagaacatacaggataagacatcaaaaaagaaaagaaacagaacaactaaaaacaacaatggaacacaaaggaaaactgaacatatattggagcataggatactgaagaaaatatcttacatacaaattttattatttttctattactattaaaaatagagccgtacaaaaatatttttaaaaaaaatgataaagaaatgaaagaaacaacagtaaaacaacattaaaacaataataaaataataacaaaataaaccagtaacagaaataggtaagttagagaaagtggacttggaagtatgaaagagatggagccaacaaaaagttcatcacaaagcaagctctgcaactctctcacacacataaccacactcttttctttcccaaatcttcttcttcttcctctttcacatacctttttttgttacctactacaaaaggagagaattaacttttatttgggtaatattgtagacttggaaaaaaagaagaagaagaagaagatgaacaagggagatagagctcaaaaataatgaaaaacaaaataaggtatgtgtttaattatttactaaagagaaattgttgagcgaagttttcggcaactaatcaaataatataatgagaagagctgtagaaagtttaatgcatgagatttttacgtggttggggcattaatgagccttaatccacgagtctttgttattaatgagagtatttattacaaagaatattcttggtgaatttctctctcctcttttctctctttgattccttaacttaaatcaatcgaccccttttcagtctgtttgtgggctatttatagtgtttttctggggggatccctagtaagggatcacttgtctttgagtgttagcttcttaggggcacata

SEQ ID NO: 104783 - DNA, 925 bp, Cannabis sativa
  modified_base (603)..(612): a, c, t, g, unknown or other
acaatcttccccaaacaccaccaaattttctagagcatcatcatataacatattaaacatattctacaactcaaatacaataatttcaccaatcaaaaagtgtcattaaagctccaagcttgagttcatgaactcaagcttgctttacacaaccaaaatcaagcctacaatcagattttaaactcaatgacatcctaaaaacgcctctgaatttaccaaaaataaatcccacaattcaacacaaaatcatggcttaaactcataaaatccaagctcttgaacttgagcttaatttcaacatacccaaatattttttttttctagcaacaatattccaaacaaatcatgaattctaatctagaaaataatctttaatcttattccatgctcaacaaacataaatcacaactaaattaaggaatttacactttaatccctcaaaaacaatacaattcctacatacatgcataaacaagaatatttcatttaattcatactttttccacaatcatattcagcaaggaattcaattaaaattcagtaggaaagctacctcaattccttgcacaagctaactccaagccttcaacacaattttcccannnnnnnnnntttaattcaagctagtctctcaccaatttcaagttgaaaataagagagggttcaagagagagagggtcggccaagaggaagcaaaagccaggattttcaaatttcattccctcaaaattcacttttaattcaagtaaatcaaataatgtcaaaagaccaaaatgccccttgggccaattctcacctatccatacatacaagggtagtttggtcatctcatgcccacaaattttcaaataaaattcagatttcacattattaaattaaattccaaataattcaagtcaaattgcatttcgggcccgaaccaagt

SEQ ID NO: 104784 - DNA, 1124 bp, Cannabis sativa
cattttatatccctaaactttttcgtattatgtttatttaggttgagcaaagtcgaaagcaagcatcgagcaattatgtaccagattctattctgtgtcgtgttagggagttggctgttgtctatccatatccaagagaaaaccggtcgaaagattcttgcaccgttccagcagtctcatccttttctaccggctcctctaacgcattagtcccattatcaaccgttgtctaaggagcaaagaaagtctgcgcgagtagtccttgaacaacacttacaacacacgtcacggcctcacgggtataccatgctaacctgaatctaaaaagcaagaaagtaaaaaagtctgtcaatattttataaattggtgttttagttatagatcttagatgatgacccctttttttgttaatcttgtagtagtagagagctaagtatgcatcaattaacatcaaattaatatgtagaaattattaacctttgattcttttaatgcttttgagttttcttaaaaaagagtattttgttttctttaaacatggattctatcaatctgcactaggcaatatagtttcttttcttatgtataaaaaagaaaaattgcagtcttagttggactttttttttttttgttgtggtctttgtttgtacaaattttggtctcttctcttcctataaatgctaaaataacaggtaaattattgtattgaaaatgaccttccttctcatgatcaacagttgttgatttctttgacttttttatttgtccaatgaattttgagtgttgacttgtacatagtatatggctgaagtttgattgcctcttcaatggccattattcatatcagaatcagtcatcttcagttgtttccttttctcaataaataaagtgtcattatggggtcgttgacattgttatgtggattcattggagttgacttttgatatagtaaaagtcgtattaggtctaatgttcacatgatccttatttcattcatacaaaccttttttgtctgtccaacgaatggtgtctagaaaaactacaaaagcttaatggtttaatttataatttaattattgatttgaataaattatttggaattaaataaaaatttatccaatatt

SEQ ID NO: 104785 - DNA, 692 bp, Cannabis sativa
cagttattatggacatccaagggagagtgttataaatattaataattatgtggatgtccaaatcttttctttattatcattacttgtaatcaacattcatttttcttagttttttaatatttgactcttgtatttgtataaataggggttcaccctattggaataaacaaccggaaaattctcattcactttctctttctctctttatcttcttcttcttttcttcatatatattttatattttataacagtattttcatttaataaattatcgattccttaaaaaaaatagaactttcttcaataaaaaagttaagtaaaaattataatataatattttaagtcttagacgaggacgatactactttcctatgtaaaacaaaaaatacttttttattaaaaaataaaaatagaaaagaataccaaaagacaaataaagatattcacagaaaagtttagagtgtattcactcaaacttccgttaatccatgtgtcaaaattaaatgacatgtcaatgtctcataggtggagacaggattggcacaaataaaatgggatagcagatttttgttctaaaaatttcctctaaactattaagattattagatttaaggactggtctaatttcattaaattttactatttcagtgattgtttatgtactaaacatgcttcatagactttgatatcta

SEQ ID NO: 104786 - DNA, 1205 bp, Cannabis sativa
acaggacattaacccttttggatactggaaatctggtgttaacagagtataacggtataagattgtgggagagctttaaaaccccaactgatacatttcttcctggtatgaagatggatgagatcttaacattgacttcatggaaagacgagtttgacccttacaatggtgacatatgtttactaagggtgagggaactaactcgttcatgatccgtaacaaaacgggtactcgttggaaaagtgctgaagtcagtatgttcttaagctcaaatcagatgccgactacgataacaaactttttagagaacaaaaggggtgttgctcataaaaatactacttacaaaactggaccagaaatctcaaattataattactcaaggttagtgatcaactctaatggaaaacttgagtacttgagttgggaccaaaattggacagtggcatggtctgtaccaagtgatagatgcgatgggctaaacatttgtggcgatttcgggatctgtaacagtaatgaacagatgaggtcgtgcagatgcttgccgggatttaagtcgagccttgtggagaagtggtattctggagattactcagatgtttgtagcagaggagcaaaactatgcaacggtaacgattcattcttggggttgaagatgatgaaagtggggagacgagactcaacaacaagcatacaagttaacaacgtaactgaatgtgagaagacttgccgtgatgattgcaaatgccaggcttattcacttgagactcatcagaatagttggaacagaggggattcaactcaaactaatttgagttgttggacatggtctgaaaatctaaacgatcttcaagaagaaaatattactaaggatggcgttcacaccttctttgtacgagttgccttatccaatttaagtatgtataatatatagtctctcttataatttttagttttactactaactacttataggtccgcaataattagacattctgtgtgtgttttctgtctctttttttttcagaagatgaaacttcaaatccaagaatagtaaagcctaggagaagaaaatcgttatatctaattgtttcccttacagttacaagcgtaattgttctgtcaatcattataatttcgtttatcagttggagaaaaaggaagaccaaaagacgaggttagttattcaaatcaaaagatgcaatgca

SEQ ID NO: 104787 - DNA, 550 bp, Cannabis sativa
  modified_base (34)..(37): a, c, t, g, unknown or other
  modified_base (159)..(161): a, c, t, g, unknown or other
  modified_base (479)..(495): a, c, t, g, unknown or other
cacactatgatagagataccacttgatgtgtgtnnnnactcactctatcactcaaggttttaaattatgaagaagaaaagagaggaagtggttttggcctaacagaaagaaagcttaagaaagttttctgaaagtgaaatttcatcaatctttaagtgnnngtcattactatctatttataggcaaccactaggtttaggttaggaattattaggcattaaaataatagaaaatttaagtgtaaattccatctatagtggccgaccatactaatgggccccactagagaatttttccacttttgacaattttctcttattttctcaaaaataccttttttcaaattctaaccatttaaatgcccaaactaattattgaataattaaaattaattatcaaataaactttccatttaatatatttattaattagagataataaagtcttcctattaataaataaaacctagaatctatttnnnnnnnnnnnnnnnnnttgcttagtgaaaattaataaactagacataggtctaattttagaattataattg

SEQ ID NO: 104788 - DNA, 1089 bp, Cannabis sativa
atttacaagctattagaacccaacaagggccaaagacaatctataaaagtataatacatgctagcttaattcttttataacctatactcttcctatttacaaattttgaaaccattctttgtccctttccttgactttcctaggccaacatagagtgattctttgtttggcagtgtgcttgattttcttgattaagcattctctaccctcatgtgattctcccaaattctggtgttctgggctctccatataacatacagaaggcaatcaattgaggctgcaagcgcttgtttcttgaatttactttagttcttcctatccaccttataagtcgtggcaatgaaacagttgcagcatgccattgtagccaagcttttagggcatttaaatattctgctgcaacataacattcaaaaaacaaatggctgcttgtttctctgtgttggcagcataatacacaatgatactccactattattcccatctttaacaacctatctctagttttgagccaattttaaattgctatccaagtgatgaagctatgtttgggagtgttcaatctcccccaaacttgcatggctccatgtcacttttccctgctttggccagaggatattatatcctttagatacacaatagggttgtattgatacttgctgacctgcagtaagatctctgaattggtcttttaatgttacaagtctcctccaataccaactgccttggtcaggagacttgtaactccaccaatccgcatttttgatgtaaacacagtggatccatttcatccacaaactatcttccttatttgaaatggcccagatgtactttcccatggctgccttgttccattcatctaccttcctgaacccgagccccccagttgctttgggctgacacaaattgtcccaagctataagaccaggaccagctgccatagcctgaccattccacaagaaattcctacatattgcttcaatattgttcactacttttttaggtaagatcattacctgtgaccagtaggcatgtatttgttggattttatgccctaaataaaactttttacaatctgattagttatca

SEQ ID NO: 104789 - DNA, 666 bp, Cannabis sativa
  modified_base (88)..(89): a, c, t, g, unknown or other
  modified_base (306)..(307): a, c, t, g, unknown or other
tcaaccaaatgaagatgggtaaagaattttagaattctcccactcaaataaggtagtgtgatacattgtcaaagaactttattggtannaatttctattacaacagtaaatatcaactggaacttaaaccaagatcaagaatttattctgataattgctaattcattatattacttccatgttcaaaaatatgcatgacaaagagtactgtggtatattgaatataatccagagtttaaaatgaactacatatttcaatagtatagtccacccctaagtgtatagagcttatgatccacccctaanngatatagagatcacggttctctaagttttatagagatcatgtggagttatgaatataatctagagttcaatagatataaaagatcgttgaaatgcatattattcttaactttttccacccctatatgatcaaaagatctttctattaaacaaattcttaataattgttttagaattaacaattatacatagaaaataaaatttctaagtgtttatgtagtattaactatgtgaagagttgaaaagactagagaatttgtatcaataataaaaatacatacacatacaatcattaaaacatataaatataattggtattggcatatacaagataaagtaaatgaaactcaattcataaat

SEQ ID NO: 104790 - DNA, 716 bp, Cannabis sativa
tttctcccttctggtagaagagcccgaaatcagttgtaccgcgcaagtatcgaaaaattctctttgcagcaagaagatgtatctcccttggacattccatatacctgctaataagactcacaccatgcattatatcttgccttgttgctgtcaagtacatcaaacttccaactatttgcttgtatagagtgctgtcaaccttctttccttctggatctttgataagcttcaaaccaacctctgttggagtgcccacaggattgcaattcttcatttggaacctgtctaaaatttcttggacatatttcttttgagaaataaaaatagcatcattagtttgcaccacttctatgccaagaaaatagtgcattagtccaagatcagtcatttcaaattcaagcatcatggattgcttaaatttttcaatcatgacactatcatttccagtataaatcagatcatccacatataagcaaacaatgagaattttacctccatctccaaatttaataaaaagtgtatgctcatatggacatttatgaaaatcttcctttgaaaaataagcttcaatacgactataccaagcccgtggagcttgttttagtccataaagagccttttttaatttgtacattttatgctcatttccattcttaacatagccaggaggttgatcaataaatacctgttcctccaagtctccatgtaagaatgca

SEQ ID NO: 104791 - DNA, 520 bp, Cannabis sativa
  modified_base (302)..(302): a, c, t, g, unknown or other
atgatttctttcatgattatatgtttaatatataaattctattaaatcataaacgtatagttattcatgattatattattgtctatatagtggaaaataatcatatgattatatgcttcaaagtattttagtctcatgatttatcagtgcactgggtttacactgacgtgataatcagtgataaagtttacttacacaatgatatgtggaatgtcctttccaaggtattagcaaagtatactagtgtcagatgtattggctatacattggactggactgatattgacagtggaaaagatatnataaacttaccgttatatcttttctaagtcaatgtaacttagttgatcttagatcaatagatcttaatcttgagataattaggttttggcttaatgtataacataacatgtgttttttaacttgttcgttaaagtggactaaacagatcggcccaatatttacatattgagaatatggtagtgcaattgagtgagaaaactaatcatagatatggact

SEQ ID NO: 104792 - DNA, 557 bp, Cannabis sativa
ctgttatggctggtttgaaagctgttgcaaaatttcaggtattttattttttattcatttaattatttaattgtttatgtgttgttattttcttgttgtaatgttgttatttgcttcttttgtagcaatcatctgctttgattccatatgatccacaatcaaccacttctgctaatgtggtaacttttttacctcattgttttgtttatgtataaatatattatttttctaaaagatgtgtttttttatctatttcttttatttaggatttggcgcctgagcttaatgctgtcgttgataatttagttaatgttgatgagatcactcctcctgttgagaggagaataccaaagcctggcttacatttgcagtctccttatgcacagcagttgagttcatcatctaaggctgctgttgttaaaagtaaggttaaatgtttatgtgctttggatcattctgttgtagacgatgtcaatgatgaagatgagaaagtctttgatgcttggttcaaatctggtttgcttaagagaccgacgtatgttacttttatgtttatt

SEQ ID NO: 104793 - DNA, 1867 bp, Cannabis sativa
tatttttataaaactgtttaattaattttacaaaattgtttattttgagttttactaaacatgttttttatttaatgattaaaatgtatgatttcatgtaataagtttttaaaatgtataaatttttaaaataattttttttgcacattttttgtaattatgttatttttgttgtacatttatgaaaaaagccctaaaaatgactttttaaatatcaagggtactattgtattttttccatttaaaatttgcatacttagaatttagcggttcagaacttcgagacacatcatttattcatttaatgccctgactgttcttttcttgtacatttcacatccgtttgattagatttcttttgattgaacggttgtcacctttaaggtataaatttcacattttacacttttttttgccattctcaacccacgaaccttcaagcttcaaaaaattctcaaccaacttctcatctaatcttgcatgccctctctgtctttcacattctttctgcgggttttatctgattgtgttcctcttcttcgaaatcatcaagacccaactttttgatcattgcaatttccatcgtgaagctcttttctacctggagtatcctatcaaaacagtaagtgacattctttcttgttgatttttcctctatgctttcaatttcaatttcttggtatgtgttttcttgtgtgtattgttttgctgcttgagtaatttttttttaatgcttgaataattctagggttagaaaatttaaggttatacgatttgtcgatttttgagttttatttgtgctctatttttctaggaattggggcattattatttataattatgtcccaatttatcccagaattcacaatccaagaacccttagaatcagtttgtcctcaattttctgccatagaatttaaacccaaacctcgaagacctcaaaccatacttgaaataaacgatgcaaaaattaggaaccaccttgttaaatccggtcaggaagaaacctctagccattataggcgattcttacaagaggttattgagggtaggtgtcgttatttgcgagaagcaacttagcctaaaccctccaatttagttgatatccccttagcgagcccatgttttttacctccaatcactgttgcttttttaccaggttcttagactttgagataatggctcagaaagctcataaatcaaagacccctcaggatcccactgtcacctttgaagccgatttgatagaatctaaagttaggtccattggaacttatgttggggatattttaaggtcatgcgacatcacgaatgaacaaggatgtcgcattaggtctgttgcccaaggggaattcaactattatccccttaaacgtttggtttgagatgaaggttgcatcaccagcgagccttccagagtagacgcttggagcctcgaacacataagggctggagcagttctccccgtcaaggattattttatagacttttgtaatattctcggcgttgctccttttcagttggcaccaaattcgtacaagatccttgcctgtttaaagtctctctaccatatcttgaaatgggaatgtccaaccccattagagattctttatttctagtttgtcaaggcttgccctatgaggaagcgcggagcaggaggcttttactacctcgggacccacactaatgatcatatgatcattatgaggctacccaacaaaaaggagttcgatgatgacttctgaccactggtctttttccaatcaacacaatgaagtttcaaattatacgtaagtgaaaactcttctcaaattcttggttttgagttttagtttaacatgtattttttatactttactaatgttgt

SEQ ID NO: 104794 - DNA, 659 bp, Cannabis sativa
cagatggatgtaaagactgcatttcttcatggagatttagaagaagaaatttatatgcagcagcctgaaggttttgaggtgaaagggaaagaggatcttgtctgtagactgcgcaagagtttgtatggtctaaaacaagctccacgacagtggtacaagaagtttgattcattcatggtggatcgaagctataagagattagctgcagattcgtgtgtctacatcaagaaatttcctaatgagaaatttgtcatcttattactatatgtcgatgacatgttaatagtcggtcaggatggtaagatgataaatcagctgaagaaagaactatcaggagtcttcgatatgaaagacttgggggcagccaaacaaatcctaggaatggaaatcattcgtaacagaccttctcgaagattatggttgtcacaggagaactatgttgaacgaatacttgagaggttcaacatgaaggatgcaaagtcagtttcttcgccacttggtggccagttcagactcactaagaagtcatgtccatcttcagaagaagaaaagaggaagatgttggctattccttactcttcagcaattggaagcttgatgtatgcaatggtttgtacgagaccagatattgctcatgcagtgggagtcgtaagtcgttt

SEQ ID NO: 104795 - DNA, 825 bp, Cannabis sativa
gttaatttctaccttggatagatagagacattgtttattaattcatattaactttaaaaaggcatatttattctactggtttttattagtatttctcaacataaataatatacttcaaattaattaaaatacaaaattgtggatactaacacgagagagatggaaaatcaaatagataggagatcgagttcttgtagagtagctacaaaagatcaaagtttgaggaagagttttattttaaacaaattgttggatgaaaaatatacttttggtttcaaaacaataaaactatactgtatacaatatcaaattgataaaataatggaagggtgatattatatggtgtaccccaatggggaatatatgtttgtttattttatcagatgaagagaaactgatgatgatgatgatggtagtttgtaatagtttatataaattaatcaatcttgtgatttacattagccagtcttacaataattttattaaatctgtcaatattattatttaaagaaatagaagaaatctttttaaaacagtataacatttctagcaaattattttgctaacaattgataatattaagtataattctttcaacttgttcgagactcctttcgctgtcttttctacgatgagttttcttcgaacattgtttgacagatacataatgatcgtgtaatccgccatcactctcatttctatttctcttctagtttctttttagccaataacttctcatctctaagaattttgtagaccttttgatgcattaggatccctttcaaactttctctccacaatgcgaagtctcttgttccatcgaat

SEQ ID NO: 104796 - DNA, 627 bp, Cannabis sativa
taaccctccacgagccaagaaacctcatccctcatgctccaattgtggaaaatcaggtcatttggttgaaaaatgctacttcctacatggttttcctcctggctatggggacaaaaagagacaagacaaagggaaagcgaaggcaaatcatgccagcacatccaagaatgatgcagatggacactcaatttcatctgatctatcaacacaatgtcaacacttgatctctctcctcagccagcaactcagcaacagttctcctcatgctgatattgctgccatggcccctgctgcttctaatcttgcaggtaaaaatcattctcatctccatttacatggattttagatagtggtgccactcaccatatgtgttcaacataacatgtttaacatctttctcacatcatgatatcccttagtatgttaccttgccaaatggccacaaaactcttgttcataactctggtacagtccacattaaccttacataatctttcataatgtgttatatgtaccaagttttaagatcaaccttatatccatatccgaatatgttcacaatagttctaattccattatttttcatcaaaacacttgtgtaatgcaggatctttctcagaatgtagt

SEQ ID NO: 104797 - DNA, 644 bp, Cannabis sativa
  modified_base (44)..(45): a, c, t, g, unknown or other
gcctatttaggtactttttatttggtgaatgattagcttgagtnntgtttgggtttgtgttgaattagatgagtttaggggctaaaattcattgctgaatgttaattttttagttactggtttttggtgttgttggtagtgaattaggtgtaattcctctctaattacttggtttacgctaggtgaaagtttggtatgattttgggttgatatagcatgaaaattggtatttttggatgcattttctttgctggaaacagggtttcctgggttttaaacccagtagccgcggccatttttggaattgtattttttttatttgtttttttttggtcataacttttgactcgggactccgtttgagacgttctttatatcattggaaatctcgttccgagctctatgtgaatagtttgaatttaaatgcccagtttataatttgcggaaatggattttgggattaaccgtatacttgtgtatcttggaattgtgactaggattaccggcacttggtcaggtgcacccggggatttgaaatgtccatatttgcaggacatcaagtaagacagtagttagcacatagagatatgcgcaatggcacttatatggaatgtgatttatatgagaaactagaaaccgggatt

SEQ ID NO: 104798 - DNA, 685 bp, Cannabis sativa
  modified_base (41)..(43): a, c, t, g, unknown or other
aaccatgcaacataaaacaatttttgatctttattaattannnaatctgattattttgaaatgagttttatttagggcacgaaacccaacactatgcacgtagggccgatttctgcattgaatcggatggaaccactgtacaaaaggttccacaagcaggcacctctagtctttttgggaggttccaacgtgattaatgtcgagcagtggctgatggttattacacaaatcttgaactttatgggtgtcatcggcaacgagaaagtggcttgtgccacattccgattccaggaagataccctagtttggtgggacatggtggccctgaaagaacaacttatccggatttcatgattcaagttaccgagttgttcaagattagattgattaattttaacttaaacattcaagaatcagattgaagagtaagctgtaaagaacacgatgacttacaagcttcgtctgcactgagaataaatctcagccgactagtgcttgggtttcccgaaccaaggtaataatgtccactaaatccaaaagattcttattacaatcttcagttcacaattaggaatttaatacaatctttacaataattagtaatgtattaccaacaacaaccaagattcttggttgtacgcacaagattccctgtgcaggagcttattgggttttatgccctaaa

SEQ ID NO: 104799 - DNA, 558 bp, Cannabis sativa
  modified_base (190)..(202): a, c, t, g, unknown or other
  modified_base (403)..(409): a, c, t, g, unknown or other
  modified_base (516)..(524): a, c, t, g, unknown or other
tatagattccatatctatgagtagcgctaccactcaattaaactactatgtttctaagatgtaagtgttcagcagacaagactttaacgaacaactctaagaatataaataatacaattaagcagaacctaaccatatcaagattaatatctatagacctaagatcaactagtgatattgacttagaaannnnnnnnnnnnngtttatgatatcttatccaatatcaatatcggtccaatccgatgtatactctatacatccaatactggcatactttgtcaatgccttagaaaagacataacacgtatctaaggtgtaagcatacctcatcgctgattatcatgtcagtctaaatccagtgtactgacaaatcatgtgacttaaacttttgaacatataatnnnnnnnatatttcactgtgttgacaacactataatcattaataaatatatgttctagacttaataaaatttatacattaaaacatatctagtcatgaaataaatcatgtgaannnnnnnnnataaaatgatttctgatcttttattaattagtaa

SEQ ID NO: 104800 - DNA, 511 bp, Cannabis sativa
tttgtgatcatatttttgtaataacaactttcaacaacattagaaaagttacaaaaaatatttttacaaaataataaaaataaaagactaattagaatttttgtccctaaactttgacatgtatcaaatcatgttccttaaacttttttagccgttaaaaattctcctcaactattgaggttgttggatttaaagatatttgtccagtttcattcaattttattaattctatgattgtctatatattaaattttgctccctaaactttaatatctacaaaatcatgttcctcaaattttgacatgtaccaagtcccctgaattttaatccatgttagactttacttgttaaattttttttaaaaaaaaaaatacataatttaatacatattaaaattcgagaacaaaaattctaattagtcaaaataaaattagtcattttgaaatcataatctccagttgagtaagctctcaagcatttaggagcgcattcacatatgaaggctctctaa

SEQ ID NO: 104801 - DNA, 784 bp, Cannabis sativa
  modified_base (268)..(268): a, c, t, g, unknown or other
caccagtaacctatttactatgcatgtaaaaggttactaggggcaaaatccaggcatccccctctagaaaaactcgcgttatgcctagtccacgcatctcacaagctacgccatacttctaggcacaccctataaaagtgttaaccgatcagcccttgagacaagttttatcaaaactagatgcttctagaagattcataaaatggtcgattgaactggggcagttcgacataacataccatcctcgaacattcatcaagggtcaagntttagcagacttcttgatagaaggtataactccagaagaaatcccatctgatcagcgagatgcgaatacctggaagttatatgtggatggtgcatccaacgagcagagttcaggtacaggggtgacataaatatcactggaaggctttaaatttaaatatgctctgagattccaatttgaggcacaaataacgatgctgagtatgaagccttgatcgccggcttaaagatagcagaggccttaaaagtcaaaaatctcatctgtcatagtgattcgcagctgatcgtaaaccaggtcctcgggggataccaggccaaaggcttgaaaatggcaaagtatttggagatagttcggaagaacttggaaagatttgattacattaaaatcgaacaaattctgagagaacaaaactccaacgtcgatgccttagcaaaactggctcgcaaaatgatctggacgaactaaatctggtttcactatgttgagcgagccaagtatatgtgaaacagaagacgt

SEQ ID NO: 104802 - DNA, 1248 bp, Cannabis sativa
ttgataattgaagaatctcctctcatctcttctcctctcctccattttcccatttttcttttcacatacaagttttggtattttttcttcttttttttttgtatgaatcagaatcaaacatggaagatgagatttataccacaatttggtattgcaaaatgtatactgttaccttatagtacaaggatattcattattgttcattagtgaaatgtgcttttattttttcaaattctagggatcatctagctactactcattctgtggctgggtttggtgttgttgactcactacctaatacaaattatttttccacactataaaatactaatattattagggaaatatccttttacttttacatgcttaaaaaaatactcaataaaatttaaactcttaattaatttatacaattaagggatattatatttacactcttaaaatttatttctacaccccattgttaagtgcacctcattttgtttgttaaaatttacattttataattacaccaatttataattccaaaattaggtttatctatgcactccatgccgatttaaaatttaaaccatctccatgtcttcaaatagtatgttccaatacaataactgtcatgttcataatggtcgagtccttaaacataagttttgaaagttgaatttgttcaccgatttatttatttagttttttctttttttttttcttgaaagagaccaacttatttagtttaaattgcagtgaacatattattatcattgattgatttatgtgtagaattgtgatcacttttaacgtttgtgaagtattggaagataaaaaagaattggttgtaatggacgatttattgatcatgatagttaagtaatagaaatttttttgagtaatcattgtgtttcttaacaataaatcatggacttagttgattatgtacaaacttatgcaatccttgtaaggatgttgcatatcatatatataaaaattacaattgtaacttgtttatgagtttgcttttttttttcccctgaaaatatgagtaagtttatggtaagtgggggtgtgtgaagattttaattttgtttaaaaaataatactttttttttttttaaaaaaaaaagaagtttcaaaaaataagggattttttctcatatagctttattttggaaaaattttacttttttactctcatataggaaattaaacaaaaaaggaaaactcaaagtctttttcaaaaatacggtctctaca

SEQ ID NO: 104803 - DNA, 506 bp, Cannabis sativa
gttgactgagagctgacctgttacaactgaggggctagcctctacatctgcctgagttaaagtaaacacccttgctggagcgggttttgcatcagtcttctattcttctttcctaagctgtgggcagtctcttttatattgtcctggcaacccacactggaaacatccttgccccctacactcacccagatgatgctttttacaactagggcactctgggtaagtgtatcgggtttcaaaactaccctgacagttgcctcgtccctggttccctcgaaacctcttattctgacttaggccatcgggtccagtcagtgcccctttcgtttatgatcagtggttgagccactaccacccctaccataaccagaggtaggaggagtaggagccccaccaataacatctgtccctcgagactcctaagtgcactccattgcgctctcagcccgcagtgccttttgttggaatttattaatatgttggatttgttggatattattttacca

SEQ ID NO: 104804 - DNA, 1016 bp, Cannabis sativa
  modified_base (591)..(591): a, c, t, g, unknown or other
  modified_base (705)..(709): a, c, t, g, unknown or other
  modified_base (973)..(973): a, c, t, g, unknown or other
taatggcataaaaagtgtgttccgggaatccctgttataaaaagtttttctgaagaaatatatacgacaaccatttaaacataaaattaaaatacacagtagatacatctagtccaaaataactcttggcaactcggcacgcaggccagtgaggtcaatatgtatattgctggagaagactgtcacctcatggttgatctagcttttttttttccagattcgatccgatccagttttaatatatattaaaaagaataattcaagactcggacccggatccaggaccctattgggattttatgccctaaataaaacatatttcaatataatcagatttactaattaataaaagaccagaaatcattttatgttgcatgattcacatgattacatgttaagtatataaattctattaaatctcgaacacatagttattcatgattatagtattgtctacacagtggaagataatcataattatatgcttcaaagtatttagtcccatgatttatcagtgcactactgatgtgataatcaaggatgaagtttacttacacaatggtagaatgtcctttccagggcattagcaangtatactagtatcggatgtattggctgtacatcgggctagaccaatactaacagtggaaaaaatatcatcaacttacccttatgtcttctctaagtcaatatcacttagttgannnnngatcaaaagatcttaatcctgagatgattagattctggcttaaatgtattacatttattctttgacttgttcattaaagatgaccaaatggatcggctcaatacttacatcttgagaaccttgtagtgtaattgagtgggagcgctaatcataaatatgaaaactatagcttctataactatttggaaatgaaacaatgatttccttagagtttggcttaacatacataaatggaagaactattatttcagtaattatattagnttactgaaatatcatttataagaagctaagtattttaaggata

SEQ ID NO: 104805 - DNA, 555 bp, Cannabis sativa
accgattttctcaccttatttattcggtttttattgctcttttctatgttaggaaagatgcatttttagttgaacttttcttgtatggaaacttcttgtaaaataagcaattcgcttatggaaagttggtttttaaaggaaactttgatctttatcattttccttgttaagttcgattttgtcttgattatatcagatcatattctacgtttatagtaggtatcaaaacccaatacatgatcggactcgtttatggcaagtttcattttctagccaggtctgctgtgttagaatctgtttctgatgatgcagatcatgtttatcttaggaaagttttgtacagctgtagattcgatcttgtggctgtctctagggtttctatgttctataaataaaacctagagagcatccatttgaatcaactcttcaagtatacattttttgcttttttcttatttgtgagaagagagtttttcttttctgagaacctagttgttcatctaggttctagtgtttttcatatctgttgttattctgtcttagagtttattagaa

SEQ ID NO: 104806 - DNA, 577 bp, Cannabis sativa
gtgaggacaaagcacgttagaaacactcgtgttggtctgtagggtcagtcgtcaatccaggaagcagccagagtggtgtactcgtgtataagagtcattattccttgggtgtaaggatccaatataggcttgaaatggggacgttacaaactctctcatttaggttggttgaatagtcaagttgacattagttggatgagtgagagcatcatgttccttttataatgtttcaactagggcttagggctgaattatatagattaaaaaagaataaaatattgggcaaaaaaccacactaggatcagccacttaaagtgccaatctctagttacaattttgccactttcttaaccactattcttctttcaataataccatatttttcaatgcaatcatatatatgccaaaattatttatttaataaatataattaattatcaaataaaattatcatttatgtgatttattaattagatcatgcaaagtctcttaattaacaaattgagcccaaacctcttttcttcacaattaagcctagtgaaaattcataaaaaagatatagtctaattttagaatt

SEQ ID NO: 104807 - DNA, 708 bp, Cannabis sativa
ttttgtaattttaaaatttattttaaaaactaatgagttataatataatataaaaagtttacatacataataaattgttctatttaatatacataacataaacataaatttaagtcaattaattaaaatattttttttagagagataatcaatcaatatccaattagtaccgtaagtgactaaatagtttatttaatatttaagatacattttgctaactttcaagtttatttaaagtactgatgagttatataaattatataaagcttacatgtataataaatggttctatttaatatattgcatagtaattttttatataaaaaatatataatacacattttagtcatttattatcataaaatgtgaattatatataaatgtattctgattaaccaataagaaaagaaatttacaaaacagcaagtaatttacatttttaatttacatttttggactagttaatttaaattccacccataaattaaaaagaaattacaaatttatgtctcacatataacataaaccaatcaatcaattatgaaaataaacttgagtcaattaattaattaaaataaattttttttcttctaaacataaacttgagttaattaattaaaataattttttttagaaaggtaaacaataaatatgtaattactataataagtaactaaatagtttatttaaattgttatgatgacgata

SEQ ID NO: 104808 - DNA, 557 bp, Cannabis sativa
ctatgtcagtaagcgtttgttagatgctgagactcgttatcctcaaatggagaagctagcatttgcgctggtaatatcgtcaagaaaactatgaccttatttctaggcccatagcattgaggttttaacaaactaccctttgagacaagtcttagcgaagccagaggcatcgagaaggttgttaaagtggtcagtagaggtaagtgcgactatacaagaacgcaaatatcctagacttaattaaatgttaggtctatcctaagcccgcaagcttacactaaaatgtgaacagtcaactcacatattataagacgcatacgttgctgtatttagtgaatagaaacttttcttcatttattattgtttacgttttttatcctaattattgtaaatcaatgtacaaacggattgacattgaatgcaatccttgtgtaactaactagacacttactttgtatataaaggagtgatccaccatgatatgacacctacgaactccttgcaacagtggactaagcagaccgtgatctgactgaaccactatattccctttgttt

SEQ ID NO: 104809 - DNA, 724 bp, Cannabis sativa
gtagttgttgtactcaacctctaactttttttacctcgctaaccatttttgttatatcattttgtttgcttctcccgcgaacatttttctgtgttggttgttcaggatcaccactaccttcttccatggatggttgttcaggatcaacactagatccttctggcacggatggaccatcatcaccaccataatctaagcacgcactccactcattatccccacctcgttccatgatataaaatcctacacaaatttaaaatcatacattagaatatacaaaaatatacaaattaatagctaaatgtaaatatatcaaaaagactaaatacaagtacgtgtttgatatatgaatcatgtgttgatagattcgttcaaccgtagtccttcaccaccatcacgagatgatatgatatcgtccccaacggtgacatcaacaggtggtggggtgatttgatgaatttggtcaccaagcataagatcatcgccattagactcttgattatcataatctttttgttgcgtcgtcaagacaactgactagcgtgtatctaatggattgctcatcacttgactggcttgggacaccattataaacctatcgaacttgtatccgattcgattcaagtccaccaacttgaattcaaattcatcatctttaacccaattatcactcctaacccaatcacaaagaaaaacatggatttgaaaactactgtaatctaat

SEQ ID NO: 104810 - DNA, 1843 bp, Cannabis sativa
tagtattcagctttatgcgctaatcgtaacttttgatttttctttctcgttcggtaggttttaaacaaaaaattacagttgtttgatccctttctcgtcagaaaggtttgatcaaggcgttataacgattcgatccctcttccgtcaaaaaggtttggtcagggagttataacagttcgacccctctttcatcaaaaaggtttggtcgaggaccttttaaaaagttttcaattttttttttaaatgatgggtttgcattgtactatgtatttccagattacttccggttaatcatacatatatgccccttaagtaattttaaaggctttacgctttataattacttgtttgagagaaatgattaatttattcacaactgaagttcaaaatatttcatcagcaatgtgacttacaatcattaatctcataagaacttccccagttcaattgtttattttatcaatcttctaggagcatctggttttgataaaacgggttttgatgttcagggtcaatccctcacatactcccataattgtttcaatatctagggttaatccctgacatatctcagggttccaggtgaagtaatcctggtcttgtctttgactgctactggttgacgaccagctttccttgtggcagcttgatatggcaaccatagtgggtcaatatctactcacgtcgcaattttattattattagtatttttaaaattgctttaccggagtaactgccccttgtattcttgtgacttgctccctctcgagataaccgaggtgtcccttcctcctacaggggagggttataacccttggtcgctcgagttattgggcagatcgagctgatcatggacatcgtcctgcccctttacatatcattgaaagtgtccttgcgatatgagaccttctatctcatctttcagttggcaacactcttccgtggtatgaccaatatctccatgatattcacaccgtttagttggatcccttttatgcctcacatatttcataggttttggctcgctaaaaacgatttcctgtacatgcgagaggtagatattttcctaagtttcattgagctcggtatcttcagcataaagagggatatatttgatgtgtttcttatccttgggcaaccttttggaatcgtcttttctctttgatcctgaggcttccgaatcaaattctccaatagtatcatgccctggttgtcttctgggcttcgtgacttgatgccttctgaacttattctccaactcgtccattcgcaaatggaatgaaaccttttgctttggactgagttattgacgaagatcaggcttcttcaagttcagatgccctggtagatcactcatgtcgtgactgcggtcgaacattgctcttcctcttaagttttgatttaccttattctccccataagggatggcgcgagtttcttttttatgaacctgaagagagggttggcgatttccgtccgatgttccacatatctcaggttgtgtccccaaattttccttagtttcctcaggttgcatctcctgagagctctgagtatatctctgggttgtcttctgccccttggtttgcgagctggagctgtgaggtttgcctcgtgaatctcttctcccaaggtcaggttgattttgggtatcattctcatgcactgcccttattgcaactatttcacgctctaactcagcattacgtcgacttgctttctccaatcgacggctaagatggcgattttctaattccacgattggtatgtacctagttgggtcgtaggcgccatccttatcaacctagttaggaagtgcccagttgttgtttacccaaggtcc

SEQ ID NO: 104811 - DNA, 570 bp, Cannabis sativa
  modified_base (170)..(170): a, c, t, g, unknown or other
  modified_base (513)..(517): a, c, t, g, unknown or other
atttcagaccctaccatggaggcagaatacatagatgctgcagaggctgcaaaagaacttgtcttgcttagaaagttcttcactggactcggtgttgtccctggattggaaaaaatgctggttttgctttgtgataacactggagccatagccaatagtaaagagcctcnaagccacaagagaagcaagcatatggaaaggaaatatcacatcattagagaatatgtggcaagaggggatgtgctggtggaaaaagtggacacagaggacaatctaactgatccattcaccaaagtcttggcaggatctgcattcgaaaagcaccgtcagaatttaggattaatttaaatgtactgattgttttatattagtgcaagtaggagtttgctgtgttttatacccaaaataaaactccatttcaatgtaatcattaccctttaaatatcaataaacaaacaaaagtattttcatgacttatttgtgtgtcaattggttcatgttatcatttacttnnnnntttgatttataaattcatccaaacccatgtcacatttatattcttgtttattg

SEQ ID NO: 104812 - DNA, 893 bp, Cannabis sativa
atgaaaaatattataatagaattaggaattaatataaaacttaaaagagtatatggaaacatttttttatatatattcttcacaaaattgtattgatgctactatttaaattaagattagcggtaaatgtaatttaataagtaagaggcaacagacaaccaaataaataagaaatttttttaaactatttggtgactatacaaatacacaaccttttgagtgactcctcaccttcaaaattaatgttatttttatattataaatgttaataagatgatatataaatatatagataacataaatcactaaaaattggataaaattttagaaaagaagcttgtggtatcaatgtccttttgaactttttttatctacaatattaatacattaatatgtttcttattatttacagttatacgcatgattaattaatgcatgctttttgaacttctttcctctatgaataagttcacaatttaaatattaacattaacattaaaatttagacttaattgattaattaaagcaattacatatattttttaaagaaaaatagaatattgcactttataataagtacaattttttttaatcaacacgtattaattattattattattattattagaataatatgaaaaattagattaaaccacaatttttttttaaaaaataaataaatattaaaaggagaaaataacttgtaacaaatgatctattaaaaaattacacacatatatataaatatatattaaaaaaattaaactatctatatgataatgttgtgttaaaattagatacgcaagtgcacgtagtcacaaacaagtaatacagtgataagtaatgagtatcgtctccacaaggactgtgaaaataaaatttctattgcaaaa

SEQ ID NO: 104813 - DNA, 589 bp, Cannabis sativa
taaaaatataaatattttacaaaacatggtaacttatgtaattattccatatagggtatatatataagtaaattaaacatattccacttactacacaatccaaatagtgtgaactctagtgtaaagaagtgaatttgcaaagtagttggcatatatgaaatgaatagactataaattaggtaaagttttataggcacaataaatgcaatctaacaattttgcctaccttcaatttattttctgtgttgtgtaagctttttgaattgaatgatgcagtcacaaaaggacatttgaaagcaatatttcagttgtaaaatttattcacttcacagaaaaggttcttttgtttcttccactatgaattaattattctttttggtcaaatttaaatcagaaaaatatttaagccaaaactgcaacatacaaattcgaagaaatcttctactattttatgctacagaaacttactaatacatattaaaactctctaaaaattttatttcatcaatgaaaataaataaactaactctcaactttgaagcttttaaagagccctctaaattacaaccatcaaacttattagagaccc

SEQ ID NO: 104814 - DNA, 2221 bp, Cannabis sativa
aggcatgagtcataataaatctatagatttcaattgaacctactaaattgagccacgtggttgtacgagtggttggtcaggcacctacaaaaactgatataagcagtaggggtttgactaatctccatcttatacaaccacgtgacataaactggtgggttcagttgacaaaatttaagttcgagattttcttaacattaccgtctcaactaaaactcaccaagtaaaaccctcaaataattttacgaacaaacaaaaaaaaaacattatctgtagtttttatgcttaaattatataattactaagtactgagtactaattaataatgtccaatatttatggcagcttatgcatggttgaagtgcctaagaaaagaaggagaaggagaaggagaagaagaagattgctatgaaattatgagagcagcaaatatagttgggcgtagaggaagcatttatggtgatgaagacaagtatgtaagacttagccttgtaaggacccaagatgagtttgatcatctacttaaccaactcaacatcttcatctcacaagaatccacttccaaatctatttaactattcttaaaataataataatattgttattagacatcaatagtgagtgcgaacaataattttccacataataattattaaataaaatatgcggccctcaatgtttaattacactaatttcatttattttcattaatattttggaaaatttgtagtatcatctttgttgatgtagtgtatgttacacaagttcacttcgattcagcatcaactaaccatgcaagaatgaacctaaaatgtattaatcaaaccagaagacttaacacagaaaagagcatgttctgttattttgttatgtacaaaatggtgtcgacaactgtctatagttgaattacatacccttatatagaacaagagagatacaaagacaagagtattaactaactataacggtcagtgaagaactgaccatgactaacttattagaacacgacatctagactaactaactacctatattaattgtcaagacattagatagagaaacaaaaaatgaccgtgtatatgaaataatataaagcaacacttgatttggtgcttaattaaggtgaaaagcatcatctatatgtatagagagcaaattatgtgtcgtttaagtatgaatattcattttttttaattagagtaatagttgagcatgatcgaacgattctttttaattattggaagtgaaaatatatcgaaccgtaaagtacatttaaattttgatcaaaactatgtattttattggattttatacaatttgtgtaaaaatataatttttttttcaaaaaaaattattttgtgagaaaaagtaaaaatttatatatttatatatatggaaaaaaagtgtaaggtaactaattaatttaactatttttcccttctttttttattttaatttttttttgaaaacaatcccatattatggtaaactttttttaaaaaaaaaacctatagaaaaaaattctcaaatatcttgttggactatttttctgacacagtgattaaaattaggagaatcattccattttttaacttttttttttttttttcatttttacggtttaggttgttctggtaatttttatgtgggcatgttatgtgatttaaattgctccattggttgctatatgaatttttgtaaaaatgtaaaataaaaaaaactactttgaaatataaaaataaaaaaatcccttaaaattatcaatgaatttacaagattagacctcctcacccccaaaataactggactatttgtacactttgggtgtatttggtaatatttttttaatcaatttttaatttttaaaattagaaaaataaaaatatttttcaaaatcatgttttataaaactcttttcacttttcaattttttaattgagagtcaaaattttaaaaaatttgaaaaaaaaaaatcactttcaaacttttcttaatctatattttggactccgactcctacctagaccttggaacccagacccgcacccaaaccttgacccaagacccaaaccccgactcggacccagatctcggaccccgaccccagcctcagacccagaccttgacctcgaacccgcaccccagacccgaacccaaaccatgaccccaaccccggaccaaaaccttgacccaggacccgaacccgaacctgaactcagac

SEQ ID NO: 104815 - DNA, 516 bp, Cannabis sativa
ttgtatcatactttataatagcatatacattatacatatgtgcccacataggatttttaatccaacattagcagcttgttggagccattggggcaattctgttatctctagtaatccataaataacaaatgtgtggaggctcaactgaacatctttattaataaattcacttgccaagttgagtttaccacaaacaactataaagagagaacgtaatgtagtgcaatttatcaagtcatgcggcaaggatctcaaatttttacaatattcatcaataatcaacaaacgaagagacttcaagcatccaattccaccttctgccaaaaagctctgttttgtggttaagcaaagagtccttaagcttaccaaactccctatattcttgggtatttcctctagcttcttacatccttcaaaaatcaaagtttgcaaactttgcagcttacaagctgaatcaggtagtctcttcatatttctattaccattcaagttaagatatctcaactgcttcatggt

SEQ ID NO: 104816 - DNA, 504 bp, Cannabis sativa
ttattttattaattaaataaaaatcatttagttatttttttaaaattttaaaattatttaataaggttttttattgaaaataacttaacaaaaaagatacattttgttttaattatgttttatgtataattttacaaattttaaaattatttaacaagttttttcattgaaaatatgagtgaaccactaatatgttgacacatataaacttagtctattttaataggatttaacggattggtagtgataaaagtaccacaaatgtaactttaggtatttaattcgctaaaagaaaaacatgtggtatataagtgtataaaatttaaaacattaggtatccctatgtttgaataggatttaacaaaatagtagtaacaaaagtaacagaaaggataatttgtggtcaaactccctaaactttggagtttgtcatgatcaaccccataggctgaaataattagggctaaactccccaacctttacaattattttgctatgtactcc

SEQ ID NO: 104817 - DNA, 522 bp, Cannabis sativa
  modified_base (172)..(176): a, c, t, g, unknown or other
  modified_base (488)..(489): a, c, t, g, unknown or other
ttttaatttaaaaaaaaaacaatttacttatttagtttaattgtatatatggttatatatgtttgaaaattgcttttgagaatcaaaatccatttagtaattcatcatgtcaaattacttggtatatgcaagtgataaatttataacataatatgattcacttatgtataannnnnagtagttaactcattattgtctcatttattttatgtacaaagtaaatttattatgagtaatagtgacgactacatatatgagatacggtgatgacaaatgacaaccattttgaattagtagttatattggaatgtgctagaaaacaaaattatgttggcttatatttttatgtaattaattttgttcattttgcaaactcttttacatactatcacaaccatagacttcccataatagttacatattgaaaaatcgtgtttttgcaaatgtcaattatatatataaacagtatgcgtctgcagaagcagaanntaattctgctacagcaaaacagaacagacagaa

SEQ ID NO: 104818 - DNA, 2376 bp, Cannabis sativa
tagctgagacatctgcatatatattacaaaatatatgaatatatataattggagaagaaaaaaaactattcatgtattagaaatatgaccaaattcagaacaagagtttttttttttttttacctgatggagtgagttggagttggggatagtttgtgaacgaacaaaataatattcatgcatgaaccaacgagtttttgagtcttgtaataggcgttttccaccacaaaacaccaaagtttttctaacaccaattgcttggttattaagttctgaagccacaatcaacttgtctttattaacaacaggtttccaaaacccacaaccagaatttactctcttgcacatcttattattcaaaatatccatctttttatagttgcaaaagaagtaccttttttccttcacatcacctatatcaaaaccaaaaaaataaaatttaaccataacccatatagcaaaatggtaaaaagcttccaactttatgaataaaaacacacaataataaaagggtatgaatcaaaattatacctggtaaagcccaagggtcagtttggaaaacatcaaattctgaaattactgaagcaggtaatggcaaagcatgaacctttctcttcaaatagtgtagtaaaagttcttcatctgtggggcaaaatcggtatccaataggtaatttaaggccaccattattattggtaccaaaattttgcttttccatggttaatatcaaaaaacactcttatcaatctaaatatatatagagagagaggaagaagaaatgttttgagtcaaataaggaagatgtaaaattgaagcaaaagcaaacccatgtacaagaagaatatatgttatgatatgaaagaataagaagaagaagaaaaaaaaggagagagagatgaagattcaaacaagcaagggttataggtcatggcttcaagaaaaggcatttgttattgtatatatatttacacatagaaagagagagaaagaaagggtaaggcaaaaagtttagcaggagtaataggaaaccttttcttgaccattaaattcaaataagaaactttctatgtgtactataataatattaattatagtaataaaacgttacaaataatcagtaatgacaaatgggaaattaataagttaaaagacaagagattaaccggtaaggaaagttatatttaatattggagttctaatcgaactaggaaaccttatttttttcctttgtttggagaaaaagaaaagaaacaataagaaataacaaaaaaaaggttaaaattagagtgttgacggtcattggttttggttttttgttttggttgtttttttttgttttgtttttcataaacgtgtatgaaaaaggacaaaaagaaagaaaccccacgctttggtcaacatagatgaactcgtgtagagtgtgataagagaccatgtgtgccacgttgtctccaatgttttattaatatttatttatatgtaggtattttttccttaattaatcacattaattctctcttctaattatgtcacttttgacttttattttagtctttttactaattatattttacactcaacatttttcttcatttcttttccttcaattcaatatttatgattgtttcttgaataattcaataccaaaacaaaaagtacgtataaacagattttttttcattaaagaaataactaaaataggtattaattattaatgatcacgttttacaacctaaaattttatttcaaatatatataaaaatattgtggttatatgtacatagtagtttaacacttatatatattattcctctagaaagatttacaaatttatacatttcgttacccttttaatcaaattaattagtttattaattttatgtaaactttttctttttttgtttaatttattagttttctttccacatctccatcttatactttataactcattatttcttttatgtaatatttactcaatttgtgattgaaatttatatgagaatattaattaatgtcaattattgaaaataagaaaataaaaaccatatgtatcgaatatatcagtcgagttctaacaaaatcaattattttttagggagacaacaaaatcaatttatagatttaatatacgtccatccatatatttattttaattttatgttttttggttcattaaatattcttcgtctaaatggattaatataataacgtaaataaaaatataattcattttcaaaataaataatgagcaagggcaacgaaaaaatcaattccaaaaaggaaaaaaactaaacacaaacaaccattgatttatttcccataatggagtaagtcaaccatgatgataatggtaatgatcatcgtgaacataat

SEQ ID NO: 104819 - DNA, 765 bp, Cannabis sativa
  modified_base (268)..(271): a, c, t, g, unknown or other
aaccaacacccagacgaccatcggagatgcaactgaattacaaaatctctgtgccttgctcggactcatgcagagtcatagcaacactctacatcatgattaggatgaattgcgtgctgcaataaatctcgcatttgatgaacaaaggcgtatgttcgctgaatggagagacaaagagatggaggcattaagggctcaccatgcagagatcgaagatcgtagtcagcaagccaccgtgctaatacgaagagcctaccaaactgtaggnnnncaatcgccgaacgtcattcccctgggagaaacggaggatgagccaatgatgaatgcttcccatacaactagtggtcaaccgcccaatcgccagtcacgagttccgctcgtgggccaagaggtaggcgggcagaccttgtccggtaattcatcaggaggagccatacctaacggttccaactacaataatggcgttattccacctctcaaccaagtgaatcagtcactaagggaaccaggttcttctgtgttggataggttgggaacaacccatgacctaaggaacaatctaaacagaagaaggggaacagacgagcagactactacaacgatcgtgcagcctggagcccatactcaaatccctgctcagaaagatgctgacgtaatccaagtcgaccagaatgatgagcaggtcagcccagccgtacaggctcagcttgaagaattgaaaaatatgtttcacggcatggttggacagcgtaacaatgatcttga

SEQ ID NO: 104820 - DNA, 529 bp, Cannabis sativa
  modified_base (468)..(472): a, c, t, g, unknown or other
ttgagaaaatataatcatgatttgtttatagcctggaatatattttatgagaatttataagcgtcacataaatgctgcaacaaatgttatttatttggagctcctgatatagttagaatttgaaatatgccttatctaaaaattctagaagaatttaatacatgtcttaagtgatataaatacaaagtcgcacgaactatatgacaaagatctttatatgaaataaaaacatgtaagtaaattattatttaaaaaacacgtatggttgtctatgcaatattaattcgtaaattatacgttgtgatagactcttgaagaatttttaattatattataaatgattgaagaacaaactttaatatatttctttctatatattaagaaatattaaatgtatgttttttgttcattagtagagaagtcctaaagtagttcatattcataaaaaattatagatatatgatcatnnnnnatggaaattaagatcatacaacaagaatggaacaaatatatggtcttagagtaccat

SEQ ID NO: 104821 - DNA, 1291 bp, Cannabis sativa
  modified_base (26)..(46): a, c, t, g, unknown or other
atcatgattatattccactgtgttgnnnnnnnnnnnnnnnnnnnnnactatatgttctagatttaatagaatttatatatgaagcatgtaatcatgaaagaaatcatgtgaacaatgcaacataaaatgatttctgatcttttattaattagtaaatctgattacattgcaatgtattttatttaaggcataaaatctcaatactctaatggttgcactaatttggtgtagaatattctacttttggtacaagaactccaatgattcacactaaatattccactaaataaatatattttacttaaaagatctcacattttatattatttacaataataaaccaaaatagctaatttatgatataataatattgtgactactagtaaaaatttagaatcttaaaataacttagtaaaatgaaatatttattaaatcaattaaacattatacatttttttaaaagagaaaacttcaataaaatcaaccctaatgtttattaaattattattttacttaatgtttatttttatttatgttgctctttttaatttcataatttagtgttatattatttttattttatttaatactagtatttttgttattgttacttttgtgataaattttagtttgaggagtaaaatataagattaatttttaaaataaattaaaataagggctagaatgtcaaaaaaaaaaaaaaaacaaacaaacaaaaaaatttaacaccaaattggtgtagactgaacatccaatgtcgttaatattgtagaatttggtgtacgccaatttagtgtaccattagaatgaaatagtgtgaatattccaaccaatttagtgaaatggtgcaccattagaaatgctcggatgatgttagattttaaatatacaccaatttattgtaaaacttttttttttggcatttaaccttatgttttatttttttttaaaaaataatattaatattaatcttagtcctcaaattaattttattataaaaataataattaatttagaacacgagcataattgaaaatacaaaataataataacaaaaatactgatattaaataaaataaaaacaacataacactaagttataaaactaaaaagaataacataaataaaaaaaaacattaagtaaaataataattaatagtcaaattgattatttgagtttcttagccttaaagaacatcaaaatattggctatatgaatttaaagtattttgagaatcttaaatattcttgagatggttggtattgttattgagctttttttttttttttt

SEQ ID NO: 104822 - DNA, 573 bp, Cannabis sativa
gggtaaaggtgaccgtctgacttccattctaacggtcatgaccacctttcatgattaacggtcaccccaacggtcatgacattacatattcttcattaattcaatctcgacatttttgtgccacatgttgctacttttgacacatcatcgtcgttaaaatttaggtaaacacacacccttaaaagagatgcactgatgcaccctctacttgtttcagcattcagaagaattttttagtctaattttttcatattcgtatatgttatagttatttaagatatttaatgtcgcccaattagttacactgcggtcgcggtagtaaacagactatatcgtatccactgggaggtaaattaccactaaagattagtataaatagaatatgttagaaattggaatgaattaaatataataaaatgatgagtgagagagagaatgatcatataaagagcttggtagggtagagatgtagttatgcaaatcctattctaataccgatattaattcagaacgcagttacaattctacaccattaattacaactggaagatatatataataaaagcgcaaatt

SEQ ID NO: 104823 - DNA, 1850 bp, Cannabis sativa
ttagggcataaaatcccaacacccttgtagacatttatgggctacaatgaaaagattaaacatgagaagaatacctaatactcttctcatgaagcaatggagcataaccgcgaagacaaatctccacctacattttaaccaccctgcacaacaataacaacacatttatgagatggctaggtttggatccctcagttcactaacttataacttgactttctatgcatcaaaatcagaggattcgtataaccgtgcaaaggaagagattgaacggctaacactaatgtttaaggaagaatttgacttgagttccaatttggaaggagagatgccacaacctggaagatatcgtaacaaccccaacattattaaagaccccgaagttgtgagaaccaagggtatgggaaatccaagggaaggaccaaacggggagcagatcccaagaaactcaagacattatcgcatttgtcgcttatcagaccatgattatcgtcggtacccaaaccgtcaacaaaataatggatctcaggggcaacaatctgcaaacaatcaagcaagatctaactcattcaatgaccactccaacatgtatttccctgacccgcctgcctccactcaagagtcatactatagtgattcatattactagctattttttccattaatgttttaacttttatgacactaatcattgcttcaaaaattctagttttatttacttcatgttatgcttggagtgtttaaggtaattatctcatcttgaacaaatttcaattttattattgatgaacaactaaattattttaggtaaaaaaatcaatcttataaggtgaaaaaaaatatttctatggtaatttttaatataaaaaataattaaaataaaacaaatacaccaatgtaaaactcaatatctaacaacacataatttcatgagttataatttttttttcttaccaatgtactacgaaacataaatgaacgtactcggtacgtgatataatgtactcaactaccatcgcacaaacatatagaagatatgaaggaatgaaaggacgaaaataacctcactccgacaacatagacccactctttgcaatacgtttgtactattaactactccaaacagtaacttcattctaccttttcgtaccttaactaccacagacagtaaatcgattgtccttttttattttttaattaaaaaatcaaattgacaaccagtagtaaacaaacctacaacaactggttgtcaaataaataaataaattcaaacacatttttagatatcgtgggaggtgggacccacctaccgtacaacagattacattatgtgttttctaattttggacacaaaatcgactgcctatatatattatttattgtacgtgactagtcacgcaattgacactgtacgtgatttcatccatatatattatcatttgttacaaaatacactcaacactaacattttttagtagatagtagtaaaatttggtattttaacacttcatataattggatgggccatgagctaagcctaatattctggtgtggcccatgattgggaacttcaagaattattgtgagaaaattatattgtttatttattttaatttttacttctatttttatattttttaagatatgctaatttttataaataatgttattattacatttttttatttaatgtaaactatatattaagtaaacaaataataatagtatattaagcaatccattcaaaaaataaatatattttaataaaactagaagagagttacgtggtgagccacgtaaatattagttttattttaagttctaggggtttttgtttaagaatttagtga

SEQ ID NO: 104824 - DNA, 1708 bp, Cannabis sativa
tagggcacaaaacccaacaccccaagactgggtcttcctggggcttgcattctgttcatgcgatgactcgatagatccctaaggacccaatggttctttttcgggacgatgattgattccttcttgaggattattatctttggtgtcatccatcacttttatgtcaagaggcttttttctgagctttttcacagaggctcccaatgaaagcaccaaattgttaacgtagatttttgttaaccgaatttgagccacacgatgataattcaacacagaaaaaataaaagctatagaaaaataacatatgaacacagggtttcttacgtggttttgcagttaacattctgcatagtccacgagtcaatcttattcagatttctgagtattctttttagggcctctttcagatgagttttttttgtcccccccatccttgatcttgtctgccactatttataattacatagtggacagtaatttacaaaagttgacaataatcattacagcaattattccctcaaatcaggggatttgattacaaatcaagctaaataaatgaggtttttacacagctgtgaatatccaacttttattgggccgagatgaatgcataattaaagatatgcggtaagccttatcccatagggatgcctcgccgagaatggagccaagttaaccttgatggcgagcagttgcttgtcatttgacttcttgggactagtattgttttaactctgataactatattttttgatgtcgagatgatcttccttgcatgcataccatcttctagcgagataaatgcctcgctgtcttttatcttgattcccagactatctatactcggtttgtatatttgataatatacactaagtgtttttagtgttgttgtttctctttcacacagcgaggttgaggcctcgtcatgcacacgtgcacccacatgatttctcatcaatacataagttagaagttcatacgtttctgtctcgcagaagcctattcagccagccgagttataaacatatcctgtgaattatatttccaacgagttgttccatgctaagtgtactttgcgtttgcgtgtttgagttcttcgttcttcccagctcgacacgtgtcttcctctaatgtgcttaccaaattttgggtataacaccttgctgcaacatggagtgacagtgaagaggaaaagaattctactgccagtgaaagcacagatgaagacaaacaagtattagcgttcatggcccaaagttatcactcagttgagtctgaagatgatgcagtttccactacatcagaaggggacaatgtgggtagacaaaatgcttacgaggagatgtttgccaaatgggagtacatgactaaacagattagaggtctaaaaagcaccttggagcaagtggagactgagaaaggtaagttagaggacacagttaagaatcttaatagacttcttgatgagaaggagaatgagatatataaactcactgcagatttgattagaactaaacaagcactgcaatttattcccccaagcacagctgctatcaatcagaccccacaactctggaaaccttatggttatcgtacctccttaggttacaaaatgttgtacaaacagggaaacgatttgtctgtcgagaattcactcacctcaactgtcgatctgaccaaaaaggatgatgagaaaccagacatccct

SEQ ID NO: 104825 - DNA, 578 bp, Cannabis sativa
tcagacctgtccgagcttcctcccggagactccttggactaagcagcttttggggtagaggggtttgcagccgttagctcctcagaaagatcaatttacctccccagcaggcatcttttccttagaagaggacccctcaccgcctttagacttcttggccggaggagaggcgctagagcttccgcccattctcttcctcagagcgtcaagtatctgctgagacatgtctgtacggaacgaaaaataacatggttagaaaaaaaaacagacatcagaaacataaggcataacagtcaagaagctcaaaaacaagacaaagtagtatgcagggtgactgcccaaacaagactcgaaagtccatcatcacctgacatcgctcttatttcagacacaacgactttccctttttcgaacacgggaggggacggtcgagcaggtgagatgggctcccttacgtgaattgcatgttcaacaggcttgggcagggccggaagtttctgttgggttttgtgccctaaataaaactcatttcaactaagtgaaatgagtactcgatcatttatctcgtttggttaagc

SEQ ID NO: 104826 - DNA, 546 bp, Cannabis sativa
catttgaatgatctatggtgaactttgtttccctccaaactttcctagctgtagtacaattgaacatagcatgtccaattgattcccatgcattgttgcataatgaacatgtagcagagttgacaactttccttcggcaaagtgcagtagcaacaggtaaagcattttgcaacactctccaagcaaaaattttgatcttagatggcaaagtaagattccaaaaaattttccaccattcggaatgagcagaagaaccacttgattcattcccttttgccaaattttctgctcaatggaaccccgaattgactgtgtacataccagtcgttgtatgagccaaatgtaacggtcatttctaggaaaataacataaaggaatggagactattctatccacatcaatcggctggaagtgttcacgaaggagaggcaaattccacactctttgctctgttatgaaataagaaacgggcagatttggagggccagtatagcttactggtgtgaaaatattattaccaggaatccacttgtctacaccagctaa

SEQ ID NO: 104827 - DNA, 1160 bp, Cannabis sativa
  modified_base (97)..(98): a, c, t, g, unknown or other
attgttcatcttatgtagttataaaactctttatctttctccccctctctctcactatatctaaaaatatggataatattattatatatatatatanntatatgtatatatgtatatatgtagtgtgtgttttcatgtgcaagtggcacttcacgcgctgcaagaccaatatgatttcacatgccaatgtatgcataaagctaggcatctgacaccttaacgctctattatttacattatacctttctctatttatataaccaaagaattatatatatcttatcttatttaattaatattattataccctttttctcttctcttctcttctattaatattgcttttctactatattattattatatatactactactcattacaactactacttgtacaagagactatatagctatagcttgtcaaacaaaaaagtcaacctcttttttaggatttgagttgtgtatattttttcatgcacgttgtgttatatcctttttatgatcaagaagaaagtgcatattgcaatcgaagcttatatattttctttattagcacatggccacaatggattatatatattcatcaagaaaccaaaccacttttaatttctcgtgattactactcttaattgacttattactcattaattataagtacatgttactaaataattattaatatttatatatgcatgcttatttatttagattagcctaattgcgtttttgtcttataatagcatgaaatccatgcaaatttgcatcaaatgatatatacgtgactactattgaatactgtatacgtacattagtagctataataagatttaactgagatatatactttatatattagctagtagaaaatacatatatatttatatatagtactcgaaactcttaattaatcaatttgtttggccccgccggacccaccctcatcactatatagaaaataacattcagcaaaaatttgaagtactctacctaatcacaatatctgtatatatatgtacataacatacatatatatcgtatatgtataattgagatattgttgagagaataatattagtaactttattaaatatttatgatgatatataatattgatgtgatgcacctaccaatcaatagaagcgtacagccgtactacta

SEQ ID NO: 104828 - DNA, 525 bp, Cannabis sativa
ccatatggtatatgtaccctttacaattaactgtccacccatctagttgctcaccatcctggattcggttccaaataaatcttagcttttcatcttgccactgacgttgcttaacttgttgatgtagtactgatgtagccactatgttagagatacaagctacttcttccccttcatagtattgcaagttataatcacccattgtgattgtccttttccagtccacaagagccaaacatgccaaagtactataaggctttctactaagtgcatcagctactacattagctttctcgggatggtattgcaaagtgaaatcatagtactccatatacttaacccatcttctttgcctcaagttcaagtccctttgagtaaaaagatacttcaagctcttatgatctaagtatagctcaaatttttatgccatacaaataacatctccaaattttaaagataaagattaccgcggcaagttctaggtcatgcatagggtaattcttctcatgtggtttcactttttga

SEQ ID NO: 104829 - DNA, 932 bp, Cannabis sativa
tcggagagttccacatcattatcaccagtgagatacctgaacaccttttgacgatcaaactccacatcagtagtctcaattcacataggcagatttagagcctcagccacatccttcacagtaaaggaataccagtgtcccttgacaaatactttgccaaacataaaagagtcctcatcgaggcactcatgagtgatgttagcataaaattccttcacaattcgatccacatagccatcaaaacaaatcaaagtatctacccattgtctttctttcaacatgttatagatcccaaatggcttatgagcaatgacattgaaatttttctcaatagtaaaattcctattctcataaaatttcatgtctctaacatgatcattataaaaaaaataatgagaatgaggcttgaacttttcaagagtaataccagagggcctctttcttttctgaggaagaaaagggcttggagagacaatgggtctttttgctttgtccttctttggaattgtagcagggacagcaacaagttctgcaatgataggttcagcttcaggttcttcactttcagacccagaatcatcagtagagggttgttctttgggcacaaaatcttcacttgaatcgaacataccctctgattcgtgatccccctcagtttcttcttcaggttcagaatccgaagatgagacagaaagggtattttccttgagacttttggccttaaaagatgaatacatcacctttttccctttggggacacttttgggcaaaatcacttcaggtttttaaggagtggataccttggaccttgtacgagaactcacagtgggcaaagacactattgctttctcgacatttggagcaccattcgaggaagaagacttcgacaatgtgtgatcggatgaaatagatttatcatgatcaccaaaccc

SEQ ID NO: 104830 - DNA, 1425 bp, Cannabis sativa
catattgcgaggcaataggcaataaaagcaataaaaagttttgagtggacaaaagagtgcgaagaggcctttcaaaacataaaaaggcttctcacaacgcctcccgtttcggtaaaaccaataacaggagagacgttgtttctctattcatccatctcaaaagatatgattagtgcagctatagtgcgagaagagggcaagcatcagcaacctatttactacgtaagtaaaaggttactaggggaagaatccagatatccccctttataaaaactcgtattgtgcctagtccatgcgtctcataagctacggccatacttccaagctcaccccataaaagtgttaaccgattagcctttagacaagttttatcaaaaccagatgcttctgaaagattgataaagtggtcgattgaactggggcagttcgatataacataccatcctcgaacatctatccagggccaagctttagccgacatcttgatagaaggtgtaactccagaagaaattccacctgatcagcgagatgtggaaacctggaattatatgtggatggcgcatccaacgaacagggttcgggtgccggggtaatattaatatttccaaaaggctttaagtttcactatgctctgagattcacatttgacgcatctaataacgaggctgtgtatgaggttttgatcgtcggtttaaagatagcagaggcgttgaaaataaaaaaatctcatttgttatagtgattcgcaactgatcatgaaccagatcctcgaggaataccagcccaaaggcttaaaaatggcaaagtatttagagaaagttcggaagaacttggaaagattcgattacttgaaaatcgaacaaattctgagggaacaaaactccatggcctagagaacaaattctggggaatacaatattattgacatggattacgctcaatgaagggggagaaatacttatcctttgtgtaaagtggtgcatttgttgtttggttgtttaaagtgtttgcttttctatttgttgagactctgttatattttgattgttgctttgtttttcactgggaggttttgtctggagttcgtattgttagtgttagtccacgtgaagaaagatattttaggttttaattgttcaaatggtaacaactgtctatttcgggtttcttggtttagctgggtataaatacaacttctcggtattatgttgatgaactttttaatcggagattagggattacgtttctttctttttgttcttctttatgttccatggcaggtgatctttgagcttggaggtattacttcaaagttgcagatcagagctcgaaatgttgagttcagactgaagggatttcagtatcatcttcatcaccagatctgaagggagttcagattgaagaagtgttgaagagagctcatca

SEQ ID NO: 104831 - DNA, 592 bp, Cannabis sativa
aatagtatcaatatccaatagactataaagacatatatattagtgaaatatataacacctcaaactcaacaccccaattctataatttctttttttttttcttcttctttaaaaacaaatcccactttattaaagttttgaaaatatcttaaatgacaaaattgaatttttttcttaatcatcatacaataaataactttaagtaatcaaactatataagtacataaaccctgtaaataaatagagtgaaaatgacaatcaaaactgaaaaaagtgaaactttgaatacctctttggcaacatgagttgtattgaggaccactagagttgaagcacctgttttgatggaatatatgggaccatgaatattggcccaattagtaaatgtcagataaggcttcttctctttcaattgcagcaaattccctatcacaggtaacccaggaacccctacacaaacaacacaacaaaacatccaataaaaatccaatctttaatcacaaaacaaaaaccccattaaaacaaaacaacaaacacttactaggcacaggagggagtttggagaattcactcttcttcttagtggaaaaga

SEQ ID NO: 104832 - DNA, 588 bp, Cannabis sativa
gggcgggttgcacttaaattttagcaacccgaactttagattgggttagaaaatatatagaataaaccgcccaaaccgaccgatgtacaaccctaattacttatatacaagtgaagttgtcactaattaaattttaatcacaatgagtattgtgagtaaaatcacatttagtcacaacaaattttgatttttgtaattaatatcttcagtcacagattttttagtcacaatatcaaaataataatttataattagttataatttttttacttttagttacaaattttgttatgactaaaaataaaattttgataatatatatactacatattatgttacataaaataaaattcaaatttaaattttttagatttttgaataattaattaatatatgtttcaattactttcaaaaaaattaattaatatatattagtagatcatcacgtaattaattattatattaaactatatttaataaataattttatgatatatacatgttaaagtatcaacaattagttcggtatatttatcacttatttaagtatagttttttttatgaaaaatattttattattctaattcc

SEQ ID NO: 104833 - DNA, 573 bp, Cannabis sativa
ttatattttcctttcacaaatgtcatattttaattctaactctataaacgtcaaatctgtctatttactaattacaattaattatcaaataaaattgtaatttaacttatttattaacttgaccttacaaagtctcttaattaataaacaaaccctaaattttctttttttttttctcaaataaatcattacttagtaaaaattcagaaacaagacatagtcttatttagaattctaattgataaattaaaactaattaattgagtctacaagacaatatgatctcaactagtgttgggaccatgggcctatataatctagctccaaataagtagttctaaaatttaccaagtaaattctctatcttattaattcctcctgactccactataggtactcctgattagatagaacactctattcaccaagaataaatacgctataaattatctattgtttcaatctaaataatcaaagattctctatagatgatttacatcgagcatggaaaaatttatcgttataccccttaatgtattttatccttaaaatacttagcttcctataaatgat

SEQ ID NO: 104834 - DNA, 963 bp, Cannabis sativa
gaaactttatacaaaaagaaggcaggttcatttgaaacatttaccgaattggagcaaggaaaccaattggatagggcaaacctcataagaacaggatattgataggtgagttgagacatatgcattgtgtcagagagttccacatcattatcaccagtgagattccgaacaccttttgacgatcaaattccacatcatttgcctcaattcccataggcagattgagagctttagccacatccttcaccgtaaaggaatactagtgtcccctaacaaagacttcgccaaacataaaagaatcctcatcaaggcactcatcagtaatgttagcataaaattccttcacaattcgatccacatagccatcaaaactgatcaaagtatccacccattgtctttctttcaacatgttataaaccccaaatggcttatgagcaatgacataaaaaatttctcaatagaaaattcaaattctcataaaatttcatgtctcgagcattatcattgtaacaaaaataatgagaatggcgattgaagttttgaagagtaataccagaggacctctttcttttctgaggaagaatagggcttggagaaacaatgggtcgttttcctttgtccttctttggaactgcagcagggacaacaaccggttctgcactgacaggttcagcttcaggcacttcactttttagacccagaatcatcaataaagggttgttctttgggcacaaactcttcacttgaatcagacacgccctctgattcttgatcctcttcggtctcttcttcaggttcaaaatccgatgaagaaacggaagggggattttctttgagacttttggcctttgaggatgaagacaccacctttttccctttggagacacttttgggtagatacactttgggtttctttggtgtggataccttggacctggttcgagaactcaccgtgggcaaggt

SEQ ID NO: 104835 - DNA, 799 bp, Cannabis sativa
gtacaacaactaccagcagcaatactcagcctcggctgtggataagaaaatagaattttgtttcttactgtgccaagaaaccaaattgtttcctagaaagaaacaatctccacttgtactttttcaatcttcagtattgcctgcacaatctgcatcactaaaacaagctaagttagaattagtatctttagaataccagattccaaaatcgagagtactattaacatatcgaataatcctctttacagtagatacatgagattccataggattactttgatatctagcacaaacgctcacactataactaatatgaggacgactaggtgtcaaatacaatagactactaatcatactacgataaagagtagtgtcaactttcaatccattctcatcttttgttaatttcaaagtggtgctcatagcaatacttacctgattaggcgagtcaaggccaaactttttgacaaggttcttagaatacttactttgtgaaacaaatgtacctccttccatttggttgacttgaagactcaaaaagaaagtaagctcaccaaccatgctcatttcaaactcatttttcatttgatcaacaaacacctgcacttcatggttaaatgtagaacaaaaaactatatcaccaacacagatttgagcaatgataaaattagattttatatgcttgatgaaagagttttatccactctaccactttaataatcatgagaaattaaaaattgagttaatatttcataccatgcacgtggagcttgtttcagaccatacaaagctttttcaa

SEQ ID NO: 104836 - DNA, 918 bp, Cannabis sativa
tttgcgctgcagttatggtttgcatttttgccaaacaacgctgtgcggtttgcgatttgcaattttgaatttaataatttttttcatataagaataaatatatgtaatatatgtgtccaatcaagacttgatgattagtatatatgttatgatgttaaaacttcagtaaaattttttttttgtattgttaaaacttcatgagattgatttttaaatttttactataatatttgataatgatgatagtgtaaatcgctgagactgcactgcaccataatgtatttttacggtgtagtttttgcagttttaatatctagcagtgcggttgcggtttgaagtttgaaaaatgaaaaattaaaaattataaaaaccaaaaaccgcatattatgcggtttggtttgaaaaaaaggttacaatccgcactacccgtattgcgaacacctctacctggtgcaacattttttacttttgtgtcttctgagcgatggatgaaactgaatataggtgttttttaagattaacagtgatgttgtaatctttttaatcagattttattctagattttttcttcaaacgatctagaaattaggcggttgattatttgactcatttttctaattctaattctgattttgtctcatatcccgattgggttgctattaataaaattgcatgatttattaaaaatactcttcatttacatatttaattaaatattgataaataattataatttaaaagtatttaaatatttttattgattaaacacccttgccaaatttcttttttattttcaaaattacacatcttaatgaaactcttcaaaatttactaagtcaactttaatcattctaattgattattaaatcaataaattagaactttctaatgaattaatcaagagaaatgtaagtaaat

SEQ ID NO: 104837 - DNA, 613 bp, Cannabis sativa
cagccacaaaatctgccaaagcttatccttttattgttgtacaggattaaaaagttatttcgtattgccctaactctatggcccatttgagtagccgtctagaagcgtcaggcttttgcaaaacctggcgtaaaggttggtcggtgtacacccgagcaggataagcttggaaatagggccttatctttctcgtggctaagatcagacagtaagttagttttgcaattagggggtaccgaccctctgcctcaactattattttgctgatgtaataaactggatgttggacattattctcttctcttatcaacacttcacttacagcgtattcaatgactactaggtatatccataattcttctccatccaaagattttgagagtatgggaggcattacgagttacttttttagttcttgaaaagtgttttcacattcctctctctattcaaacttcttgttacctcagaggatgttgaagaagggaacacacttgtgtgttgattttaaaatgaatcaactgagtgcggctatccgacctgttaggctttgtacttccttcaatttttttggcgacttcatatccaagatggcttgaattttctctggattagc

SEQ ID NO: 104838 - DNA, 1767 bp, Cannabis sativa
taatagtgttttgtaattatttttaggatcccggctattgtaactttttgtttgtaaattttaaattattacaagtttattttcatttcgtttgttattaaagtttagcttccgcgttaattttattagtaattccatttacgggattagggtttcttaagtatcttgggtagcgtgcctaatagttagggcgttacagaatctctcaacaactttgaggaaataaatcacccatattaaatatatgtaactacatttaaaattcaaatttaattaaatatttatcttttgaatgaattaattaatcaaaaaaataaatctagtggtgcccatcattatccatatgcacctatcaatgtataataacacagtgctaggtgcaaccattcacttaactagtctgtttacccaaaaaattgcttaatggggtggatgctatttttgacttgtaccataatggaaataatctcggtcctcacatcccaggatagggcattgatacctttacactagggccacctatgtaagcaccaagatctaacaaagtcattcttatgttctatccttcatgtagacatcctagagcttaacctgggaccaacattagtgttgggggcctaggttgacatcctctgcgtcgtcttgcatcagttttggttcccaacagcttcttatggggaatcttcttagccattgttataggatagatgagacacattcccaatctaagtttcacactttggagacaagtctagaaaaaatggcacctaggcactataaagccctaatgggcgctaaggttagcagttagtcgatctagggacaccgtgactggggattaggtttttagggacatcgttggaccctgattcctcaaatccatcacggaacaatgcctagatttaatatttcatcaatgacatctttaaggatttcattttccaactataggcaccaaggttgacatttcaacctgggcaatgatttcgttttattgggcgaagcccatgcaaatttgaaaaaactgaaatctgttgagtaattttcacccaaaaaatatcaacgagaaatttgttttagatgtttttccccacctgagtgccaagtgcatgccaccataggcacccaggtttacatatttcaacttaaggttttttggaacacttttctgaagaaatttcccaagaatttacattatttcttcccagtatggagatacaagtgcttttgagaagcaaacaataccatctaggccctagataaaaagctgggcacccagcataccaagggttgatgccatgggcgccaaggtttacataaccacattgttcctaattttatcgatccaattgtgattttgtctcaacattattctcattttactctcaaaacaacatacgagacatagaattaggagaaaatgtcatcctattggtggttcagctcccatgtaccaccagacacaccactaggcacccaggttgacattttacttggggctcattgttacatccatcaaaacgacagttctatttaggttattggtcttattttgccccaaaaataagatttaatgcttctgcaaagagaaatctcttgtatatgtgtacattgcaagtccaccaacacccatgtacactagtgatctcccggtcgtcacctagttgtcactagtgattaccttggcataacatgtgcatatcaagtaaaatttccaaagagaatccatcgaagtcaaagaacaaactaagaatatctatcacatca

SEQ ID NO: 104839 - DNA, 618 bp, Cannabis sativa
ggcaagcatggcttggttaaaatgttaaagatcgaaaacccaaccccccaataaattttgattgacaaatctccccagtttttccaatgaagttttgcattatcccccgatgaaccccaccagaatttagcaataagggactcaatttccttgcagagtttagttggcaatctaaaacaggacatggcataagtaggaatggcttggagaacagctttaatgaggggttccttaccagctctcgaaaaccatttatgatgccaagaatgaataatgttggagactcgatctttgaggaaaacaaaagcaggatacttagacctagacaaacactgaggcaaacctaagtatttagtaatgaaaggcttatcttccaaatgaaaggtatcaaaaaagagacttctgacctcagaatgagtattgggggaaaacaaaatagaggacttattaaaatttatcaattgtccagaagctttggaataaagtgtaagagcttggtttagggcagcacaagaggtagggtcagcagagaacaaaagagagtatacctatcatatcagcaaacaaaaggtgagaaatgggaggggcattcctagcgatcgcaagacccctaagaag

SEQ ID NO: 104840 - DNA, 530 bp, Cannabis sativa
tatgaacaactcacattgagtaaaatggtgaatacaccttagagtaatgttgattgcattaagttgattttctttcctgactagtttgtttaacaggaataactttactatttattgcacactgatcatttgagagtgtttagaggagcataaacaggttattgagaatgcaccaaaatagtaatatcatttgactatctaaaagttaatgttggttattgaaagagagttggaagacctaattttactctcctcagtttattcaaatagtttagttctggggttctttcaaagagaaatcattttaatgtttttatagaaaatggttcaatcttattcttttttcaagaaatgctttaaaaacttgtaaacatttgatttaggctaccctgaaataaaaacaataatgaaattctttttattttaaaaaacaattaataatgcatataattaaattggaataaaaatatgagatattatatttgaattaattaaaattattattattatatttaattgtatttgtatat

SEQ ID NO: 104841 - DNA, 601 bp, Cannabis sativa
atttctaaccaaaatcaccgggcccaatattttatttaaaaaaataatggtatcctcgatacccacatatctcaatataatctccgtaattaataaattatgctttatatgtcattacataaactctcggtagttaccctaagtaagatcataatattacttcgttaccaaaataatcacatatttaataaaatatgtctattcaaatattatttgttttctgggatattacaacccatcaagtcaggttcaccaacagacttggataaacttttaactttgaatttaacaatgtccggagtagtgtcactagagaagaattcatcaagcttcaagctcactctctcaacagatgttggagagatgtttcgtaattttaactacaacaacaacaaccaaaaaaattatgcacataaatttgaaaaaataaaataacaaaaaaaaaatggaaacatgaattataacaaagatgtaccaaaacaacagtaaaacaacaatagaaatagtgtaaaaaaacaacacaagtacctctttcaaagaccgattgaacacgaggctcttcatgacatccatttttatctgaccatccttatcctttggt

SEQ ID NO: 104842 - DNA, 760 bp, Cannabis sativa
  modified_base (255)..(263): a, c, t, g, unknown or other
  modified_base (700)..(704): a, c, t, g, unknown or other
caaacaataagaaggagaatccaataagaaggagaatcgagctcgaaggagaatcgagctcatatcttggtcgagctcatatcttggtgtcatatcttggtgatactctgctacagaaaggatataagggttagagctctgagcggaaagagtcatttcattccactgcaaccactgtaaggtttctcatactttttatgtgtttattgtcatcattttagaaattcatattaggatgttaataacatacttgtnnnnnnnnntagatcctggtaaaagatattccaccagatgggtaggaatttaactggccaatttttttcttggtttggggttgtgttttggatgttgtttgacacttggttttgggtgatgggcaaggatttaattggcttgttcttccttgtgtttgggatctggtttttgctgatgttttgctagtttgggctttctctggtttggattgtgtttgaaagttgttctaattgctctaccacaacaaacaaaaatgggtcctcaaaggaggttgggtatgaatcttcgtctatcattaaatatcttgaacctagaactcgagatatattttacggtacgttttgccgattgtgattttgatgagacaagtttcttaactttagggggaggggaaaagaaattactttatatggaatgcacaatctgttgggattttatgccctannnnnaacccatttcaatataatttgatttgttatctatagaagattagaagtcatttatg

SEQ ID NO: 104843 - DNA, 614 bp, Cannabis sativa
attattattagtattattaattagtgcgtgtgtgtgggtgggaaaaaaatgatatgtatatattaaatagtaatataaataaaaagtgaggaatcagtttagttagtttaaaattcaaaatataaattatattagcataatttttatctgattagttagatttttattttaaaatttaaacctattttacgatatctcatatatacgtatatactctacaaccctagcagccagatagtatcgtattctcatcatctctcaaaattttaatcctctctattgcaccaaatcaattgttctaatcttaagagcttcggcgtcggcaaccgaccactcttatctgatcatcgttctgtgtcttcgaaatcttcaggtaaattcgtagttgtgtttttattttcgttttcagagaaataggctttcataaaactaccatatctctctccttataggtccgttttcagtgatctaggtaccgttttaaagataatttaataatctatattttttaatgaaaaactgttttcttattctgattatttcgatgtcgaaaaattcatgttttcatgctggctgttgaattacagtttttaaaatttctttccaatattgcc

SEQ ID NO: 104844 - DNA, 608 bp, Cannabis sativa
  modified_base (494)..(526): a, c, t, g, unknown or other
aatttaaaataagataaaataacccaaaatttaaaataagatagataattaagcaaaaaaaatagatatttatctattttcaagttcaaattacactaatatcataaattaattttaaaatcccaagtaagttaattctgataattagaattgaaataggaatagtaaatatctaaatacaaaactacagaaaaaaaaacggaagttaattccatgaaatagtatgaaaaaacaaagaaaaataaaaaatttgtgggctgtacggatggtatgttgttgcatacacatccacgcgtgccagaaggggatctggccgagaaaactcagcgctggagtgtcctagcatgatctccgcacgcagaatggggtatgacacacccctgtgcgtgttgctaggacaaaatcttgtccgaacacgcatctggccgagtgaatgggccatccgcgcgtgcgtgggataggtgatcatcttatcttttttcaaatcttcaaannnnnnnnnnnnnnnnnnnnnnnnnnnnnnnnnagttctgtaaaaaagtaaattacttagttttttccaaactatccaataaaaataattccataaacgaaaattcaattatttt

SEQ ID NO: 104845 - DNA, 796 bp, Cannabis sativa
tcttggccgctgaaattatttcaccacgatctcaaccgttgcagtgtgttgtcacatcacatccttatcttctgattccaaaattaaaagataagaaatcgagtggtttaatcttgcccgctgaaattatttgaccacgatctcaaccgttacagtgtgttgtcacatcacatccttatcttctgattccaaaattaaaagataagaaatctagtggtttaatcttggccgctgaaattatttgaccacgatctcaaccgttgcagtgtgtcgtcacatcacatccttatcttctgattccaaaattaaaagataagaaatctagtggtttaatcttggccgctgaaagtatttcaccacgatctcaactgttgcagtgtgttgtcacatcacatccttatcttctgattccaaaattaaaagataagaaatctcgcagtttaatcttggccgctgaaattatttcaccacgatctcaatcaatgcaatgtattttcctttcctatataatctcacacttctcattcaatttgatcacatctcttcaacatattttctaaatagctatattttcttaaaaaatgtcttccattcgcggttcttcttactcagtagaggaagatgtgcacttgtgtcatgtctatgttgacatttctcaagatcaaatcataggaagaaaccaattagataataatttttgggcaagagttgaatcagagtaccacaaagatggaaaatttagtaataaacctcgcccagtaagatctttgcaaactcgaatgtctactattaatag

SEQ ID NO: 104846 - DNA, 536 bp, Cannabis sativa
aatgctgctaaaaagataaaaaaaaaatagaagaaaaatatgagaaaataaataaatatttataaactcaaattccaaaatttttaccaagcctcttatctatattccaaaatatttatcactcttaaaattttgtaagataattatattttgtacggttatcattttttatcaatgaacaaatatgtcattagagtttttttgaaacaacgagctttcttcttcctttgctaataatggttttcatgagaatattttatgtgtgatctattataacgatgagatgatgcagtgataatagagttgaagtaatggcctacatgtttttcttattattatttttttcttatgtggcaaagtatacattcttataccttagtgtatatttagtaaagttgctctttaagatattttcatagttaatattatttatctcaaattctgaaagttgaggtagaagaatataactatgtgtttttagagatattttaaatttgtgttatatgattattaattattttttaaaataaataaat

SEQ ID NO: 104847 - DNA, 799 bp, Cannabis sativa
agagagagagagagaaagaagttaaaggagatttggtgtgtttggaaaaagaaaaaaataaatagggaagaagaagaagagttagaaaaatagtgtgatgagttagaaggtatagattaagatgaaaatgaagatgattatgtgcatgtaatggttgaagtgcacgtgttaaggtgatagctaaggtttcgacggatggaatggaagaattgaaggtgtaattttggattttcttgcatgaatgctctgttctcttctcttctcttctgtattatattatattatataaaagttgagtttctattttgttgaaacgtagcacgtagcacacacttctctcttcaagacacctaggcctacctactacctagagcattactattagaaatcaataactaagtggtgctagcattatcacaaggtgtccattttagtctttttcttttctttctattaaattaaagagtattattgagatagtcgctcctaattaattagaaattaataagtaaaataattaaaattcgatagtgatgatcacaaaaactcactgcaaagagtgtgggatgtgaattgaggatatctattctatataaaaattgtgtctattataacaaaaatttttatgaaaaattattgggtgacttctttttttaaaataaaaaaataataaattattagatattgtcacgtaaagggtcatcattattttgatatttagaattagttaaattttaaatattattttaaattaaatttgaatattttgatagtttaactgttaggctatttttagcct

SEQ ID NO: 104848 - DNA, 613 bp, Cannabis sativa
attcaacccaccagccacttaaccttcacttgccaaattaccaaaaggcctatagtacttaaacttaagctaattcaagcttaggggtaaaatgatcaaaaactataatctcgctcaaactcattattctattcatcttcaatatttatcccactaagagaaatgttctagacttacccatgtgattcaaatggccatccatcacgttttctgtcgtcgtcgagcaaaaatcataaaaattacatatttcatatatcatacaattaatacatctagagtttaataaaatattcagaattgagaaattataactatgatgcccatttctaaaaatgggacccacaattaaataaattcataaacatttataaaaatatcaataattaacgctaattgtctttactaatctatattcaaaaatacggtcattacaattatccccccgttaaaaggatttcatcctcaaaatctaacctgaatagctctaaatattgagtcctaatgtcagattctaatttccaggtggcttccttcaccttgttgttcctccagagcagtttgaccaaggctatggtcttgtttcgaagaaccttctcctttttatcaaggatct

SEQ ID NO: 104849 - DNA, 562 bp, Cannabis sativa
  modified_base (28)..(32): a, c, t, g, unknown or other
  modified_base (210)..(217): a, c, t, g, unknown or other
ataggatattcaaggatttcctcgatannnnngttattgtatttatcgacaacatccttatgtactctcaatcagaagaggagcatgagcaccatcttaagatggtttcaacaatgacatcgagagcataagttatatgccaaattcaagaagtgtgaattttggctatcttaggtatccttccttgggcacattgttagcaaagatggnnnnnnnntggatccaggaaagatagaattcgtcagagattggccaggatcgaaaatagtgatagaagttagaagcttcttgggtctggatggttattatcgtcgtttcgtagaagggttttccaaaatttagcacccttaacctagcattttgtatggaaaaacaagtgtgaagcaagctttcaggagctgaaacaaaggttaatcacagctccaatattagccctaccttctgacaaagaaaagttcgtggtgtattgtgatgcatctagacagggtttggggtgtgtactgatgcaggctgatcgggttattacctatgcctcccataagttgaaagattatgaacagcg

SEQ ID NO: 104850 - DNA, 575 bp, Cannabis sativa
  modified_base (244)..(255): a, c, t, g, unknown or other
cgaggccaaaatctgtgatggaggttcgaagttttctccgattagcagggtattatcgacgttttgtcgagggattttccaaaatctccatgcccctggccgaattgactaagaaaaattagagatttgtgttgtcagacaaatgcgaaacaagttttcaggagttgaagcaacgtttgataataacttcagtgttagctttgccatcagatcaagagaaatttgttgtttattgtgatgcatnnnnnnnnnnnntgggatgtgttctgatgcaagctgacatagtcatagtttatgcctctcgtcaattgaaggatcatgagcaacactacccaactcatgacctagagctttcagctttggtttttgctcttaagatatggcggcattatctttatggtgaaaaatgtaagatttatactgatcataagagtctcaagtacttttccacccagaaagatttgaacatgaggcagaggagttggctggaattggttaaagactacgattgtgagattctgtatcaccctaggaaagccaacgttgtggcggatgccttgagtagaagaggtccc

SEQ ID NO: 104851 - DNA, 627 bp, Cannabis sativa
  modified_base (186)..(197): a, c, t, g, unknown or other
ttggtattctatttaaaatgtaggatgttctcttaagtgcctctccccagagtgattctggtaaggttgaatgactgatcatactccttaccatatctttgagagtatgattttgtctttcgaaaataccattcatgctaggcgatcctgacatagtgtactgtgggacaattccacactcctctnnnnnnnnnnnnaaaggtcctggacgttgttcacctaatctgtcatatctaccatagtactcaccaccacggtcagacctgactttctttattcttttgctaagttaattctcaacttcattcttaaaagatttgaacacgtccgagacttgagacttttcatgaagtagaaataagaatgcaatctatgaatgatacaaaatattggtgaccattccaagaagatgtaggaaatggcccataaatatctatatgtatcaactctaagacatctatatctctttttgcacccaatttctttgttttggtctgtttgcctttgatgcattcaatgcaaacatcaatgtctgaaaaatcaactgaatttaaaattccattagacaaaagtcggtcaactatatttctagagatgtgacctaaccgtttgtgccataaggaactt

SEQ ID NO: 104852 - DNA, 512 bp, Cannabis sativa
cacaaatccaattacattgtggctttccaaacgcatcctaaaagtcatattgaatattatgaaacatgcatatggagcttatttttaatctaataaaattggagtataattttaataaataaacaaatactcaatttaatagttttatttatattaattcattgttaagaattattctatatatataaaaattctatgcactgctacgaaataatattttagtcaaattttttgttatatcatataatttatatagttatttaagacattttacaaaattttaagaaatttagaaaaatttaatacgcaaaatataaaatttaaatattgggctgcacacgtgattattttattttatacatgtatgaaatagattgtttaaacactgctttctaactatatcataaattattctgaatttctcaaaaaattataagatatcttaaataactataacatacgccaataaaaaatcggactaaagagatgtagtatcaataagtttatgcaac

SEQ ID NO: 104853 - DNA, 509 bp, Cannabis sativa
tacaaaggtacttctaatcccataaactatttagaaaaaaaattaataatattatggaagtggatcaggtacctcaactcgctaaatgtcgcattcttccgtcaacgttggaagaaaatgcccacgattggttcagccaattgcctgaggcatctatctcgacatgggagacctttgtcgacctattcctcacgcatttccaagccacgatgacctataggccaccctataccactctggctaatatcaaacaagaacctggtgagtctttacaggactatttcaaacgctttaatgctaaggtaacaaaagtagagaaggctcccgagtcttcgctagtatgtatgttgataataggtgtcctactaagaaccgatttctggaaggaactgcaagctcaaagacctgaatctttggtcgagctctttgccatggcagagccgcataagaggattgagaattctttggctgagttagagaagggcaaagataaacgtaagtcaccagtg

SEQ ID NO: 104854 - DNA, 539 bp, Cannabis sativa
agaccaagacccaggacgcgaacccacacccagagtctgatctggacctagactaaaatccggactcaaacccaaactcagaccatgactccaactccgacaagagctcaaacccaaactcgaactcagaatcgcaaatggaactagaacccaactaggactaggacaaggaccaggacgtaaacccaaactcgaacgtagatcaaaacataaacatagacctaaacaagaaccgagactaggactcgaacccgaacctagaccgcgacccaaacccacacaataactgcgacctggacccagaatgaggatagggaactgggaaacagaactaggaccaggacttggtacctgacctagacccgaacttgaacctaggacccaactcgtgacccgacactagaaatggaaccagattgcgacctgatatttggatccggatttggacaaaaggcttggacaaaactcgtagtcggtgtttggatttggtaaacagccctggacccgaaccctgacagggacccgaacccacacccgga

SEQ ID NO: 104855 - DNA, 648 bp, Cannabis sativa
gtttttgccatagtactgtcctttttcattcactttgagtgccactctttttccttggtccatcagcttggatatttcattcatctgagtagctcctagtgtaggtatcggcctaggatattctgcttctaggtctgaatctgatcctaaacctgagttggccatatctacaccattaacaaacaaaatttaaagttaactatatatataacaagtaatttatacgaaatattaaatgcataaacaaacattatgtattcagcataaacaaacacaatataaagtaagatatatatcaagttaccaattagatacattttcttttcgttttttgtttatgtttgcctgaatcacaattgacccatattccctcattgatatcgtttctaatgtattcagcatcgtctttcttaaggttacgataaattcccataactttttgatgaattggttgcccaacaatgaagtcatcataacataaatcagcattctcctcaccctcttcattctctaagaacctcctctctcgtgtcgataaaacaacagagatgaatggataattcttgcttcctctcttacttaaatcaaccaaagtaaaaccaagctcgtcagtttttactccaacattgttgtcaacccaagaacatt

SEQ ID NO: 104856 - DNA, 702 bp, Cannabis sativa
aaagggaagacagagataatcagttacttgaagagcctattggcactcaagggagatccgagaaggcccaatgtagaggcagagccacagccataccccgtctctccaggagatgagttcattcttcccaatgacgacagacctaatgatgtggaagatgtactccatacacctcagaacatgtcgatcacgtccattggagatacgcaagattcagaggtacaagttttagagaccgttccaacacctgtggagaagagaccaaagaaaaggccaaggtggtttgacgagtacaccgaaatgaagaagaagatgaagccatcgataggcaatgtgaatgttgacccacttcgaccggttgatgagaagctactacataatttttgaaattagttggtgggaaccatcggaaacaagtatccgagggaagtcttcaccggtgtacatggggtgacttagttccagagaagctaacgaacaaagagaatggctttttctaatgatgtaagtttattaactaagtattatgatttgttatttactgctttttaccgttgttatttgttttattttttttagtgttctaatgtggttgtgctaacttatttttaggtgttgtgaagcatttggatgcggctttccatatgatgaggaggctgtaacacttcttcccagagttgtacccacgtaagtgtactgtca

SEQ ID NO: 104857 - DNA, 665 bp, Cannabis sativa
agaccaacatcttgcacaatgaaatgtataaaccctctctccctcttccactgttccacatctacgtctattttatggcaaaaactctcttccaaaattaattctctaacaacaaactatcaacaaatagtacctatacaacaaaatcgaagcccttaattttctaagtttgtagaaaattaatatagcacaaaatcctaaaattataatcaacaaaatataattcttataaacaccgtaaatatatgatgtaaaaaaaacaacatagcacacgaaactatactcatttacatatcaatgaactaaacttagcccttggaagattagagaatatatatatcagatgaggagattttttgagaacagttacctttattaactctcacgtgcttcttctccccacttggtcggcgataaattttgaagctccgaccctttaagctttctctacaccatcgactaagaagacaaagaagatgagaagaaaatgcctttgagtgaagttaggagaagaagaagaagaataagaagaagaagaaacaaaaaaaaaaatgagaagacactactgcacctacatgtactagaatattcaatatcagccgttagatcgatcaagcacacataaaatcaaacggtacacattaaatgcagaatagttcagttag

SEQ ID NO: 104858 - DNA, 1143 bp, Cannabis sativa
aatcacatggttgtgtctttcctaattatttgaaagtcacatgagaaaagaaaacttgttagttgaaggatccattaggtcatgtgatcaaatatgttcgaaaatggtttctcttttgctgcataagtttagtatcaagtggggtacccttgtaggttgctcacctggtgatgtctatacatatgtcacagtcacaagacaaagccatgtgaagtttcaaacttcaattgcttatgtttctctgcaaataccaaaccaacccaattgcctaagtatgcgtgagaatcattcatctatatatacatgcacattaccacaaaactcaatcatcaactcattattaacaaaatcatctgtgctctaaaatgaaaactcgaaaagaaaggccaacatggtatttgaggtcacattctaatgttgaagaagctacttcaaagacgataaacattcgaataggctacactacttgtctacactaaacaagaattaaacatcaagttctttatatgaaatgttgagctgctgatcttatgacagaataagaaaatggaaaaaagacataaatgacttcaatcaaatggtccattcaaggaaaagaaatgcaataacatttttgttttgtcattcaatttgtctatactcataatttgacattcaaatgagaaataggattgatcaatgtgtgtgtgtatgaattttttcttttgaaatggaaagaagagatctaagagaaaatgctaaggaacctaattatgttcctctaaaatcaatgtccttggtaagatatgatttggtatacataaattttcttaaatccaaatgaatattgaaaactagagctaagttgttagtggggtctagtaagaagcatagtccttgaacaatcacatggtattgcctttccacttatccataattactcaaatagaggaaaaacaaggatgatcattgatcaagatgagttacttcatcatgtcacaatttcattgtcgcaaatcttatagcacaagtgggctataatgttgtttgttctctaatagatgacttggaagacaatgccatgtgaacttcaaatgcttatgtctcttgcaaatttgtcaaaccttatcaaatgtctgaagaaccacttattttagaagcctt

SEQ ID NO: 104859 - DNA, 883 bp, Cannabis sativa
catagatgatttctctaggaaagtttgggtattcctattgaaaaataaagatgaggcatttaatgcctttgtcaattggaaaaggctgattgagaatcaaaccaagtgcaagatcagaaaactgagaactgataatggttgggagtattgctctaatcaatttgatgaattttgcaaagaacatgggatagctagacatctcactgttagaaatatacctcagcaaaatggacttgctgaaagaatgaatagaactctcattgagagagttaggtgtatgttgaaaggtgcttgttggataggccatttccggggtgaagctgttaagacaacttgttacctaataaataggtgtccatcagttcccttgaaatttaagactccacaagaactatggacaggtcatgcacctaactttgaccacttgagggtttttggttgctcagcctacgtcactacagacaagacaagttacaacctagggctctaaaatgcatgttcctaggctatcatgaaagagtaaaggggtacaagttatggtgtctagaaccagggtataagaaatgcatcattagtagagatgtggtgttcaatgaggaggaaatggcaatgaaaaagactgttactgctactacaccagaaaccagcaacctaggagatcaaattgagatggacactactcaatctagttctattgaagaaacagaaactgccaagaatgacattactgaaactaccactcaatctagtctcagctctcatcagcttgctcgagacagaaaggagaacaacaaaggcacctgacaagtttggttatgctgaatttacagcttatgcacttagtgttgctgaagatgtggagagtgatgaaccttcaagttac

SEQ ID NO: 104860 - DNA, 785 bp, Cannabis sativa
  modified_base (723)..(734): a, c, t, g, unknown or other
aagatattatttttattaaaaaaaaaataaggtggtatagaaaaaaattacggtgttttccagaatacattattttcatatctcaatcattcaaaagaatatattgttactattgtatctcacttgttgtctcattgtatctcacttattttcatcacgtatctcagccattatcattatagtagttcacttgtagtagtcactattgtatttcccaaatctatatcttaatcttagattttatctcgaattttaaatattttttttaatatttttaaaacattagataaaaatcattagtttgttccgttattattaattaatatgttttaaaaaatagattattattttttaaatatcttaataaaaaaatataaaaaaatgtgatattttagttatgagaaatgctaaaaggcaaccaatcgtaacatgtcaccgctttatgtctctacttcatatatatagatgtagatttatatctatatattgattaatatatgtatatgaacgaacacgattaattatatttgatttaagttttaatattttttttggaatttatttttattttctaactttgttttaaaatattttatatttttatagaaaattaaaataatagtaaaatatcaatttataaatttatgcttttttatagaaaaattattaaaataatagtaaaatacacttcaaaaaacaactacttttagtgacaactttttnnnnnnnnnnnnaattttttgtgactaaatgtaatttttagtcacaacaaaaaactacttgtg

SEQ ID NO: 104861 - DNA, 701 bp, Cannabis sativa
tagaaacaatttaaatcgaagccctagtttttattaactgttatttcctttatttatttatttatttgcttccttattccactagttttcttaatttaactttctttcttaatttttattcagccaaatagaagtaaaagtttaattttaaagtacctaactacaatctctgtggggtcaacctcactctttgtgagtttattacttgttacgacacgtacacttgcgtgttgaaattaccaaaagaagtttttggcgtcgttgctggagattgttagttaatattaattaaattaaattttgttctaatttgatttttttcaattttagtactaactctgtttgtttcaagatcttattttttttttcaggtttactagtttatgagaagtcaaggctcaactggcatattacctgttgatcctgaaatagagaaaacttgtaaaaagaatagaagaaggaagaaattggaaagcgctgcaatagagattgaacaagaagtattcatggctgacaacgccattaatgacaacaatgtaggagttttagaagactaggctaatggtcacaacaacaatgaccgtagcctgagggactatttgctgcccaacttgacaggagccagatcctgtataaggccacctgtcgttgatgccaacaattttaagatcaagccaaccatactgcagatggtccaatct

SEQ ID NO: 104862 - DNA, 1224 bp, Cannabis sativa
aaaaaaaaaaaaaacagtaaaattaatatatatttttttgatcagagaattattagtgaaatatttttaaccactaatgtttatatatatacaagtatatactaaaataattaattacacacgtacttaatagtgacatgcattttgatgatcaaattaatgatcccacacacacatattatatacattgttgcacagtgaatactgaatattcgtttagtaaataaaacaaacacatattatacaaattagcaaaagccgaaaataagaaaaagtaaatatatataagaaatacattaaatatttttgtttgaatgtttattgaggaaagtattactacctggctgatcatatatcatatgttatgactatgatatgagcaacacaagtgtaataataacataacaagaattgcaaaatgttcatactactttaatttccactagctaaaaaagatattacatcctcttcaaattaaatccgagttgttatcaccaatattggagggtatcaaatatcaacgtcaaagactgagataggtctaaaactccaaatattatgacaccaaaaaagccaaagaaaacaaaatcataattaatatatagaaaggaagaacaagtagataaaaaagttagtctatggatctaaaaagcatcggacatgatcgatctagcttttaggatagtatactccaaatcatataatattatatacatatatatgccctaaccaaaagaagctatatatgtattattaaaaaaagaacatcgtgaggatcatgtatatatatgtttcaaaaagaaaaaatattgaatagtattaatccgatttatagtatgcaaatataattctttatcaacgtgatcatgatcaattatgtcattaattacaaaatatttatatatatatgtcgatggattgatacacttttctatatgactactaaaaacgatcatcattttaagaactttgctacaatcaataataatagaggccatgaattagtataataacttttacaaattcaaagaaacacggaactagctaactacaaaaacttcttacaagctagctagctagtatacatactttctgtgtaactttcccgtttcaaattttcattcgacatcttttcatgaatttataactcttatacacacgtgcgtacttattttaaatcgaatcatttgaaaaatggcgggcttaattttaaaagtattagca

SEQ ID NO: 104863 - DNA, 1157 bp, Cannabis sativa
tttatgtatgattaaccggaattcatctggaaatacatgatataatgcaaacccacaactttatttttttaaaagtttttgatcaaatctttctaacgagaaagggatcaaaacatcttaacttcatgatttaaaacctgtctgacgagaaaggaaaatcaaaagttataagtgagatataactcataactcgcgtgcgaaggtgaatattaacggctcgcacaacataggaaagtattaaatgagacatcaaggtgtcttggtaaaagtacttaaacctagtatatggatagataatataactatttatataagcaatcaaaaatgtacaaagtgataaaatcattaaaagtatgttcaagtttgcataagacagattataattgttattgcgacgtagattataaacagcccacgcacatagtagattactaactacttaaattggaaaattacgagcaatggaaagacccaagagtactctgcatttgatcaaaatataattgtttacattgtgaatgaaaatgcaagcaaacataaaaattaagttcgaatgtaaaagtacaaagcatttaagataagaaaaaatctaagttggccagctaactttacaaacttgtctttacaaaaatgccaccaggggcaaaccattaggcgattttcctaaacaaagaatacgaggacgacaaggttcgaggagaaccatctctggacaaatctagagaattcgatctggtgtgctgacccaatgagatgtatctcgacaactctcgcagctgagacctcattcccagctttgggtcttaggctgacttgaggatttcctcgcataagctttggtcttgagccatttggattctttagtggaatctgagacttcatcagcttggactattttcttcctagatgtctcgtcggtttgggatgaacctttgagcattctccttaaatctacgttcattcttgtaaagacaaaaacgaaaaaatcaatgaagcaacaatggtggtatatatataaaaaaacattggatttacaaaaaacaaaaaaggagttcagactaggccaccatttacaaagagcgatgcttactttcgaaaatcccttgtaagaatcgcttgtattgattgacagtttttttcttggtttggattgattg

SEQ ID NO: 104864 - DNA, 1043 bp, Cannabis sativa
ttttcttataattataatatttaaaattgtatgatctcaagaacaaattattaatttatgtattttttaaattgaattattaataaaattattattataaatttataatatataatttgaattaaaaaaatattaattttttataaataaaaaaaatagatttagtgacactttttgtgagtagatgttacttttatagtctaacaatgtttgactctaaaattttatagtgacgcttgtggagtgaatctaaaaggatttagtgacccaccgtgaagggtcactaaataatgcttttccagtcacccacattagtgacacgcggtgaagtgtcactaaatagctttagagtcattcaacataggtcactaaaactaatttttctagtagtatctattccctcaaactcccacccttttccttaaccagcctcagcggttcctttttgaaaatgtttggctttaaaacccaagatgggacaaaaacatattgaatttctagaaatcctttactgatcaccaaaatccaattcaccaattattagatatccatgacaattgtgcccaaaacctttaaaaatggagccacaaatcttcattctaattcaaaaagtgtattgaaagacactctagggagctcgagctggaccgtactggtcaatcctggactgaagataagattaataggattaagtgtctttagacctaactggacaatatcttgctcaatgaagaaatttattggaagcagcgttccatggcaaattggctcaattatggagaccgtaatacgaaaattttccataaatttgcctccaacaagaaagctagaaaccaaataaaagagctcctggacactcaaggaagaacacgcttggaagaattagaaatcacggggaaattaaaagatattttcgtgatctttttacaacttctaacccctcaatcgaagtcatcaacaaggctttagctagtattgacctgactgtcagttctcaagaatccctcatgttgcaaaatcaattcacaggggatgaagttcaa

SEQ ID NO: 104865 - DNA, 672 bp, Cannabis sativa
catagcatggcatagcatttatacaactcatatcactatggtaataaccctagctattaaccgctcatgttagggtattaaccctaatcccggttaccatttacccacatatatcatattcaacataagcgccaccgcgcatactctacgtgctaatcactgtcttacctgatgtcctgcaatagtagagattccaaatccacgggtgctcctgacaaggtgccagtaatcctagtcacaataccaggatttacacaaatagggttaatccctaaatccacttccacaaaaatataaaattggcattcaaatcacagataatcacatagagctcgaaaagagctttccaactggataaagaaagtcccaaatgaagtcccgagccaaaagttatggcaaaaactcaaaaaaataaataatatgccattatcatggtcacaaccagacctatgatagtcgcgaccactgggtttaaaaacccagaaaacccacttttcagcctcaaaaattatgctcaaacacacccaaattcagtcaaaagcatgcagaaccttaaaatcatattccacaattataactcagcaaaacagagagttaaaataccaatctcatgcattaaaacttagattaaaatcaaacaattacaagcttaatcatatccaaccaaagctc

SEQ ID NO: 104866 - DNA, 682 bp, Cannabis sativa
aaatagcacttatctgggcctaccgtgcacaatgggaagaagtaagaatgctatccttggtttcctcaaggataaaatgatcaagaagattcaaagttgggagacaaggttcctttcgaaagctggaaaagaggtcctcataaagtcagtagctcaatcccttcctagttatgctatgaatgtttttcttctcacaaaagaaatatgttctagccttgaggggttaatggctaaattttggtggaaatcacaagcaaaagatacaacaaaaggtgtttcttggatgagttggaggaaactttgccgacataaggatacgggtggtcttgggtttaggaacttgagggattataacttggcttttttgggtaagcaaggatggcgtttgcttaataatgagaattctttggtggcacaggtttacaaagcaagatatttcccacaaggcaattttcttcaagctgagttgggtccgaatccaagctttatttggcgaagtattttagaagctaaagatctcatcaagttgggtgctattagatcgattggtgatgggaaaactacatctgtgcttgaacatccatggctgcctactgatgacaatcgatttattacaactaaccatccaagtctcattggtcgttcggttgattgtcttttccagatgggatcaagacaatgg

SEQ ID NO: 104867 - DNA, 538 bp, Cannabis sativa
tattttaatactaaatatttgttaaattcaataaattattggtgatagtccaaactgcaaaaattgcactgcatcacaccatattttgcggtgcgatttccgtgattttttagttttacggtgcgggtgcggtttgggaaattggaaaaaccgcatgtgtggattagtttaaaaaatgatcaaaaactgcactacccgcaccgcgaacacccctgatatttttttagcacacttaaaaatataaaaatacaaacaaatatatttataaattttttgattaatatttatttataattatttagttctttttaagtattatataattattaaaaagtaaaaaaaaaaaattagtgttgtctatagtgtccacctaaatatggtgggacacgatagacaaatccaaaattgatgttacttttgtcgtgcggttggagtgatttttgtggaaaatctcattattaatagtttttgcaggcccattggagttggccttataaacttattcacacatatctattgggaaatttacatggtatac

SEQ ID NO: 104868 - DNA, 775 bp, Cannabis sativa
atattgaataaagcttttaaacaactaggacagaagagaatagaagtatgaagtatgaagagtaatacctatattttcttgcgatcgagaatgatatttgggatgcgagcaataattggccagtcctcccctgtctccctttggactcttggtcttagcaatggacaacaactgatgtgaagatcagtaagagaagtgggtagttctttgggcaagcattggagaacatcacaagaataaatatccaacatctcaagggaggtgaggtgctgaaaggccacttcatcaaagtgcatcaactttttacatctgccaaatgtaatcttctttaaactgatcaaaggggcctgcatgagttgcggtcttgggagtaataatggtaatagtacctcactgctatatattgaaaggtttgtcaatgaaggaaaataatctcctaacaatgtcactttgagtctctcacattcttcaaaatgaagattcttaagccgaggaaaaactccgccttcaataaatgaccattcttcgaattcaggcaaactgtaaaattccaaggtctccagagatctaaagaatgactttgtttgtattacaacagaagaagaaaaagaagaagaaacaagactagtagagtaataaaactctgaatctattctcaccaaaccattataacgcataattttaaggtctttgagacatggcagttgtcccaacgacggcaaaaaactacaattattacaatcaaaaatcgtcaagcttactaaattagacaagc

SEQ ID NO: 104869 - DNA, 1193 bp, Cannabis sativa
tagactaattttagcctaacagcagccttagttcgggaagaggagaaaactcagcatcccgtgtactatgtcagcaagtgcaagataggagcgaagactcgatacccagtgattgaaaaactagtttttttgcctccttatggcctcgagaaagttgagaccctacttccaagctcacccaatcaaggtattgaccaaccatccgctctggcaagtcttgcaaaagccagaggcatccgaaagactcctaaagtgggcaatagagttaagccaatttgacttgcactacattccacgcatttccataaaggggcaggcgctagcagacttcatcatggagtgcaatgaagctgaagctaccgcaaacatacccacaccatcagtcccagcgtggaaggtatttgtagacggagcctccaacgagaatggatccggagcgggggtcaccatgatatccccgaacggacttcgactccaagcagccctacaattcgacttctcagcttctaacaatgaggccgaatacgaagccttgatagcagggctgagattagcaaaaactgtgggggctaaaacggtagaagtctatagcgattcacaactggcagtgaaccaggtgtcgggagaatatcagacacgcagagaaagaatggccgcatatgtagcaatagtccaggaactgctccacgagtttgcagactataaagtggaaagaatccccagagaaaagaatgctcacgcagactgtctggctaagttagcttcagacagcgaaatcgagaaactgggggtggtacctgtggaacgcttggcagagccaagcatcaaaataaaagaggccataataacggtcgggcaagaacccacctggatggtccccatcatcgaatacataacaaaaggtgagttgcccaaggaaaaggcactatccagaaggattcagtatcaagctcaccgttatgtgatgatggccaaaattctctatcgaagaggactcatcatgccttatttaaggtgtgtatcggaccctgaagctaagcaaatcatgctagaggtccatgaagggttctttggagatcatacaggaggaccaagtctctcaaagaaaatattgagacaagggtatttttgcacaacaatgaaaaaagattgcatagactacgtccaaaaatgtgattcgtgccaaaggttcg

SEQ ID NO: 104870 - DNA, 4046 bp, Cannabis sativa
tgaggagggtgttgcagactcatccaggttaattcgatggtggaatggagtatggaatcttgctatgccaccaaagataaaagtttttatttggcgtatgttccatttgaagttaccagttgcaactcaacttatctcccgaaaagttcaggtacctcgttgttgttcagaatgcagagaagaatctgatgaaactcctgagcatgctcttttctcctgctctactttgattcctatgtgacactggttgggggtgtggtcggtgctccatcgatgtgtacatggaccaatgcaggaaatcctcatgtttctctttgataggttatctcatggtacttttgaattgatgatgacaatcgaaactcattattatttggtaataagcagtcaagaccagatgttgttccagatttagaccataatcctgtcagagttcaaggccggagtcttgtcggcggggtcttcatttggggttcgacctagcacacctagttgtaaaccaacctactagatggataccaactcctcctaattcctttgctttagcgactgatgtttcggtggttttaggtaggggttttgttggattgggaagctgagcgttacgggatgctacatgtgtggtttcgttggtgtagtcatttggagtgatatgtgattttttttattaatgtggtggagctacttgctatttgtctgggcctgactctcgcacatcgttatggttttagtatctctatatttttttttgaataaagtatctctatattattaacagtgattctactgtggcaattggttgcattaataagcttcagttgaattttagttttcagtcaattttattagatattttttctttattagctcctgttggtggtggttattgcagcgccatttcacgatcggcgaatgatgttgcccacatactgacaatctctattattagtttaggggagtgtgtttggacaaatgcttgtccatgatttataagtgcttctgtaacatcagattttatcataataacttatgtctttctttccaaaaaaaaaaataacaataataactaccatatactatagtttaactcaaaatgacaatttagtcaatttaagcattccgattacgttacctcataaagcaaataacataaatcagtattattctatttccaaataattttagtaaacaacatattacaaagattgattctaattattcttcatttatttagttacatttctctattaatttattctgattctgaatactgtgtagtaaaaaaatagaaaaatagaagagtgatatatttttttattttatttttctcttttttttagatattctttttttttttttgaataactttttttagatattcttaaatcactagtaatcctatgttcttagttttcttccttagagagttccactcaagtcaaacacttttccttattaattaggcaaatatcacaacttaacttaccacgagtctatccatctcatcattggtatagtagggactaaataaaactttaacttgataggagcgttttttttttggttttgtgttgtacctaccttattttctataaaatataatatgctaaaaaatgataacaatggatacaaacgtagtattacataaggtaatgataaaaaaatttaactttaatatgttgaagtactataaaaataacattttattgataaatatcacgtttagttacaaatctaaaattcatatgtatatttatttatttaatagcaatgctctaataataaacctgcgatctagtttattaattataatcttgtgtattacaatatcgatctatataaatcccactaatttgctattacatatgattgaaaaaaaagagtattataataaatgctattctaaatgaaacaacatttaatttcatgattattgtaattattagaattgaaaactgtcgtcgtatatagaagtagtgcagccatcaaaaagtggatccaatgaccattgtgtagttgtaattgcagtagaattactattagtatcatcaaattcaaggttatgatgatcatcaacattaatattcataaaaaggctcaacaacttgtctctttgcacttggatctccatgacttgagctgttacggtctccagttgagaattgagttcactcaccatcttttgcaaatggaaaataatcccagcacagccataaacggggtctctcactctcgctgtggcttcgtacactatggattttactgcgtcatctctattagtctcctccaccatctgatcattcatcatcatcaatctcacaattattaattaattaattaataatcatgtatacacataacataaaaatatatatgtacctggatcattttgatgatgttactggctccaaaaaccttgtgaacgccagcaaaattctcgatctcttcgggcggaaaataaggcgaaagcacgcaattgttgtcgcatcttcgccgtagcattctacatgctgcgcacggttgatgatggagtcgagcgcgcgcgtttggaacttggtcggttgattccatattattagataaactaataatatgtacttgaagctagctacatgtacagatattgtactaacacatatatatactaaatatagactaaagtaatttagaagatggattggtttttaatttggggtagaagaagagagagaagactagaaattcaaagattatgtgcaagaaagttggggtgtcggtcacttaaggacatattataaggtgatgaagtgttgaaaaaattggggaataccgtatactttaaggcttaagttgttaagtccaatgtagcagacctaactacgtactgtagccccacttggtggggagttattctattggaaatctaacatgtatcatacaaactcgtgggaaatgctagctcaatccactcattacatgtgtgaaattaattaattattctggtgaaaaacaatattcaggacttaatttttattgtatatatacatatataaaattaaagagatactatttggtgggaaattttttttatatttataattattatacatatgattttaattaaataatgtggcggcaaaaatatttcatcttacgattttattacagttatataattttttagctgttaagtggcaaataaactcattaagtgaacgttcagaaacgcgtgacaatatatttttccaatttatttaatatgtggtctaataatatattgtcatatgtttttgaactgacacttaatagccaaaaagagtacaacagtaataaaatcgttaaataaagtacttttgtcactattttttaaattaaaatcatatatatgtaataattacatagatttaataattcaagcgcttaaatgattgattgaagacttgtaagattattattcaaaattcaaattgaggctctatgtaggcatgtgtaccagtgtagcacttggaataatggaatcaatgggacatttcgcacgctgattccattttattccaagtacaacaaatttctatataaggttactttaattacactcaatatacatatgaaactttatttatctctcttccatttgaatctcactaacacgttgttgttatattccttcatgtgtcaaatatgtaatcaatcaatactaaatagtaaatatgtaatcttttcttttttggcttattatgagacttgagagtgctctaattaaagcaaaattagttgctccattttaatgttacattcaatagaaaggtctaatcactagatcagtcattgtttgtttgtgaagataacttttatggtagctcagataatttgcagcctttctatgatgagcttgtcaagtatcttttccttttgctgtaaaatgcagcaaaagtggaagaaggaagctccttatagtacagtgcccttgatatgatatccatatgcatattcttgccagtacaattcaacaacattccccaactagtagcggttgttgaattatgatatttcttttattccccttt

SEQ ID NO: 104871 - DNA, 724 bp, Cannabis sativa
acctctatctacctacacttaacaattgagttttatgcacttattaaatctatttatatgatccctaacatcttctccttcaaccattattaattcatataactacttcaaatataatctatcagttaggtattttgacatataaagctactctaactttttccataactcagatggacatgtttcatttaatacactatactttaattcaggagccaaacttaaacgaatagtgcttaccgctttcacctgcaactcctcctaatcttcatcaatcatactctcatgcttcttttcctgtagtgcctttaggagcccttgttgtaccaacacatctttcaccatgctctgccataaagtgaaattgttcttcctatcaaagcgctcgatctcaaattttgtggaagaaaccatctttgaaattttccgcgttaatctaaactttggctctgataccaactgttgggaaaaacaataaacttcaagtgcagcgaaataacaaagaaatgaagcaaagcaatttactcagtttagtaaaactaccaaacctacaaagaaagatatgtttcacatatcactttaaaattacatatgctctctatctcaatttctccatccaaatcccaatatactctttgcttcttccttactctcaccacacaagaaactcacgcacacctctcttttcacaactcactagttttctccacacacatacctctct

SEQ ID NO: 104872 - DNA, 1068 bp, Cannabis sativa
  modified_base (173)..(178): a, c, t, g, unknown or other
ctctatatgatccaaatttagatggattattaattatctattgtttcaatttaaattatcaatgatcctctataaatgatctacatcgagtagggacaatttttactattctacccttccatgtactttatccttaaaacacttagctccttgtaaataatattttagtaaannnnnntaattactgaaatgagtactctacaatttaatcttgtttagccaagcttgaagaaaatcatcgtcttgcttctattcatttatagaagatatagattttgtatctatcattagcgctcctacttaattgtactaccacgttcccatgatgtaagtattgggcagatctctttggtcaactttaacaaacaagtgaaagaactcaaataataaaattgaactagaaccgaaccatctcaagatttagatcacttatcgaaggtcaacaaagtgatatttacttagaaagatattacggtaagtttatcatatattttctatgtgaatattggtccagtctaatgtataacaatacatccagtacaagcttactttaccaatgtcttggaaaagacatactactatctaagtgtaagtaaaccattttgtttattatcatatcagtgtaaatcctatgtactaataaattatgggactaatgtttaatcacataattttgattactttcaactgtgtagacaacacaataatctagaacaataatatgataaggatttaaaagaatttatatatcaaattaatgaccatgaaacaaataagtgaaccaagcattatatttaaagaagtaataaaataattatgttcctttattgataaataaaattcaagattaaattaaaatagagttttagttagggcataaaatccaacagaactaattgtataaaatcttctacttttctggcatagatgtaatcattgtaacacttcttataaaataccatccaaaacatatcttaggtcatggtattcagatcatgaccctgagatactgttgagttttatgccctaaataaaacccaattcaataaatcagatttactaattaat

SEQ ID NO: 104873 - DNA, 558 bp, Cannabis sativa
ctgaggattgatgcccaaatcggctaggatcgaggagaagaaattgctggctgattgggatctgatgaggtacagaaaaaagcctagttttgggactgttgtggagcttttgagagtgattgagtatttagctgataagttgaaggaagtgaaggttccattaatcgtggttcatggagtggtgatgggtgactgaccctcaagtgagtttagcattggttgaagaagctaagagtgaagataagtgattttttctttttttttttatagaaactaaaatttagaagataagcgtataaagatatatcatggtattgtcgagattgttaggattcatcttcatcatcaatcattattgattgaattatttatttatttaaatggaaaacgtaaactgttgtagatggtggtcgtgggtggtgagttttttatatgggtggtttctgggcagtgagggtgaacaaggagatagaaaaaagaaaaaaatatataaataattttttgattattattagtctcaagacaaaggccattaatggtctctcaatgtctcaagat

SEQ ID NO: 104874 - DNA, 666 bp, Cannabis sativa
tcatcaactcagaatccgggaagaggacataccaaagacttcttttcgaatcagatatgggcactacgagtttctggtaatgtcattcaaattgactaatactccttcaaccttaatggatctcatgaatagggtattcaaggattttctcgataactgcattatagtgtttatcgatgacatccttgtatactctcaatcagaaagaagcatgagcatcatcttcgaaatggtattgcagcgacttagggatcataagttgtatgcaaagtttaaaaagtgcaaattctagttgtctgaggtatcttttctggggcatattgtcgggaagaatgggattatggttgatccaagtaagattgagtcagtgaagaattggccgaggccaaaatctgtgatggaggttcgaagttttctcgctttggcggggtgttattgccgttttgtcgagggattttctaaaatctctatgcccctagctgaattgactaagaaaaatcagagatttgtgtggtcagacaaatgtgaagcaagtttttaggagttgaagcaacgtttgataacagctctagtgttagcttttccattagatcaagaaaaattcattttttattgtgatgcatctagacagggtctgggatgtgttctgatgcaagctgacagagt

SEQ ID NO: 104875 - DNA, 604 bp, Cannabis sativa
taacctagtccggaatattctcaaaataattcttccattaacgtcgtgacattactaaccacatcgctaaatttctacaattgtcgggcacgaaaaagtattttatttcaaaactgatatcctcggtactcacatatcccaatataatctccgtaattaataatgacgctatttatttcattgagtaaattctcaataattaccctaagcaagatcattatcttactccgttaccaaaataattatagatttaataaaatatgtctatttaaatgttacttattttctaggatattacaactctccccccttataggaatttcgtccttgaaatttacctgaaaagctacggatacaactcccgcatctgggactctaactcccaagtcgcttcttcaactttgatgttccgccacagaactttaactagcagaatagtcttgttctgcagctccttttctttcctgtctaaaatctgcactggctgctcttcatgtgacaggtcggtctgaagctcaatgtcttcataacttaagacatgagttgcatctgatacatatttccgaagcatcaagacatagaatacgttatgaaccccagataa

SEQ ID NO: 104876 - DNA, 559 bp, Cannabis sativa
aaatcttgtgtaataaaactagattgtacaacaataacaagtaatttgccatacataacaaaataatagacaatatagccaaactaagatatagttgatttcttgtttgtatacgtattcatatcctaatcagattgtgatcatgtacctaccatatatacaagacatattcattatccaatctcttattagcccccaaacttgacttaaaaataacacaatataaaatgtgatcaactaaatcttgctataattatcaaaaaaaaaaaaaaactaaatcttgctattagtaagcactaaagagacttggaatctttgaccataatcttaaattcatgcttggatacagaattacaagaggaaaataaatttattcacataaagtgaacatatgagtacactatttctttgtttttgtaaaggacatatttattttgggatgttttgggctctgttctttgtgttaatgccgacacctagaaaataattgacaggaaaaggactgaaatttctattaataaaattcagacaaccgtgtggtagagcccacaaactcact

SEQ ID NO: 104877 - DNA, 1622 bp, Cannabis sativa
ctctctctctctctttatatatttataagaaacacatgttttacattattctagtattgcttatttatgttcttttactgtcataggatcacgtttatcgtggaaatgaattcacacatttttttccgcatactacaattcctgattggtgcagcaactcaagtactggctcttcagttacaatccaattaccaccagatttggaacataataatatgtggatgggacttgctttatgcattgtttttgaagtgcaaacacgggtaaatacgaattcaactgttctaccagccatttgtcgtttttacactgatgaagattgcatggagatctcccttggtcagttcaatgacaaagagtatattactagtgaagagtcatatggagtttgcaagtacatacctcgaaaacgttttgatgggcacttagataaggcaagtcgtgttgaagtttcaatatccttaaatagtacttgcataagtgtgaaaatgtgtggggctcatctcatatataagcaagatgtgacaaagtttgtgagagatttgtttcctattgatgacgttcaagattatttcaatcattgtcaagatatagtagatcgggtaaccaaaacaatccctgttggtgaggtggaatctattataacagatcgaagaataattgacatgatggaatctgctgaacaagaacataaaggcacttttagtgagctatcggatgaggcagaatcgaaattcacttcaccaaataggttcttgcttcacgtagattcaactgattctacaatttcaattgcaaaacaagggtggagaagcttctccaccatggagctgagaagtaagctgcaattatcgctttcaagactttttcaggtaaagcaatgtcttaatttgcctttatttcttctagtttcttccccttactcctttattgtgtgcattatacaggaaagttatgcaggttatcttgattttggatgcatttttcctctcaaagcgattttgccttggttcacctatcaatgtgtgggacgtcacgccttctgttgtcttactccaaacttattagaggataagaaatggctaggatttgctctctatgttgtgtttcgtagccgtttgcctttctcacttaacaatttggactcagaatcttcggcttccgttgttgctcatttgcatatcaaaccaggtggaatgttacactcaacacgattttcactcaaaaatgacaatttagtaggctcggaacatcgacttgttctactttatgtaccatgtgtgcattttccaaaagtgttgaatcagtgtggacaaattaatgctttgtttgcaacttccaactcagattatttagagattgaaatctgtgggatccgtaaagtatacgagaatgatatgaaagatctcatccaaacaataattgagtgcacaatagagagtccaaatgtacaccatgagcagtattgtaaaacatttggagacatggggaacaagattcttgatgaagttgatattccaagtgaagaaaaggactttaatttgggctactgttattccaaattaccaaggttaagtctttataaatttttattttttcatgcttagtttatgtttttctct

SEQ ID NO: 104878 - DNA, 1422 bp, Cannabis sativa
gttggttctggtgcaccagaatcggtcgaccagttgccttcaggggaaatttttgggttttcttcaagttcagtttttggcgcgggaagttgtgtatcatttgttttaggttgtatatgggatgtttgacctatttagaagttgttgggagttgggttatgcttggttttgagatagggtttttatttcagaattttggtttaaggtattcattgagtttcaattgtcatgacataggaccgggattgcctagctttttttccactcaggtcggctcgtacgcttgtgttctgaactaaggtaagaaaagtagtaagcaccgtatgttgctaaatattaatggttgaattgttatggccttgattattatcaagactttgattaaatgttttttgagcctaggttatgacctagggtgggaaacggttaataccgttatgagtaattactcttgaaaccgtgcttaggttttttacttatcgtttgcttcatcgggcaacgatagtgacatattctgctcgtggttaacgagtggtaaaaaggggtactttataaagtaccaggattttatgtttatgataatgtgtaaatgtgtgagcatgttaatatgagatttaattgatggttattatcggttattgtttatttcacttttttgctgactctctgtgactcaggtgctttattgtgcaggtatagggaaggctaaggtggagcagccatgagtgcaaggtcatagcagcaatgtacatatcagccgcagtggcatggcctagtgaccaggatgctctattttgaaagtattttgggaatacaaagtatatgctgtaaaaacactattaaaccagtttgtgaatattttgaaaatagggggaccccgtagttaatatcaattatcttttatcatatagccttatacgtctaaattttattacccccacttttagtataattatatattaaataaattaagaattttattaaatcaaacatgtggcatccctattgatcagggcgttacaacattgtatcagagcgccaaggtttttagatcttggagactgatttgatatgtacattggctgcgaagaattgatcgactcattgttcagtaagctcttagttaaaagatagtgtattaattttctgattgcctgattatttgaattgtgttaatatttgaattgtgtgggaaggactatattatatggaaatacttatcagtattgttattacctagaatgtgactgcaggtgtatagattatgcacccgagccggactggtaggggtatcggcgagctagctgtgctcggggctactggtgagggcgagaacccgccacccccaccaaactggaagagttacacgctgcaatgcaagagactattcggcagcagggtgagcaaattagagaattgaga

SEQ ID NO: 104879 - DNA, 533 bp, Cannabis sativa
tagtttgctagtagttaaataatagtttcaggacagttttgacacttattaatgatttattacgaaaagaatttcaatataacaatttttaaaaagccaaatatgaatttatataagttgtataataatgagaagaaaaaagctgcataacagaaaggaatacattgaggtaacatgacacaaattaaattacaagtatgctgaacactaaaattagtttgtatacagttgcatagtagtttctctatagttggacgagtttaaaaaaacataattaattgaaaaattataacactgatgctgatacaaaaacataaaaaaaaaaaaaaagacatattataatggttaatgtcaaatatcctaaaggtttataaccaattccagaatataaaacaagtataatacctacaaacataaaaaaactaacaattgtctgaaaagaaaagtaaccaagaacaacaaattttgactaaaaatagaccctactttttcaatttagaagtcttggaagacttgctttgcttctcatcctc

SEQ ID NO: 104880 - DNA, 742 bp, Cannabis sativa
tgtagccactggactcgacttctctgcctccataaaatttcttcttttgcaagtaaatcttccactttacgttctagattattactgtattctttagacactcttgtgggttgaaactaagcttttgaaagagtcttttcttctattctaatttgttatgaaaatcaccatacttgcttcaatgccatcgagataaagactctgagcattgttggatattatctattacgttgtctaaatcatttccatggacgttgcccttccaatttgatacaatgatctgtgtcacctcatcatcattattccacaaagcttcatacataaatctcattcttttttttttttggtgtatccagtgtaaccgtaagattcaaatagatagataaaaccctatgatctgaaccaaaaaattccaaatgcttcaaagtagcagaaagaaataatctatcccactcatcattttgaaaaacatagtccaatctttctaaaactagccctccaatttggtgtttattagtccatgtgagtcttggaccagtaaagtctatctgttgtaaattacaaaagttcatacaattatgaaaagatgtaattgatgatccttgtctattcagtcccccaactttgttagcatctaaaattttttattaaaatcacccataacaatccaggcacggcgtggtggagcactcaaaatttctaacatcctccatgaatgttgtttattaatcgcttgtggtgc

SEQ ID NO: 104881 - DNA, 651 bp, Cannabis sativa
  modified_base (176)..(181): a, c, t, g, unknown or other
atggatcaatcaggtacacatacctaattattatgtattactattgtgttctatgttatataatagatcttgggtatattattaatttttctaacaaaagttttatggtatcttgattacttattcttaaacaagtattttacattaatgttaatactagaatgctatgttgatgnnnnnntctagaaggaacttatagtttcagaccaagacaatatgtcacaactagatgtccctgagaactaataggaagaggctaagtgtacacctatgtacgaacttaaccagactcctactgttgagtgggagccatgtaagatgtaatcaaacaaggaacattagaagacagtcaagaaagtgacctatatgttagatgataggagtgtatattagaatccttatatctacaccaactcagaatattagagatggtgattactctgggggtggagtaattattctagaaggatgtaaaaaaaaacccatctgtaataatttagttccaccagtgaagctaaataactttgttgctttctaaaacactggaaaagttatgcttgtcctacatgcaatgtggcaacaccttctattcgtttgcataaaaaggttgcttattgtggccatagacattttttaccaattaaacatcgt

SEQ ID NO: 104882 - DNA, 507 bp, Cannabis sativa
tttattaggggtttccattgcttttcctttcctccaacgttaagtagttgatttcctactttacgtgcgagcaacttatctgcccattcctcaatttgtgagccatcatcgattccaactcgggatctttaagcaaattcaaataaatttttaatggacttgtcatcttgtatatattttcattgcttacatgagtagttaaattttctacccacgtgttgggtttaagtattttttcaaaacatttggatgtctcgtttaatactttcccttagcgcgagccgctagtattcagctttatgcgctagtcataacttttgattttcctttctcgtcagataggttataaatcaaaaattacagttgtttgattactttctcgtccaaaacaaggtgttataacgattcgatccttcttccatcaaaaaggtttggtcagggagttataacagttcgacccctcttctgtcaaaaaggtttggtcgaggcccttttaaaaagttttca

SEQ ID NO: 104883 - DNA, 2138 bp, Cannabis sativa
attttatcaatcttcttgaagcatctagttttgataaaacttgtctcaatggttgatcgattaacacctttatggggtgcgcctgaaaatacagccggagcttacgagactcgtggactaggcagaatgcgagttttcaaggaggggatatctagattctgcccctagtaactttttacttacatagtaaataggttgctggtgtttaccctcttctcgcactatagctgcactaatcgcatcttccgagatagccaaatagagaagtaacgtctccccagttattggttttgccaaaactagaggcgtcgctagatgcctttttatattttgaaaggcctcttcacactcttttgtccactcgaatttcttgttgcctcataatactttgaagaatggcaaaaacttatcagttgacttcgaaatgaatctgttaagtgcagccatccttcctgtcagggcttgtacttccttaggctttgtcggtgatggcatgtctatcaatgccttgattttttggggattcacttcgatacccctcgctttgactatgaatcccaaaaatgttcctgaggaaactcgaaaggaatatttttttgggtttagcttcatgtcatacttctttaatattttgaagcatttcgcgaggtttgtggtatgattcccactttttattgattttaccaacatatcgttgacgtaaacctccatgctccgctcgatctggttatcaaaaatctcgttcaccaatcgctgatatgttgccccagcattattcagcccaaacaacatgactttgtagcagtagagtcccatgtttgttacaaagctcgtatgttcctgatctcggacatgcatttctatctggttatatccaaaataagcatccataaatgagataagctcatgcccaacagttgcatccactaactagtcgatcctgggaagtgaaaaacaatcttttgggcacgccttgttcagatcagaaaaatcaatgcaagttctccaagtttcgttaggctttgggacgagaacaggattggctatccacaagggataaaacacctcgcgtataaagtcattgactaacaactcatccacttcctattttagtgccccttttcttttggaatccaaggtctgcttttctgcctcttcgttaggtagattgggtcaacatttaaatgatggcagataatgttaggatcgatgtgtatcatatctccatggctccaagcgaattggtccgggttcgcctttaagaaacttattagttgctattttagctgctcgagtaggttcttcccaatgtaaacacactttgtgggatttcctgggtcgagaataatttcttccaattcttcaattggttttaataagtttctttcatcttgaacccgggggtcaagatcctcatccttctttttactttcttctgccaagatcgccattaattgatgatcggctttcctatgctacaactctatgcgatagcaatcacgagctaacatctggtcgccccgcaccactcccacacgttctggtgtttggaacttcaggataggtgcttgatcgaactaactgcccccagtccaatcaaagctgggtgacctaacaatatgttgtaagctgatgggcaggtcgacaactaaaaaagtcttgcataattgtggcggataggggtgcctcgcccaaggttaatgtgagctcgattatgcccaaactggcaatgttgtcaccattgaagccacaaagatttaccatacaaggcctcattttggtttttttgagccccatcttcctcagtgtttccttataaaggatgtttactgagcttctgttgtctattaacaccctctttatccttttattggcgacttgaatggtaatcaccaatggatcgacgtgagaatatcctttgatggcacgtacttatcgtgtttcttctgcttcttcctatcctttgacggttccttagaactgtcctttctcttcgagctagaagccccctagtactctcattgggacagtacttatcgaaacattggtgggtttacctcctaagcctattttcaacaaattcatttcttttcgggcttcctcttttcgaacgaacacttgagccctttcgttgaact

SEQ ID NO: 104884 - DNA, 1019 bp, Cannabis sativa
  modified_base (279)..(287): a, c, t, g, unknown or other
  modified_base (738)..(744): a, c, t, g, unknown or other
aaccactaaagacaaaaacataaaatggtataccacataaaatggtacttaggggtattttgggaaactctaacatcccgactacacccgacattcccaatgtctaaactattgtcccgctataccaaaaatactaaaatgtgattctaatagccatacaccgcgttccaatgttgtcgggcacaaaatatgcaaaattataaaatttctatatgtgacataaaaatgcattccgaattcaaataaatcatcataaataattaattcaatattaataannnnnnnnnataataaagccctaattatctgctaattttcaaattaaagctaagcggtctttacaattatctcccccttaaaaagattttgtccccgaaatctaacctgaacaactctggatattgagctcttatgtctgattctaactcccaggtggcttcttccaccttgctatttctccagagtaatttgaccagagctatggtcttgtttcgaagaaccttatcctttctgtcaaggatctgaactggttgttcctcataagacatatctggttgcagctcaagattctcataactaagtacatgagcggggtctgatacgtatcttctcaacatagagacatgaaatacgttgtgaactgctgaaagagttggaggcaaagctaatcagtatgccacttgtccaaccttctcgagaatctcgaaaggtcctataaatctagggcataacttgccnnnnnnnccgaaacgcttgatccccttcataagagacacccgaaggaacacatgatcccctacttaaaattctacaattgtgtgtatcggatctgcataactcttctatcggctctgtgaagcaagcattctggctttaatcttctcaattgcttcattagtccgttgcactgattacggacctagatacttcctctctcctgtctcatcccagtgaatgggagatctacactttctaccatataacagttcatagggagccatccctatcgtactctggta

SEQ ID NO: 104885 - DNA, 714 bp, Cannabis sativa
taaatgaacacaggattttatagaggtttggcccccttagtgggtaatgacctactctccttttagctgtattgatatcgagagataatactactcagatcactattgtgatgggatctgaaggagctctctaaaggttacaatgcatgaatcagagttagcaaatctcaagtatgagtatagaagtgggcgtgtgagagagagatgggttatcaaacttagacttaagattttagtcactttaaacttagagttttagggtttgagtaagactctttatataggagagcttagacccttcaaattccttagaaatatatcaaataagctataatttacatattaaattaataaaatatgaatgactaaaatgtccctcaaaatagatattttctctctattttcgtgggatgttaagtcccaatccgtaatttggcttgctatccacgtgtgaagctgtgcaccaaaattctgccaggccaaaagctggtcagccatgcatccgtaggatgcatgctggccgaccattagatgtccaaaacttggccgacctatgctggccatagggtcggctaaccccttaaagggggttggttcgtcactttgtcgttcttgtttgagtattcagacttctcgttggttgaagtgctgagtagatgatttggccttcttggtggcgagttgtattgccacgtgccactgatgttggccacg

SEQ ID NO: 104886 - DNA, 724 bp, Cannabis sativa
cttttctccgagccgccccaccagaagaaatctcgcaccagcccatcaactttattagctgcaagtcggttagacaacttagtggtttgcatagcgtaaagaggcaaagataaccccaccgactttataagagtagctcgccccgctttcgagagcgtcttggccttccaaccatgtaatttctcagtcaggttatccagaataaagttgaaatcagcatatttttgtcttgatctgaataaagggagccctagatacttaacgttaccttctggtgatccaattcccagcgtttccttgatcctctgtttcatagcactgggggtgttcttactgaagaaaatagaggtcttcattttatttaccttttggcctgaccaagcgcaaaacttttcaaggcaatcccaatagcctttggcctcctctaaattggctttacccactaggattaggtcatctgcgaagaagatatgggatagcgtcgggcctcccctacttaacctgattccactaatggttttcgagttctgggcatcctccagaagtctagatagaatttccgcgccccagatgaatagataaggggacaaggggtcgccttgcctgagaccgcatgagggaatgatcttgccaaccgatcctccattcaggcaaacattaagggaggtggtggcaatgcactgagaaacccatgttctgaactcttggggaaccgcaaagcatt

SEQ ID NO: 104887 - DNA, 683 bp, Cannabis sativa
attggtggagattacatagtcaagataaatcaaataagagagtgactatgtcagatcgaatgagaagaaacccaaaaaattttctatgatttacggatttcgaaaaatcatcaaaaattatttttaataattttttaactgcataattatcattaaaataataattattattaaacggagtcaaaaaattatttaaaaatcatagaaaaatcagaaattaaattctaagcatgctggaaaaaaaacgtcaaaaacgatgacctgcgtggccccacacgcccccacgcgtcgcctgtgcgagtgggctttgcggctggacgactttactaatctacctctttcccataatttttgttaaaaaaaatcctaggggcattttggtaatttcactaattctccaacccgatattctaataaaattctaacttaatctggaatattctcaaaataattctttcattaacgtcgtgacattactaaccacatcgctaaattctcacaattgccgggcccgaaaatatcgtatttcattaaataatttctcaacaattaagctaaataagatcataatcttacttcgattccaaagtaattacatatttaataaaatatgtctatttaaatattatttattttttgggatattacaactatcccccacttataggaatttcgtcctcgaa

SEQ ID NO: 104888 - DNA, 580 bp, Cannabis sativa
agtttgtcatccaattgatattttgtcttatgtgaaatatttgtggaggtaattattttattaaagtttctcaatttaaatataattttaaaataatcaagttttctttattcttttaagtgaatattttgcatttgataattatataaccaatatatatactaataatcataccatataataaataagtttattagtatatataattaaattgagacaatatttatctataatttataactgtaataaaattattaataattttagatttctatttacacatgtatacttcactattaaaaaaataaacttaataaaaaccttagatattttatgtattgattatttctcttttaaaaaaaatctaaagtattctattttacaaaaataaaatatgtgtaaaatatcttaaatacttttaagagccacaaattaataaataattttggcccttgttaatttacaaaaaacaatgaagactaagaacatctcgaaaggagatgtaaataagtaatgcaaatataaaatatagctcactttttcaaaagtctactccaatggtgtgtcaaattatgatgca

SEQ ID NO: 104889 - DNA, 645 bp, Cannabis sativa
aagatatatcaaataaaaagataaaaaagagaagtgtttaagcaactggagtcccaggttcttggttcgcttcttctgggccaaccagagcagggggatttgttgtttgaacagaaggtgcatcagcggcctgaccggaggttgaagcagtcgcctcagtttcgccataagccacttgggatgcacaaaactcaaggtacatgtccttagcatcgcccaagtagtcaaaattggcccgaggattagccttccaaaaatcaaagaagagctcgagatcggctgtctccaaggcattgaccttctccttcaacctatccacctcggccgaaagctccccctccttggcttccttttcctccttcatccaatgaagaactgctcgaagagaagtcgtttcgtcctgaagactgttcacctcagcatataaggtctcgatggtcttctctaaatagtcagcaacctcgagatccttagtcagcacagtgattttcttctaagcggcaaacaacttcttgttggcttcacccaattctaaccgaacaacttcgactttcgccctggcttctttagcatccttccaagccaagtccacctctgccttcaaggtgtcagatagagccatgttcttggaagcagcagacttag

SEQ ID NO: 104890 - DNA, 505 bp, Cannabis sativa
  modified_base (50)..(52): a, c, t, g, unknown or other
aatttatcttcggaattaatgaaaatgctcatctggttaaactatcaaannnttcaaatttaatttaaaataatatttacaatttaactaattttaaacatcaaaatttgaaaacattttttaataaaaacaataacaatatgaacaaatttattattaattgcaacactttaagtggattaattatatttaggttcaactaactatacggatgctgatcctttttgtggcaacatttaataatttgttgtttttttttatttttttaaaaaatcactcaataatttttcataaaccaaaaattctattatatagtcatattttaattttatatagaatagagatatatagatgttattgatatatatatatataaattattgttgtacagtaatgtactagatgaaagttacgtggcgagccacgtaaatattagttttatttaagttctagtggtttttgtttaagaattcggtaactaattgtagattattttataaacaat

SEQ ID NO: 104891 - DNA, 660 bp, Cannabis sativa
catctgaggtgatcataagtaggtgttttattgtgaagttgtgcataagaggtactgcctttggatagttcagaaggaattctattcattagatatgtggcagtttgaataagatatgaccagaggtaagtgagattgggaacacaatgctcttgtaatatttaggagatgttgatgttttctttccacaactgagtgttgttgtgagtgttcaacataataatggcaatggacaatgcctttaaatgcatagaaagattgcatgtttagttctttagcattgtcagatctaatggccttgataggcttagaatgttgtgtgcaaaccatattgtaaaacatgagaatgactgtctaaacttctactttggttttgagcatgagagtccaagtaaatcaagacttgtcatagacaaatgtaaggaaatatttatatccttcaatgattatgatgttgaatagtccccaaatatccatatgtattagattaaatatatgttcagcaaaattgttgtttgatatggatggtaatattttttatttagcaaggtgacaaacatgacaatgctgattttgtgaaatagaaaaatgagaatgtaagagcatgtttggtattgttttttgttttttgttttcaaaaaattgtttttagaaatgaga

SEQ ID NO: 104892 - DNA, 625 bp, Cannabis sativa
  modified_base (588)..(594): a, c, t, g, unknown or other
taggtttgtgtcctcgatcaaagtctataaggatcaggaattggggtcaaatggtggagtcaaaattagtttcacatatgatataactgaaaacctatatatggtaaattattttttttaaaaaaaataaaaatataaagaaaagataaacaatatacattacaatactagctatggtggactaaggatagaataatttaatttaatacaatatattaataaatgtcaataacaaatatagattacattaagtaaaaattacataatatagacaaaattataagagtttactttttgatggcataaataaatatataatattatgggattatgaggttttttatgctatatgggcttttttcattcataaataaataaataaataatacatttatatgagtttttttatgctatatttttgtaaaaaaatatagaaattcgacaattgtaaaataataataagtttaatcgaaaaagttattgtcgccaaaaaagtcaccgtcaccgaaaaagctagctaccgtcgtcggataagtcactagaaatagatgttttagatataaataaaaatagaactggttctataannnnnnnaataaaaacaaataacacaaaacaactcaaa

SEQ ID NO: 104893 - DNA, 850 bp, Cannabis sativa
atttaatttaaaatatgtctaataccaaaatatctaatattataattaaataatatataaatattaaaaaaattaacaaattttttaaaatttgaccatattttaaaataaaataatcaatttttaaatttaaacctcaaaatatgataaattaatactaatctaaataaataaatattattaatttgtaaatttgatatttaatttaaatatattaaaaataatattttatttttattttagaatttgaaaattggaaaaactcgaaaaaaaaaatagaaaaaatccaaaaatctcgaaattttgggttaaaacacccatgctgtgcacaaagaggctccacgcagcctcatccgtgcgcaaaatgggtgtgcaacagtgtgtttgactgagcaatctcagtcacttgcagcatcaacgtgcggcccattgtgtctgaaggctgggtgtgacacagcttcagactaaagttgtctgcctcatgcgcgtgcacgtcaccttgtctgagtgactagtgcgtgcgattgaggcatgtgcacccaaatttttaaacattcacagctttttcaatttttatcagaatcgagttccgtaagaaccaaaattgcttaatttttcacaaggaaacccaataaaatattttcaaaaagaaaataaaattattttcatgaaaaaatttcgtaattcacatacattcatcaaataacatgtaaaccaacatgaacacatcctaatcaacacaataaaaactattcatcgttttaaatccatattacatgaaagtaaatcattaccattgctctgaggccagttgttgggaatattttaccagaatttagatttactaaca

SEQ ID NO: 104894 - DNA, 949 bp, Cannabis sativa
attagttttgacttaatatttattcaagccctcactcaactaaatttctggcttcgtcactgcatgcaatttatttggagtgaattttatctgttttttcagtttagattagagaacacacatacacattggagaaatgagcttttctggctatttcatttcaaatcataactaataaatttaggtcattacattacacaattaactaatgtatgtcactactatttactatttaatatcatttggtaactggttaattcctcttgatgatggcaagttatacacccttaggggtatgaaaaatgatctttaccaattttattatgatgcagcaaagtgcactatgaatggcaagtttttatgagccttactcctggaagtgaaaggtgtcagcaaagtttcactatgaactgcaacgttttaaactgaatcatacattgcaatgtaaaatgtaataaaagaaaaagaaaatgtgggtgaatataatccaatctcacttctgagatgtgttgaatataggccaatctcacttctaggcatagttgttttaccaaatgaccatagtttgagaatattgaacctctataattctcaatctcaagacggtgcaagtttgtatggggtttaagtgcatcaagtatatctaattcttgttactaacaatgagcctcaacagcattactgacacagcttttcataaccatgaagtacaaggtagctcctctatttcagtaaaagataagtccaaatatcttaatatgtcactatcatcattaaaattgccacttttacttgagatatgaatcgagaagaatgttatataattactggcaagattatgatgatgtagatatagatcttaaatggttagtcttaatactctcccacatgggttacaagctgcaatagcagcacactaatgacttataaagctctaggcctttgacca

SEQ ID NO: 104895 - DNA, 653 bp, Cannabis sativa
ttaatcacgcaaactgaattgggtgatcgcatatccttaactaaaagcatgccgcaacacaaattcaaggatcataaagtaaatatgggattaaactaacccatatgcagtttttatttgtacaactaaaattattcaatgaaactctaattttgatattttctcatatttatgtgcaccttaatttcatttgagaaattatcataagaagaccagaataaacataaggtttagggttcattcgcttaagtacattattatataataaatatatcgtaatacatggaagataatactcgacttataatgaggacatattgctatgattcatatgtttattatataatgaggaacgtttagttttgaatgtttagtctaaatgcttaccaagtggaagaatattagaatatttctatttatggaataaaataaagaattgattttgtgataaatgaatattttatattcattgaatttggacaaaatttattttcgtgggttatcatgcattcaagacaagagaacaatggctgctatatatagggaaaagggagagcacatgtaacgcccagtccaacaggaacgccacgtgtgtgcaatttaataaaatactgatatttatataatatgtaattatactaaaagtgtgggta

SEQ ID NO: 104896 - DNA, 612 bp, Cannabis sativa
aatagtgaaaggataagttaccccatcttggactagttcaaatttttcaagatccatatggttgtacaagtaccatatgagagaactacgcactgacggaattttttgattaaggagggatccgaagcctatatctgaaatgactttcttttgtgcttcgttcaaaccaatcacaatttctcttaatctttctggactgcatctacattggaccctacaacgatcttcgtcattgtcactctctactgttggctccttaatcttttcttttgcagtgatcttccctacaattattgatgcttttttttgtagtggacgttgtagtgcacattcaagtgagttgtttatacattgtttttgtaataatgtaaaagatcaaattatttataccttttacccatagatcaagtatatttagcgatacaaaaaaataataataattatgtgacaacacacatttacgtatgcatgttaaatttacctcatttgtaactgcatttttccccttgtcggaggcctttgtgcccttaccaagtgactcgtcatcttcctcgacattgcgctttcccgataacatctacaaccaaaatttaaatcaataaaactaaatat

SEQ ID NO: 104897 - DNA, 2322 bp, Cannabis sativa
aaaaatttgtatttttaagcgacggtttttccccgacaatttgttgcaaaattggtaaaagatgtaagttttctgtcattttttcccttgcactaattttcaaaatttgtatagcaacaataattaaactaatccaagtaccgataaagctaatcatctaaatttaattataaatttatatagtaacaataattaaactaacgcaagtgtcaagaacttaatcaaaaaatatacaagtcgttagttatatgaaagtaattagttaatgtaaagtattagcagtaagaactcgtcaactaaagtatagttagaaaatccaatgcaaatggatgaagataaaaagcttaaaagaaactcataacgttaatggagaaaaatggtgttgtattgaatctctaacctttgttacaaatgactatcccccccttcttcaatggaagagaggtatttatagggagctctaatggctccaaaatactagtggttcaaaaagttgggggacaaaattctttttgtaccataagggtcagcgtgttagatggatagtggaggagtattggtaaaatattagcttgtatgtagagtaagataaatagtgtctccactacttgtgctttttgtatccgttgcatagccacctcctctcttcaggctttgttggaggcctactaacattaacggactcgcccttagtcgtcatcccttttttattctttccatcaccacctatacatatatgaagggagtaacacttggaaatttggctaagtgttgggagagggagcaacactttataatttggctgagtgttgggagtgggagtaacacatagtatattggctaagttttggaagagggaacaacacttggtattttgacttagtgttgggaaaaggaagtaaaggagcttgaaaagagaccaagggagcggggagctcccttgctacatgtggagagtgatgggagcagggagctaagggtgagagagggagcgaggagctctcatggcaaaacgaggagcaaagggtgagagaggcagcgaggagctcccttggaagtccaaagagcaaaatgtttgagagggaactgggagctcccttggaagaaaggggggaaaagggtgagggagtgagcgaggagctcctttagaagtccagggagaaaaatgtgagaggacagcagggagctcccttggaagaacggtgagcaagggaagagagaggatgagacaggggctcctcgcaaggggagctcaaccggtgccttggcctttcctcgtgctagttgttcctctcgtgtggtgtctcaccttacttgttggccttccattttcttgcccatacacttttacttaatttcattttgatatctttcctccatttgatcatgttgtctccaacatttatatttagcaaattttggaggtcaacacttggtcctagtttacgagaattctttcaagagttcttgtagaataagtttggcgagctttgtctccatcacttattctattggttcatgttatggatgcttatgacttgatttggggacaagtttccttttgtaccatgagagttagcgtgttagatggatagtggaggagtgatggtcagatgtgagcttgtacctagagtaagacaaatagtgttttcactacatgtgtttgtcgtatctgttgtactaccacctcatctcttcaggctttgtcagaggcgtgctagctttaacagacttgcccttggtcgtacatctatttgttattctttccatcaccacctatacttataatgagggagaaacacttggtaattaggctaagtgttcgcagagggaacaacacttgataatttggctaagtattgggagtgggagtaacacttggtattttggctaagtgtcaagagagaagtaacacagtagtttggctaagtattgggagaagtaagtagcaaaggagctcgaagagagaccaagggagaggggagctcccttggtacctgtgggagcatggagctaagggtgagagacaaaatggggagctcccatggcagaatggggagcaaaggaggagagagggaaaaaaatatcccttggaagtctggggagcaaagggtgagagagggagtggggggctcccttggaagaaaagggagtaaagagtgagagagggagagggaagcaaagggtgagagagggagctgagagctccctttgaataatagctatcatattctatttatatggtaactttagggttaggtttagaatcaaatggaataaaaaagataaaaattggctttatttaaagggttaatttcacaa

SEQ ID NO: 104898 - DNA, 4209 bp, Cannabis sativa
cttggcctggagcaatttcaggatttgtaagctcctgggaagttttcccaggaagcgtgcgagtgaggacaaagcatgctagaaacactcgtgttggtctgtgcggtcagtcgtcaatccaggaagcagccagagtgacgtactcatgtataagagccattatttcgtggatgtaagggtccaatggaggcttgaagcggggacgttacacaaaccatccaagaaactgagttttttcttgacaaaaatagccaattgtattgctctactccgtgacatgtaattatcttgtccagtgagaagttgtgaaacaagaacattactaggattgttagcatgatgcaaatagtaaggatcaaatggatcttcaagaagattcatctgttggacgattaatgattctggccaccttccacgattggattaatagcttctttaattgcagcttgagaaggatcgccactagtatcagtaggaatggattgattattagaggacatggtagaaacgaaggaagatcaggtgaagaaccctgaaagaaagacagagactaagattcacagagttaagtggaaaaaacgagctctagtggaagaaacgtcgaagaagaagaagaagacatggtagagatgatggagaagaatcaagattgggggaaagcttttctttcccacttttgataccatattacggaattgaacaaaacagaaaatgaatttcattgagtgtgaattggtataatactacagaggagacaacttatttataggatacaagaatttgtttaactaacttaaccaatgaggataaaacctaactaaagtaagaaaagtaacttcagctaactaaactaacatagacaaatactcattgttataactaacttatagttgacacaaataacctaaacataagaaggaattcttattaaaaactagttttataatctaaatagaataataactataatatgaatttttatgtaaaaataaatgaattataatttctttatatatttttgaaaaaaatgaaagaaagaaagaaagctttaccatgcttttgaggttcctagggttagtttgggggtggtcttttgttattctagaatcaggaaattaatgtcattattttaaacttttccattaaccatatcgattgtatagttaactttaatgaatgtatgaagtatcatgtttcttgtttgtatggctcaccttatttgcatgataaagttcatacttggactcttgttaatagactctttcataatgcccctcctttaccttggttgatcatggtgattttaatgactacctctccgtacatgataggagtagtaagtcgaaccacctgcccatgctatcacaggtttttagtgctttatgcgtaagttcgatcttgtccctctccagtttgtgggcaactgttttactaagaaacatggaggcacgttggaatgtttagattgggttattactaataaaggttggttggattcctttcctaatgctaccttatatcacatgaatttttatcattctgaccatagagtcttaagctggttcttaatgatcatagcttaaccaagcctgtcaaaggtagatttattttcgaaaaccactggcttactaaaagctctttctttgaaactattaaaaactcttggtttagtacttttgaccatgataatgataatcccttgaataaattcattactaagcaaaactgtcgtgttcactttatcacaaagttgaacaaatctttcaacaacctaaaggaaagaattaactttgtggataaaaccttaggtgcctaattttctaaacttcccatatcctccaatgatctgctcaaaacccgtagcctccaatcccagcttgatgccttgctttacaagtaggagctcttttagaaacagagatctaaaattcattgtcttaaagttggtgacaagaacactaaatattttcataagaaggtgtcagctaggaagagaaataatcacattaggtctctcacccttagcaatggtattattgtctcctcttaccctaaactttagtctgagatcagtacttattattccaatcttttcacttctcagacctttaacatggaagctattcaaagactactatctgtcattgataagagaattagtgagagccaatttctctctttgtctttgcccttttatgatgaggaagtcaaaattgcttttttttaacatctctagggataaatcccctagtcttgatggcttaaatgccaatttctattgtaagaattggggcatctcaagagagatttttgtgatgccatcttaagtgttcttaaccatgatgctgacatttctaacattaataatacccttgtgctcctcatccctaaaaaattgaacgcatctagcattaaggatcatttgcctatcagcgtttgctcaactttatagaaagtgattgccaaagccattgctaacagaattaggcttgttctttgtgatttaatcagcccttcacaaagtgcctttttgttcaatcgtaatatttttgacaatattttcatagcttaggaagttatccatgccattaatcatagaaagtagggcaaataggggtggtttgacctaaaaattgaaatggagaaagcctttgatagagtggaatgggattttataaaggctattcttaatcacttgggatttccttccatcttagttaagcttattctcaatttcctcaacactgttactattaggttcaatattaatggtaacatctttgattctattgttccttcaagaagaattaggcaaggtgatcctctttcaccttacctttttcttctttgctctaagggcctctcaactaccataaggctttaggaaaagtatgctcggttcaaaggatctcaatctcccgtaatgccccatgtttttcacctccactttgttgatgacacactcattttctcaaccgcatctcaacaatcttgtgacctgatcagccaagctttcaatatttacaactaggccacaagacataaggttaattataccaagtcctctattctgttttcccctaacaccccttctgatatctctgatctcttttaccactcccttggccttgagcgtaagccctttataagtaattatcttgatgtcccctctattttgaacattcaaaaaagtttaattttaatttcatccttgatagagtatcttcttaccttaatgttttcaactagaagctttcttcaagagctggtaaagaggtgcttctcaaagctgggatttaggctatcccttcttttgcaatgtcgtgctttaggatccctatctccatttgtcaaaaagtagagagtcttatggaaaacttttggtggagctctatggggaacaattctaaaacacattgaaaaaattggtcttatctttgtaactccaagttctttggtgggttaggatttagatcccttattagttttaaccaagccatgttggcaagaaaagcttggagaattctcactaaccttaactctgtgttggcctctatcttgaaagctaaattcttcaaaaataattccttttggaagcttccattggtcactctccttccttcacctggatacatctcctttagggaagggaccttcttaagaaagggcttgtttggaagatttgtttggactattatggacccttggatacctagccataataatatccacttcaagcctaacttctcccctcccactgatcgaattagcttctttaccaaccacttgggagcttggaatcttactaaacttatagattactttgatcaagataccatctcccatattctttaggtgcccattggtgaccctagtagggaggactatctaatttggaaacttcactcttcaggatctttcactgttaaattggcctaccatcttgctaggtcagcttcccttccctcttcttcctcaaatccatgtttcattaaaatttggtggataactctttggaacttccaactccctcccaaaatcaaacactttttgtggagagcttttcatcacatcctccctgctgcttctaatctctactcgaggaaaacaattccttctccaagctgtgctcttttccattcccctattgaaactgtaacgccctaatgctaagccacgctacattgctttttcaattacagtgcaatc

SEQ ID NO: 104899 - DNA, 776 bp, Cannabis sativa
tggtcgtctcttatgtcatcattgctttcaaaattccattcagagtttagatcatcactaaaatcatcatgaaagggtatttgtgctacaatgtcagctgtcggcatcatagtatttaattcaagtaacacatcagccgccaataccttcggatttgtttctataactaaagtctcaacctcactatgagtatccttaaaagtacttggtgtgggactaggatcgatgcaagcatttttcttcaccaaagtcataaataagggagtaaattcatccgacttcttcgcaagcatagacaaaaataaccttagacgcttatcatttctaataactttagggcgatacattaatcctttcatgttcttgtaatttacttcccatttcaagtcatatttcattttgtcaacatcgagttcttcatacaacatatcaaccaaacttgagtaggttatgttcgtatcaatcttaaatgtcaaattttcagcttggttataaactcaatctctaccctcaagctcttaaacatcattatacataacgaacacaaaaatagttgaacttgtcatccatagacataaaaaacaaaacacaattaaaaatttaaaacaataatttaatagaaaagtgataaaaaaaaaagttcttaaaaagtcataaatcggccagacatcgaaccccatcgaacttatataggaccccctcaaattgaattcagcaaaaaaccattatacctgttacgaaaattatgtttattacgcaagtgtacgtatcaagta

SEQ ID NO: 104900 - DNA, 701 bp, Cannabis sativa
tggaatgggaatagaagtaaacttcatgtggcctcttgggagaaagtctgtcttccaaaggcctatggaggccttggcttcaaggatggtatccagtgaaatcaagccattcttgcaaaatatgtttgagccatttcttccaaaagggacttgctttgggtgaaatgggtcaataatatttatctaaaaggcaagaattggtgggaatatgaacttaaaagtgacactagtttgtattggaggaaattatgttctctaagggacaagttcactagagaagacataaacaaagcagggattggtatgcgattcaaggcttctctgttgtataacagcagcatttctcaaaatctctttgagtacagcaggttcatttggtgctctttcaacctaccaaatcacaggttcattctatggcaagctatcaattctcaactcttaacccgtgacaaatttgagccatttcacattgctcttgacagcatccaatgcccggtctgtgaggatgcagcagaaagtaactcccatttattttttgactgcgggttttctcagtaggtagtgaaaagcatcagcaggtggctagaaattcaatgctggccgactggattccatggttggaaacattggctgatcctgaacagagggaataaacttcataggattcatgtgtctctattggcagctatgatataccacat

SEQ ID NO: 104901 - DNA, 749 bp, Cannabis sativa
tatatatatatatatataatcagacctaaatttttattttgtaaagacttaattattgtaaaaaaaatattatatttatattaactataaattaatattagtagaatttcaaaaatatatattattaaggtaaatttatataatttttcaagccttaacatatatctgtgggaactttttatttattattttgatgatattattatcaaattaaaaatgattttattctttttaaaaaataaatgtacattttttttcaataggactaaaagcgagtatttagagattgcatggatttttttatcttttactggaaccaaaatataattttttatgaatattgtaaggttttgatatcgtactattttattttatttgtacaaaaaaaaattgaactatgatttataagaaatattttaaatgtatgttttattaaaattttatttaaatattatttaagctgtatattaatatattatcccttttttttttaaatatctattaattagttatgaggagagagaagaatagatggaactaacagagttaattttgaaaattgaatcggttaagtaggaaaaagagaaagacacatggcagttatttattgaagggacatgaatgagacagataattggggacagaagatttttttccgctgctttttgcagctgctgctgctgtttgtgtttgtggctttgtgccttgtttgtattttgtatttgcttgtttctttgaataaagttcct

SEQ ID NO: 104902 - DNA, 732 bp, Cannabis sativa
  modified_base (378)..(379): a, c, t, g, unknown or other
  modified_base (699)..(707): a, c, t, g, unknown or other
tcccggtctaggttcaggtttgagtcctagtctcggttcgggtttaggtctttgtctgggttttaatcttggttcaggtttaggtcctggtccgggtcctggtcctagtttagttctagtcccatttgcgattctgagctctagtttgggtttgagttcgggtcagagttcgagtacttgtttgagtttgggttcgggtctggatttctgtctaggtccagatcaggcttcgggtgtgggttcccctcctgggtgttggtctaggttcggtccgagtcccaagttccaatacctatttgagtttggattcaattctgtgtctaagtccttagttctgatcctggtctaggttcgggtttgggtccgggtccgggtctnnctttgggtctgattctaggtgtaggtttgagttcgggtccgagtctttgtctgggtttgtgtccaggtgtggaccctgatctaggtctatgttcgggtccaggtcaaagtttgggtcctgagtgcgggtccaagtttgtttctgggtcaggatctctgcccagatctaggtccaacatttcgatcccagtctgggtcttggtctgtgtcaaggtttttatccggatcgctatctaggtccaattttgtgttttggatctggtctgggtacacgaatttgtctgggcccgagttccagtctaagtttgggtctgaggctannnnnnnnntcagttctaggtctgggtccgggtc

SEQ ID NO: 104903 - DNA, 1181 bp, Cannabis sativa
tgtgtaagttattattatgaagtatgttttgttattaagtaaagtatagtagcataataattcttaaattaagtagtatatattaaatgtgttatgattttaccggtaagacaaacattagatacatgtatgttggaccaataaaataaatagagagacaaaaggacatgaagagacagtactcaaagtgtttggaaaattaaatttcgatgacgaaatttcttttaaggagggtagaatgtgataatcgactaaatatatatatatatatttaaaattttaatactggttgtatgacaataattattggaagtagatgattacctaaaggaatgagtaatttggtagttagggctttgaggtctgagattaactctaaggcctattgtgttgttgggcccaagtaagttatattaaaaccgttggtgccaattctttttattataggcataggtcagatgtatgaaataaagtgcttacatgataagattattttaattattagcccattataagtttaagcttattttattataattatgtgagtaagctagtaaaggttagaatattctttaagtttgattgtgtacttcagccgttgagatatagcaagaaagtatcacaaggaatttaaattataatagagaaagatcttatagctgttaatataaaaatatatgtaagtagttaacataattataatttaattttctctaagtgtttagagaaaagaaatagagtacaagtaaagggataagctattaaatgcatgcaaattttgagataatcttatgatactaagatgatttaaatttatttagttagtttggtttatggtacacatgtagaatatggattaaggatgagaatttgtgtagttatatgatatatataatggatgttgcattgattttgtgtgtgtgtgacgtgttaataggttttaaaagtagaagtttaggtagctttgaaatttaaataaagatagaaaagagatttttattattattattagttaaatatttaataaatgtttgttccactttttgaggatttaggtgtagccaaacctaaagtctgtttgagtgatatgaattggcgtagcatatatgtgtatatatatacatgaattcataggataaagggaggagcagtgtgtcaatttaattatatcaataatcttg

SEQ ID NO: 104904 - DNA, 554 bp, Cannabis sativa
tatttcaactaatgaaactaaaatgtcttttctaattttagtacttttctcacctaattatttaaataaataattatcaaataaaatacaatttaaaaatatttattaattagccccgcaaagtatactaattaacaaatgaactattatttctctttttttctcaaaattgtccaaacttggtgaaaattctcaaataagagatagtctattttcaaattctaattgacatattaaatcaattagttaagtctacaagatgatattatctcagacaatgtggagaccatgggcctatgtaattaagctcttaataagcagatcttgaaatttgcaaagtaaattttctaacttattaattccttctgattccattatagatttaaaattacactcataattacatagaatgctctatacaccaagtatagataagctatgaattatctactatgtcaatcatactaattattgatcctctatagacggtttacattgagtagggaccaaattaccattttacccttcaatatattttatccttagaacactta

SEQ ID NO: 104905 - DNA, 1665 bp, Cannabis sativa
  modified_base (1636)..(1639): a, c, t, g, unknown or other
acaatgaggtggagtgtagtgtccgatgatgtcctgaagcactcactccccttgggtctataccttgtgagagacgaaaatgcacacatatatttttcatttactattttacatctattttaatgcggttttttttttttactttaaataatattaattctttttcaaaatatggaaaacaaacaacataatttaactaattgaaaatagagggtaaatttggccatatgaaaagattattgaccaaaatcgtgtgtaaggtactttttttttactaattttacaaatagagggtacctgataaacatttttcatattagagggtaccaaagttatatttaagtataatacagggtaccaaataagtatattccctagaaagaaagaaaaaagtgtgcaccgtacatgaaatatactcgaagctttagaatgaagataacgatgactctcctatggaagaaatattactctactttcatctcgtacaaagttagtaaaaaggtactctttcacccctaatcaatttatattgtctagatttgctctgctacaagtgtgtatttaagcgatagtactcgctaatcaaaagctcaatttaaactagtttcaattatattgtctaagtgtgtatccaagcgatagtactctctaatcaaaagccgtgatttcatcaataactattttagttgatacacaactaattgagtaattaatcaatcacaaataaattaaaattaatatcaggttacattaaaataaaaaaataagaattttatttataaactacatgagcaacacttaaactatttttaaacaatgtgggatattttactaaattagtaaaaatggatatgatatttttctttagtttgaagctctcaaagaaattataaaattacattgaaaaaaaatatgaaataccacctcatcaatcataaattctcctttatataaatctatagatagataaattacttaggattaataagtaataactgtcataaagtataataattttaactataaaattaaatataactaaattaaatagatattattttacgcaaaaaaaaatgtttataagtgtgtgtaacattatttataatacattagtcatcttaaagtgttgagaggcttaaagcaaaatttgaaatgagatattatttttttttatatatataaaagttaaaataaatattatttaaattttgacataatttcaattttataactcttttatctcatataacaaataatttttcttaccatgtaagctaacttaaaataatatttgattataatagaatatctattgaagtgttatatattttatcacttttataaaaaaaaaaaaaaagacacaatactattttgaaatatttgatttatttattattattgtgataatttcttttttacataattatatataatcatttattaaaatatatatgtataaccttgaattaaaaaaaaaaaaaaacaaaagtggttgcaaggggatcaaaccttgcaccatatcaccaatatacattccaattaactaattgtgctacaattttttatggaatatattatatattgatctaagatttatacattatattttattttcatatatatctttatatattannnntgcctatctaacggcaattcttggtt

SEQ ID NO: 104906 - DNA, 927 bp, Cannabis sativa
tacttttaaaatcaggaagtcgaagtaatatctccaataattcatgatcactgatcatcgacatgaatgatactcctagtgccatagttgttcatacgttctctctgtctctcaattcttttttttatctctcaattcactttggcatgtatacatctttttaataactaatttcaaataaatattttaaatttgaatgctgatatatgtattttaatattacttaaatttatattaaaaatgaagaggaggaagaataggtgtagatattttggttgaataattcttctacgactaatatctacatgctagctacaaagttgtttatttgataatcattaataatttttttaatatatgaaatatcttaagttagtttgaggtatttatatttttatcatccgataaaaaagtattaactacttgaataaatgacttatcttttatttaaatattttaataaaaaaatatatgttacagaacaaaaccatttgaaaaaaaataaataaataataacagagaaaaaaaaacgggagactcagactatacgtatatatgctttctctattttttttttttttagttttgtatgcaggttaatcaaattgataaattgatcaataatagaataaattggtacaattagtaaaaaataaaatttttgtaagaaataaaaaattggtacaattatcaaaaaataaattttttgtaaaaacgtaaattttattgttgtttttgggtatttatgaaaaaattcagaaaaaaagttaaaagcccaaggccaagcccaaacccaagcaccttgatttaggcccaaaaacctcagcaaatcattcgattgggacgatgaagctctgatttgacgaagctctcttctctaattcctcctagggtttcatttcatctacgcactctcactcgctcaga

SEQ ID NO: 104907 - DNA, 615 bp, Cannabis sativa
tacattttcttcacactcttcttgatcttccgcaggaggatctctttgagccagcggttgaccatggggatgcggtggtttaaatctaaacactgtagccatggaaatactgcgttgtggtgccgccttcgtatcataggagtattgtggtactccatgcgcctcacacaaagtggtgataatgtcagcaagcccgagtccacccccacaagatccctcaaccatcatatcaaaactcgttctaattatatcccccacatttaggttgaagcccttcatgatggcatagatgaatttcaacctgtctatttgagcatcagaatagtgtttatttggtaccaacctagcacttacgaaatatagacatgccttggccaccgggtttagttcacacctaaacaactggtaaggttctccatcgtattcatgaaacctgaggcctgggcctaaagtttgagctacgtcatcataatttgacctcttctctcggataagctgtttcagtggttgttcttccatggtgaaggttggtaagtcataaacgacagggagtgtggaaaccgacactttaacccccctaacttttactttttcatcctctctttctggccaatt

SEQ ID NO: 104908 - DNA, 3580 bp, Cannabis sativa
tttctttattgaatctccaaagagattttaatattcgagacaaagagagattagcctagcaccattacaatttagctcacatgagaagcattgatcaaatacacaatgcactctttaacacccctccaactctctcatattacacttttaagttcagtacaaaaaccaatagtggtgataggcttctatatatagtactcggactaacactaagaagcataacagaaaactaacttttaagatgcaataactactataactacctaaacatgtcagcaaaacatgtggacaaatctctctaagtagctgaatcacacaacaaatccaccttgatttagttactaagacagtttgcagtagttgtgacagctgaaattcataagaactatgaatttcagcaacacttatcaatgtttaggagtttgagacaatgtttaaacttctgtaagatcacactcttggtcagcatatcatcagcattaccttcaatgctgaactttttggcttgaacttgacctttgacaataatgtctcttataaaatggtacttgatgtctacatcagggacggatccacttttattaatgtgggggctatagccttcactaagaaaaatactgccctttttaaaaaattaaatacaatttttttaatttgataattacagatcaaaatagtaaaaaaagcccccatagaattaaatagatctagtaagagtaattataatataggtataaatattttgttaatgataaataaacccccacaaagtaaaaattctgagtccgtcactgatctatatgctttgatctttcatggaggatagggttctttaatcaagtgcagagcactttgattatcccaaaagatgtccacaatttctcccttaaaaccaatctcttgagttaaacccttcaaccagagagcttccttgaaggcctcagttgttgccatgtactgagcttcagtaattgagagagaaactacctttttcatattatacttccaaatcactatgtttcgacacacacaaaataccaaaccagcgagtgattatcttgtgtctatattggctgcataatcattgtcaacataaacatacacttcagcttgttgacctaattttcttcgaaaaacatttcccaaatctattgtacctaggacatatcctagaatccatttgagagctttccaatgatcctctctaggatcagccatgtacctactaacaacacttaaggcttctgctagatctggtctagtacaaaccatagaatacatcaagttgcctataatattaatatagggtacctttttcattcctatctttctcggtttgtagacattgagtttgagacaatatgacatgtgcagccagaagattggctaaatctttgaccttgtccatcttgaatttttatagtactttctccaattaattcttctaacgcatcttgattatacctgattttcgtttttcaaccttaattcctagtattttcttggccctaccaaggtctttcatctcaaattaactatttagctacaactttagcttgttaatctctattttattcccccacatcaagatgtcatcaacatataacaataagtataagttgttggtaaaatagacacttggattgaaattgcttttgacaaaaccaatttgagtaatgaattggtcaaatattttgttctgttgtctaggagcttgcttgaggaggcaaacttcatcttggttttccattttcaaatcctttaggttgggtcatatgaatttcctcctcaagtgagtcatgtagaaatgcagtttccaattgttccacctcaaccctatccatgactgcctaagccaaaattactcaaattgaggtttgcttgactattagagagaagatttcagtgtagtctatgccctctttttaagtgaatccctttgctaaaagcttggccttgtacttgtccttctttaccctaaggattccttctttccatttcaaaatccatttacaactgacaagcttcttgccttctagtttcttaactatcacccaagtttagtttttctttagagatgacatctcttcttgttatgctttattccaaatcttacttttgctactcctcatagcttttcataggtcatggggtctgtatcaatttctcatctgtgggttcaacagtttcaccttcatttatttgtagcattggttaaggtattacaccagattgatcattcctcccctttgttccatcttccacttgaatctgtgcaacatgaccactggtggcaggttgagttataggggttgttctcattggaatttcttcttctctaaagaaaacatcccttttgattatgcatcttctgaaactaaattctaggcaacataacttatagcctttgacaccagtagggtacccaatgaacatgaatttgatagatcttggctccaatttgtcttgcctaatgtgggcataggcagtacatccaaatactttcaagtgttcataggattgttttcttcctgaccaaatatcttgtggagttttaagtcaaaggctactgagggacatctattgattaagtaacatgttgttgtaacaatgatctccccaaaatttcttctcaagcccaactcctttgagcatgcattgaattctttcaacgagtgttatattcattcttttagctaatctattttgttgaagtgttttccttagtttattgtgcctactaatgcatgccttcttgttgacagaatttgatgaaccaattggaacaatactcaagaccattatctatcctaaaaattttcactttcttcccaattttattatctaccaactttctccaattgatgaattgttctaatgcctgatcttttaatttcataagaagaacccaatctttcttgagtagtcatctacaatgctcaagaaatagttttctccacctagaaaaaggatactcttgtacgtccccataggtctgggtgtatgtaggctaaaggttctattgtggtatgcattcccttgccaaatttcactctgaaactctctcctagaacacattcctcacagaagtattatctcccacttaattttcctttgagtagaccttgctttgtgaattcttcaattcctctctcacttgcatgcccaagccttttgtggcaaagctgagtcatatcttcactgttctaagcaactgaggcagtaccagttattgatttcccagaaaggaagtaaagatcacctttaaactctcctttcatatccagtaatgaacctttcataatttcattgtgttgctctcaatcttgatgacataatttcgccgtctcttgagcttctgcttaggaggtggtcaccgtgagaagtcacattgaggctgattttggagttaagctgagaattaggagaagtgagtttgagtgagattgagagtgagaaggatggttagagcaagataacataagaggagggaggctgatgtgaagagggatagtattaaagttagggttatattcttttattttataagggccagcccattttctctctctctctctct

SEQ ID NO: 104909 - DNA, 1485 bp, Cannabis sativa
  modified_base (191)..(193): a, c, t, g, unknown or other
cctacttgacacttggtgttagtgttgttgagattgttctcacatctatatatataatactatttatattgtgttttataatcttctcttcatctttttttttatacttatgtttatattttgtctacagttgtaacattattttatcaatattattgttcttgtatttttcattttgagttgtattttgnnnttggtctttctattgaagcacctataaatttccaacaaaaccaacaaagacttcaaaagaaaatggatcgagaccaagcgatgcatccacaaattctgttcaaagacagtttggccccaacaaatctttcctccaactccagcattaagcaaattcaaacatgatgtacaacttaaaaaacacacacaaaaaaatgaatagaggtaagaatatacatttttcctaaataaaaataataataaataaataaataaaattaaaaaataaaatgttaatataataattgaaataagaagaaaacttaactgtaggatttcatcatctttaaaaaattttctaaaaatctccacatcttcataaactcacaaaaatataacatgacaaaacgcaaaactacatgaatagaatttatcataacacaacaaaatattaattaaattgtattgaaaattataattcacacaatatagggaatttctgatcaaagagacataaagaagattgaaaaaatacatgccaaaaattaaaaaatacattaattaagaaattacatttaaaaaattgcatttaactcacataaattaggaataaaaagttaaattatatataataataatatcttcaattcagactcaagttgttattggcgaaagctatgtcatatgagaaagacttttaacaagcaaagcctagttacaactggctgtagaggtaaatttcgagtagggaaattttataatagcttgttaaatgataatcaagtggagtataagaaggcagtttgggaatgtttgagcgttcgtaagcatagattcatattttgggaggctttaaactcccacctattcacaagagacttattatctagatttcatattcctgatttctcttgattgtccaatttgtttcctggagaaagagagttattcccatctcttctttgcctgctatatatatttctcaatcagagtaaagatttctattacattggttggatttttcagtttggcctttgagttttgatagttgaaagaattggattaatagcacatgatcaggtcgtgtggcttctgttgtgaatgcactcattgtagttacagtgcatggtatttggctcaactgaaataaatgctttcatgaagattcttcctatacaattgtttaccgaatgaaagaaattaagaggttgtttggctttacagtttaaaaactgttttttgttttttaaaattgaaaacagtttttaaaaactattaggagtcgtttgacaaaaatttttaaaaactgttttt

SEQ ID NO: 104910 - DNA, 649 bp, Cannabis sativa
  modified_base (90)..(90): a, c, t, g, unknown or other
  modified_base (172)..(177): a, c, t, g, unknown or other
  modified_base (522)..(523): a, c, t, g, unknown or other
aggtgccccccaagtgaccgagcagacttatgactcttggtcacttgtttttttcaagtatattgtttatctgttcggtgttttgggttngaccaaaccttttgtacgcactgatggtgaaatagaaacatgctgataatttcgactcaatttgaattttgaaataactatnnnnnntcatttattgatcgaaaaatgtgtttgtttctgtagtaacttacatcagagctatttgatctaatctgatcttttagcttaacatgaaataaaacaaattgtagaaatagaaattgtactttaaatgttggtcacctgacctgagtactttccttttgtcaaaacctgagtacttaagagcaaatgttcgtttagtacttagtgtggtcgtccgacctggtactttattggtagtatttccttaaatgttccccattccaatatcgtggtactagaacgagatgcatttttctcatcatacttacccaatttgtattttctggattcgagaacttcgaccacttnntatggtccttcccagttaggtcccaatacacctaccgtaatgtctttggtgtttaagaatacccttcttaggaccatatctcccacgaagaatttctgagccttcacttgtttgttgaaatatcga

SEQ ID NO: 104911 - DNA, 518 bp, Cannabis sativa
atccattctttaccagattccttattagacacaaccaacacatctgctgattcatacccatcttctgcaaccttagtttcacctctttctttgcttttacccctggcattcttggcctttaatgctctacattcatctcgaaagtgtccttctttcttgcagtagtaacagaactttccactcttgaatttagacttagtcttgaattggctattacttctgaacttgttcttgaattctctcttatcagttcttcctcttccaatgtaaagaccatcaccattcgaatcacccctgacatcaattttcttttagatttcttttgaattgagtgcagccttcacttttgacatggtcaatgtatcctttccatagagaatcgtatctacaaagtgttcataggttttaggtagagaactcagccagatgatttcttgatcctcttcctcaatcttgacacctatgttgttcaaatcaagaacaattctgttgaattcatcaagatgacatcttaattc

SEQ ID NO: 104912 - DNA, 656 bp, Cannabis sativa
aggtatgtacgcatccagatattgcgtacattgttgggatgttaggcagatatttaagcaaccctggtatggaccattggatagcagccaagagagttacgaggcatcttcatagaacaaaagattacatgctcacatacaagaagtcagatcatttggaggtcgtagggtattctgattctgatttcgcgagatgccaagatagcagaaggtctacatcaggctatatttttctgtttgctggaggagctatatcctggaaaagtgtcaaacagacacttatagcttcatccactatggcagcagaattcgtagcatgttataaggcatcaaataagggaatatggctgagaaactttgtcactaggctgcgtattttggagaatgtagaaagaccactcaagatattttgtaacaataaattagcagtgctgtattccaataacaataggagctcatccaagtcaaaacatattgacataaagttcatagttgttaaagaaagagtgcagagtggacatatatccatagagaacattgggacaaactccatgagagcggattcgcccataaaaggattaccacccaaggtctttcatgggcacactgctcatatgagtgtagtattgcttgaggatatcatgatttagtgggag

SEQ ID NO: 104913 - DNA, 774 bp, Cannabis sativa
aaattcatgcgtgtctttgttaattgttggcctagtatccttgacgaataattttttttgataggctttgccaacctacatggtctccacagaagccttcataaatttcttgaattatttcattggcttctgctggtaacacacaccacaagagaggcatggaacaacccctcctgtataatttgccctcaactattgtatagcgaggtattgaatacaaaagtttgcgtacctcagttttgtctgtaggaagttctccgttgagtagatacttgactataggtgtcatccatgttggtgaagtatctatcatctcgacttcttcctcttcacatatacttgggtcgctcaagacttcaactggtactaaattcaacttgtcaagatcatattgggatgctagttttgataatgcattagccttagagttttgttcttttggaatttgttcaattttaaaataatcaaacttttccatgttcttccaaaccttctctaaatattttgccatttttaatccctttgcttgatattctcccaagacttgatttacaatcagttgtgagtcactaaagcatgtaagattcttgatttttaatgcctcagctattctcaaacctaccaacaaggcttcgtattctaccttgttgtttaaagtatcaaattggaatcttaatggatagtggaatttgaatttgttagacgacatcattatgactcctgcccctgagccattctcgtttgaagcctcatctacatataactttcaagttt

SEQ ID NO: 104914 - DNA, 620 bp, Cannabis sativa
atgtaatttattgaagaaaaaaacaagtgaaaagtttatcacatattttacatcaaaaggtatattaattattattattgttgttgttgttattattaatagtattatatttatatatacatattcgttaattatgttttttttttatttcatattatttattaaataatataataataatattttatatatatatatatattttttttcatttttgaagtagggcaacaaaaattgatttaagtttaagtatttataaaaatttattaaattttaaattttacttatatacttatataatgatactttcacatatcctccatatatattttatataaactatatgtatcttcctttttaccaaaaaaaagtatatgtattcttttttttttagaaaaaaaaaatatttagtgttattcttaaattttattattaattatttgtaaatttcaaacaaaataaaaaatttgatggcaaaaaaaaaatgaaaaattaactatagaagttatatatatagatttaatcatatcagcgtagtatttatttaataatataaataatttttaggagaattaccccatgtatttgttttttaacttttttttttttataaatttacg

SEQ ID NO: 104915 - DNA, 883 bp, Cannabis sativa
  modified_base (849)..(852): a, c, t, g, unknown or other
ttttattagtaatcccgtttagggaattatggtttcataagtattttgggtagcgtgcctaattatttagggtgttacatgaagtgtgttggatataggaatgatggaagagttgttgatcttgtctctgatgaagtgacagtcaagttctatgtgtttggctctttcgtgaaaaattgggttgtttgcaatatgtatggctgagttgttgtcacaatagatgaaggttggatatggttgtggtatgtgaaagtcatgtagaaggtattacaactatgttatttcgcttgttgtgctcgacattcagcttcggctgagcttttggagatagtgggttgcttttttatgcatcaggaaacgagacaatctcctaagaaaatgcaaaaatcagtggtagaacggcttgtaatggggcatgatgcccagtctgaatcagagaatctacggaggtgcaatgttgacgaattcaaatagaggagtccttgtccaaggctgccttcgagatagcgaagtagatggtgaagagcttggagatgtgtagtgcgtggactagccatgaatcgactgagaaagttcacgacaaatgtaatatcgagtctggatagagtaagatataaaagtttcccaacaagttgtcgataatgagaggagttgtccaatacttctccatgttcattgtccattcatcatgatcgatggtgaacaaaaaaacacttcaatattcagctttgaaatcaatttcaactcaacaaaaaatataattagagcaatataattaagaattatttattttatctttttataactattaagattttaggttatatgtcataataataataataatannnntaataataataattttttttttttgaaggga

SEQ ID NO: 104916 - DNA, 577 bp, Cannabis sativa
aagacgtgttgtacccccagtgattcttcacgcacaaaaaagtacgttcatgcaagagtcatgtttaatttttatgaggaaaacttcgacttccacacaaaagttcttgaatccctgagggaattcagtattcataatgtctggatggaaaggctcgagttcctcgtctgagtcatatccagattgttttccatatttcccaacttgatacctcctaaatttttcctccaactcataaattagcaattggataggattctcttgcttttgactgagttattggcgaaggtcaggtgttttctggttcaagtgattacgaagatctggttgttgctggttatagttactcacagacctcgtcttactcatggacctcgtcctgctgaaggaccccgtccttgagtaactttcagttctacttgtgcttgtactctcttaatcagtactgcgactagttttgtcctctcctcgcgttgatcgactatagattcttgtgcgtcccaagctggcactcacctcatcacgtaccggccttctcctttgggtatgggttgttgcatgccccctactggggttt

SEQ ID NO: 104917 - DNA, 1015 bp, Cannabis sativa
attaatgtgagaatatactttgtggtaacttgatatgtttagttcataatattttataaaacttatttcaaaagttacgaaattattttaactaatatgtttggtgtgtctaagtgagtgtgagtgagtgagtgagtaaaagagatcaattgttgttgtgtatttaataattactaagctatatttttcattttacttgattgatgaggtgtgtaaaattttctttaaagttcaattgtttgttagatattattttataaaaaataaagtatatacagtataatggatttgtaaggggaataataaaaacaaatcgagtgtatatgtgaatgacgaaagagatcctgatacctctaattattgatctttgagcttcattctcagtgtaataactttgaattgggtaattggacttccaacctatctctactctttttagatagaatttattgtttttacaaaatgagtcaggagcacggggatcgagaccctatatttataggtgagatactttatcagtatctgttccacattagttgtcaaaatattttgataattaatttaaaaaattaaatcgggaaatgaatgattcggtaaatcgtaaactgaccatatttagaaaattcatacttctcacatattgatttgtgatcaaatatagtcagcaagataatgcaaaatcaaattgaatgatattgtaatattactagaaatattctaatattctcccacttgatcagtatttagatttaccacttaaactcaacattcctcattacataataaacatataaatcatagcgattaagttcttattatatgacgagtattattttccatatataatgatatattcagtacataacaatatattttatgtagtaatgtacttaagcgaataaattttaaacattatgtttattctggtcctctaaaattttctcaaataaaaattaagatgtgcataaatatgagaaaatatcaaaataagaatttcattaataataactttatt

SEQ ID NO: 104918 - DNA, 1131 bp, Cannabis sativa
taacttggatcaacatttaaatgacgacagataacattagggttaattcctatcatatctccatggctccaagcaaactgatcttggtttgccttcaaaaagcctattagctactatttgagctgctcgtccagggtcttcccaatgtatacacattttgtgggatttcctgggtcgagaataacctcttccaattctttgattggttttagcaggtttctttcatcttatactcggggatcaagatcttcgtctttcctcttgttttcttctgccaagatcgtcatcaactgatgaccaacttttctatgttgtaactctatgcaattgcaatcgcgagcaaacatctagcaccactcccacgccatctggcgtttggaatttcaaggattggttcttgatcgaactgactgcccctagtccaatcagtgctggaccaccaaaaaaaatgttgtaagcttagggcaggtcaacgactaagaagtcttgcataacagtagcagatagaggtgcctcgcctaaagttaatgcgagctcaattatgccaaggctagcgatgctgtctccggtgaatctggaaaggttcaccatacaaggtcttaatttggctttttcgaaccccattttctttacagtctccttataaaggatatttaccaagcttccattgtctagtaatactatcttgatccttttattggcgagttcaatggttatcaccaatggatcgacgtgaggatatcccatatttttctcatcttcctccgtgaatgtaatgggaggttcctcggttttcaccttcttggaaggttctggggcaaagactgattgctcgttctttatctctttcacatatcttttttgggtatttttgctttcccgtgcgatatgtggccctcccaaaataaccaggatgtcctctccttccacaggaataggttgtaacccctagttatttgggttattgggcaaactgggctggttgtatccctggctctgtcttttcacatactgcttaaaatggccttgagcgatgagactttctatctcgtctttcaattggcaacattcgtcggtcgcatgcccaatatccttatgaaatttacgatatttgtttggatctcttttgct

SEQ ID NO: 104919 - DNA, 934 bp, Cannabis sativa
caaaacacagggtccaatcggtaatttttacaaaacacagggtctaaaatggtatttacccttatacaaatatatttcaaaacatagtagatcaaatgtctatttcattgttatttataaaagaaaaattataatctaaaacaaaattaattttttttatacatacaattttttttcttgctttgaatttgttatttgttattttatttattttaattttttattagagacataaaaaaaaaaatatttgctttattttgttgttagttatgtgaaagaaaaaaattatttttttaataaatattaaataattcaatattaaaaagtaacaaatccaaaataagcgatcaaatccgtacttttgcagattggattagatttgaattattatgcagatagaatttgattcaaaatatgaaatccgcacttagtgcgaatcaaatgcactatgagaaaaataatacggattggattggatgaacacacatagtaattatacataattttatggtggtatgagaatttgagactgtaattgagacctctaaactatccccaattacagagctacaatataattatgtggtaaaaaaaattatataattacacaaaattctaattttcttttggcttttcaaacacgctcttgtggtgtgttttgaagtaattgtgtaattattagggtagtaattatacactaaagtaattacactatattttaaaatataatgcatttttagatgtaattagtaattgtatataaattcttattttttatatttgacaaatgagttagtaattatacaatttaataacattaattatttaaaattagtaatattttgtagttacacacttacaccttgaaaaaccgtgtttttgtaaatgtcagttgtatataagaaaatataaaaactgtaagcgtttgcagcag

SEQ ID NO: 104920 - DNA, 8936 bp, Cannabis sativa
  modified_base (2612)..(2618): a, c, t, g, unknown or other
ttgaagtggcaaaggacaaaggaataatttcaatcctagttggaaaagcgattctaaggtagtgatcaattcactcaatgacttcgaccctagatgggaaattgagaactattccttattttgtaatagaatcgtttcatcttttgttagatgtttactatgtattactgccataacctgtaattttatggctcacaatttggccagatgggcgttttcccataaccgctttgggtgctttgatgtggcatctatccctatgagtattttatgtaatgatcgcgatgactaattttataattaatgaatgttaattttcaaaaaaaaaaaaactataaaaaaaattaattttttcttacaattgcacttataataattcttataaataaaattataatatttcctataaaagaaaagacaaatattcttattttaaaataatactaactgattttgtgattctaacctaaataaacaaaaataaagtaactgacgaaaaaaattgagaaaaaaatataatttccaattttctaataataaaagattaatttcttattactacaacactttaggattctcaagtataatctttcctacaaaattgtaatctccgcttttctaaccataaaagattaatttcttattagattgcacttgtgatgattcttaggattataatgtatatttcaaaaaaatatattttttataataattttaattgattttgtgattctaacatcaatcataaacaaataagtaagaattaacaaaaaaaattataatctctgattttttaaatataaaaaaataatttcttattactacaacacttaagaattcttatgaataaaaatataattattcctgaaatattgttttttttttaaataaaaatataatctccgtttccctaatcataaaagattaatttcttcctccgacaacacttgtgatgattcttgatttcttaagaataaaattataatatttccaaaaaaaaatggacaaataattttttttttggagataattctaattaattttgtgattctaacataaatcataaattaaaatataataactaacaaataatatatataatctcctattttctaattataaacaaataatttcttgttactataacactttaaggattcttatgaatgaatgtaaaatctttcctaaaacattgtatttttttttatttatttaaatgaaatgtaatctccgtttctctaattataaaagataaatttcttctttcgacctaatattgattctttggaataaaaatgtaatattttttttaaaaaaataacaaataattttcttttttctttttggaaataattctaagtgattttgtgattctaacataaaatgtatatactctgatgttttaattataaatattaatttcttcactacaagactttaagaattcttatgaataaaagtattatctttcctaaaacattttttttaaaaaataaaaatgtaatctctgtttctctaatcataaaagataaatttctttttcggagcacattctgatgattcttagaaataaaaatgtaatttttccaaaaacattttttggaaataattctaattaattttgtgattctaattccaacataaatcataacaaaaatgtaataataacaaaataatctcaattttctaattataaaagtaatttctacaattttctttatgtaaaaaaaagtataatctttcctaaaacattttttttaaaaagaataaaaatgtaatctcggtttccctaatcataaaagattaatttctttttctagcggcacttgtaataattcttaaaaaagatataatatttctttaaaaaaaaaaatcataatctcgatttccctaattataaaagattaatttcttcggcacttgtaataattcttaaaataaatcaaaaaatacaatatttcaaaaaaaaaaaaatcataatctcaatttccctatttataaaagattaatttctttttctaaccgcacttataattcttacaaaaaaaatatatataaatatacaatatttccaataaaaaaagaattcataatctcaatttctctaattataaaaaaaataatttcttcttccaacggagtttgcaacaattcctacaaataaaaatacaacatttccaaaaaaataattcacaaataactttttttagaaataattctaattaattttgtgtttctaacatatatcatagacaaaaatataataactaaaaaaaattaagatccatttttttttactaaatccattatttttttaaaaaaaagaaataataaatccatataagtagccaacatggccggtgcccccgtcaccggatcttcattggtctttttagctttaaataacaactttctctctcttctctctctctcatcatcatcatcatcttcttcttctctttatttccctctgcaaaaaaaacactttctctctccaaatttacaaatctcaaaagcctaaaaagctacacacagaaaaaccaacacacactgcaataattcacttttctttcttcctttctttattgccagctctctctctctctctctcnnnnnnnctctctctctctctctctttatcattatcatcatctcatattcatacagagatctatttcaggtacgtttaattttcatttctccatttgatcaatctgattcgcgatcagcttgattgaattttccggttttaatttgtaagcagatctttttgttttcattttgtacaatttgattgatctgttgagttgaatatggaaattgttttcaggtttacttttggctgtttttggttttggatgtctgatctgatttttttctttttgtttctgttttttagtgtttgatcgtgtgtgttgtttttgtcttcttttgattgttctgtgatgatcttgctttttcgtttttacattatgttgtacagttttgattttattcagaggttttgaatagttttgtaaatacttgcgagtatgattggttcagcaatacaattaagaagatctattagaaaagatatgtagaatgagaccttatctggtttctcttttttctggtatttttctgatgagtgcagaacaacacaaatttcaaaatatctgaatgtaggttcaaattttaattgagttaaaattgtttattttgtgttactttacactcatttggattggagaggctgaaaatgtaacagacttaaaaccttttcactcttctaatttagtttttattggtgttttgatgataattctcctctgtgttcttggttgctaagaaggttcactgtttggttagatggggtatccttttctcataggagctgggaaacttggggatatgatatgatgatggatttttattggatatttgatttactaagttggatagattctagttgtaaggtaatctggagccgtgagacatgcatgaacagagagattgttgtttttactgcagaataaggatagagtttgacattgaatgcgattactcatgtttattcattgtatgaattttgtaatggagggaagtcttgcaaaacaaagcatacaactttctttgttttttagttggcaagtttgttagtgggactaacaggtgagctctttccgtggcatgcttttatgaggtagtatgaattccgtcaataacacagatactgaaggagacttctcttaaatactgctgattatgcatgttatttgcgagaatcatctaagaggggactgtttagaatcatcatcatcatcatcaagctttaagctaagatgcagatacatatatagattggtggatgaccaagtactaactttatatttttcaaagaaaagaagtgcttcttggttagatttacatcccccctggtatctagctgagcctgtatagaaagtaaaagagatttcaaagcaggaatactctcaaggataatcagcttcatgtaaaggctacactcaaatgcttgactgaaatagtaagatggataagaaagaagatggatatattgtaggattatcttgcgaatctaaaggggtagaggtagttagaaaaaaataggaaataaggagttggttggggtttttttgttgagattatttttttcacatattatatatcatgtgaaaggaagtcatcaggaaaacagccactgaggttaaagaagttttttttgggggtaaatactgctgggaggactctgttttccattacagtgtggagtggattttaggaaagatggattacatcagaacaaagtaataatttagacatagtattcaatacaagtatgccgaagaagtggaaggctgatgaccttaaattgcaacttgataccaaattgaataacttttaaaaatagagtctcagtttagtcttcccttagattgacaggattccaaacacactgcttgtagtatatttgcatgcatatgcatgaaaactttatttactttctacacaagtctagtttgatcatgtgctgttaccaaaaaatatatttctgtttgcttgtttttttttttttttttttgaaggactttttgcttgtttttaattataaaagaaaaaaacatatttattgtgaataatacaatgattaatacacacgttatactagaaacccacttctaatttctgttattctgtagaaattcaaaaattcgagtttgcctgatgagtaaatatatatatatatatatcagaaaataatattttaaagatttttggaactgtgtaatcttatttttcattgaaaaagttctttttaagcaactcctattttattttattttattttttcttgacattttgtggaatgatttttgttttttgcagttatatattgaagaacttccacaaagaaaaacacaggaagttaaaagtatctttcttttttctttgcttacaaaggatttcatacaatgtctagctccacaaaagctttggatcctgcatttcaaggagtgggtcagagagtgtatccttttaacatgaaacatggcttaagaaataaatacgtgaaaatcttttctttttccaaagaaagagagaatcaaactttatgtagttgactttcatcactgaagaaaatagacgagtgttttgtctactttcagttgactgcatgttttgttattatcacttcatctttttcttttttccagggaagttaagttgtctctttcaaattttgatttcatttgtgttaaccttaacatctccttagtgggactgagatttggcggattgagaattttcaacccgttcctctaccaaagtctgattatggaaaattctactctggagattcttacatcgtattgcaggtatgtagttggtctataatgttgtataccatacatgttctcttgtgtggactaaaatcagtctagatatttcatttgacatcacaagagaatatacctaaaacatatatttgataagtggttactgattagtgtcgaaacgcattaagaatatgttctgcatttcgagatgccaattttcttgtgttattctgggcatagtttgaaacagctatcgtttttttttttgaggtcttgtgagaagaataattagttttgtattgaaaaaatgtaagattatggtgaacaatgtctagtagtattgtggaaaaattgcaattatatgactgctttaatttttcagacatcacaaggcagaggcggtgcttatgtatacgacatacacttttggattggaaaagataccagtcaggtgtgttttacctcttgcctcaagtttgtgttagtatcactttcaaataaatcctcaaaaaagagttcatagaaatggttttacttaacgtgaacttcttatacatgattatgttacttttattgtaggatgaatctggaactgcagctatcaagactgtggaactcgatgcatcccttggtggacgggcagtgcagcatagagaaattcaaggacatgaatctgacaagtttttatcatacttcaaaccttgtatcatacctttagagggtggtattgcgtctggatttacaaaacctgaggaggaggaatttgaaacaaggttgtacatctgcaaaggaaaacgagtggtcagaatgaaacaggtttgaattctttcaacaatgagatctgtatattaagttgagaatttttaattatttatttatgtgtgtgtataaaataagcctgcatgaattcacaaaataccactccacaattttgtttcttttttttttggtgcaggttccttttgcgcgttcttcactgaaccatgatgatgtgttcatcttggacacccagaacaagatttatcagttcaatggtgcaaattcaaatatccaggaaagggccaaggctttagaagtaattcagtttttgaaggaaaaatatcatggtgggacttccgatgttgccattgttggtgagtacatattctttgtctgtatttatatacacatcatagtgataaataatatatgtgtcatgcataatggttataatttgctttcttctcctcattatgattgcattttctgctatgactttaagccttttagtatatttgtattttacagtttctccttttcatacatatactttggtcttaacacgtgttcacctttctagatgatgggaagttggatacagagtcggattcaggcgagttctgggtcctctttggtggatttgctccaattggcaagaaggttgtctctgaagatgatattattccagaggctactcctgctaaactttataggttcctcccctctctctctctgtgcattttagaattacgagcacgagagatattttgaactcgttatgccatttctaattttcttttgaacattaacctgtctattatacttcaatctcttattgacatctttcttcagaaaggttatccagtgtgtagatgtgggttgggtgtataaatcatgtactctagtcatctttctgttaagtgtttatatgaactttgttagtatgtccactttttgccatgtatttatggtagtcagactttctgtttgtgagtaatttaacttgattccacatgctgtcactacgaatttttattttagagtttgacaagcctttgcatttatggtttgcatctgctttagtgtattcatttttctaattttggatttcattttgtgatataatttatatatgccaagaaacaatttgtatttcatggtagggatgtcatattctaatatgtgcttaggaaaatcatgtcactgttaatctttatgctattgtcttgtagtgggttaaatagtcaatgtgatgtcctaacttggtcaactaattttgtagcataactgatgaagtgaagatagttgaaggtgaactatcgaaatccagtttggaaaacaacaaatgctatctgttggactgcggtgctgagatattcgtctgggttggacgagttactcagctagaggagagaaaggctgctatccaaacagctgaggtagtaatataaaatctgtttcttccccttgaacaaaatatgggtttctgacccacaattttgccaccaggaatttgttgctagtcaaaatagaccaaaagcaacacgtataacccggcttattcaaggttatgagacacatgcattcaaatcaaactttgagtcttggccatcgggatctgtagctcctggtgcagaggaaggaagagggaaagttgcaggtattgaatcattttcatcagctgtgtggaccggatttgttctgcttagctcgattaatggtattttttctctctgttagctttgctgaagcaacaaggtgttggtgtgaagggcatgacaaaaagtgcccctgtcagtgaggaagtcccacctttgcttgaaggaggtggaaagatggaggtatggttggcacttcattgccttgaaagaaagtctcatatcataacaataactatggctgttaatatcaatgtcttttgattatttttttttaaaaaaaattgcaaggtatggcgcatcaatggcagtgccaaaactccattgcccaaagaagacattggtaaattttatagaggagattgctacatcgttctttatacttatcactcaggtgataggaaagaagattactttttgtgctgttggtttggaaaggatagcgttgaggtaagcaacatacatactttcctattttgagaattaaatataaggaaagttccatttcggtatattattatacataatttctgtgtacatagaaaccaagcttaaacattatcaaccttgggttatggtaatatttgttacaaagcaaagatcattcacacaaaaatgggcaactaagagcttgttttaaaataactttaggtatatatgggaatgtttcacattttggtatcttttagaatgagactcaggtggtcagctcattgcatagctacagtttctgcaaacaattctaaactattattttctatgacaatttggttggtttgtttttatctggattatctttttccattgttacttgtactataacatgatgttattttattagttttcagagcatttgcttgtcttttattttttttcttttcttatattgttagtataaatcaatgtttagttaaattatggtgcaggagtttcatttcatatatgttttgttcgattggaatgttagatacttttgcaaatttgaaaccgaccatagctaaaaatctgttaatagtaataagcttgcttgaaaaagtaaagttcttgccatatttttgttgaagaccatatgttcttggccatgtttgattggtcaaagcttgtgtgtctatttccaccaatttaataaaatagaattgtttactatttgcaggaagatcggaaaatggcttctcgtttg

SEQ ID NO: 104921 - DNA, 1269 bp, Cannabis sativa
  modified_base (129)..(129): a, c, t, g, unknown or other
  modified_base (157)..(165): a, c, t, g, unknown or other
ttattgatgaaactattttttttgtctcttttaatgaaataattagtttcttttgatattgatgaaactggtttttaaagttattatcgtttttagattgtattgtttttttcattatcttgttgatgnaactattttttttattcttttaatgaannnnnnnnnttctttcaatgttgatgaaactatagtttttaaagtttgtattctttttagattatgaatttttatattgtttttttttttcaggatgatgttgatgaaactacttctttttttttttgctgtttttaatgaaataattactttttaacaaaaaaaaaaaaacaaatagtagtttaaataaaaaaaaaaacaagtttaatttctataaaaaaaaaataagatataaaaatgtacatttattaaatatatttatatttatatatacaaagagaaaaaaattagtttgagaaaaaaaaattaaaaaaaaaaagatagacacaaagagaaattaaaaaaaaaatagaaaaatagaaagagagagaagagaaagagaaaaaaataaatcagcaatgacttaaaaaataaaaagaaaaaagagagctaaaattggctaaaaatatataaaaaagacaaaaaaaaactttttgaaactttaataagtaaaaaacgttaaaaaattaaaaaaaaaattaaaaaaagtataaatgtaaaaaaaattcttgtcaaattataaatgtattgtttgaaaaaaaaaaattagtattttgtgtaaatttttcaaatagaaaaaaaccgtaaaatgtaaatgtaaaataaactaaaaaaataaaactaattaagctagaaacaaaaacatgaaatgtgagtttggataataggttttcaaaaaaagggcatatcaaataccataaaaaatcttaaatgtaaaaaaataccatagaaaaatagcaaacttataaatgtcatattttataacttttttttataaaatcccatgtttcatgtaatttttggttaagtatatgtgtattagatgtagtatatacctgatagaagaataagtacttatgcaaatataatatgctatagatgtgataaaattcaaaactcaaagaaatttgatgtggtgactcattgatcatccagttaaagttgagattttttttttattaaattcttaataaaattaaggctaattagtaattctttctcaccgaactttgacatgtactaaatcatgtcccctgaacttttttggccgttaaaaatttcccccgaactatt

SEQ ID NO: 104922 - DNA, 627 bp, Cannabis sativa
ttacaaaaaatacggtctttttatgttaaattcttgttaatttaatgttgatattttattatctgtatattattttttgttgttattttgatgctattttcatgttacttttatgtagttttcttgttattttcatgttatttttatgaaaaactgtaaaaatgtaaaaaaaaaaatctctaaacgtgaaaatataattttttttacaattataatgccttatgtaattatcacttaaaaaaatgagtgcaattacattacattatataattactatttctaataggggtgttgattggactacatctatccagattcgttctctaattatatattggatgttaaattttatcatctgatttgatttaattaattttagtcattcgatcgatcaataaatgttggattggatccaaaattttaaacttaatattttttagatagaattggaatattttaaattcaatatttattggttcaaaaaaaaatcttaatatttatatatatatatatatatattaagtttaataacataattttcaattactcatccaaattaaataaaaatactaattagttcgattggatattgaatgtattgaatttttggacaccctatctaacatc

SEQ ID NO: 104923 - DNA, 747 bp, Cannabis sativa
  modified_base (26)..(39): a, c, t, g, unknown or other
  modified_base (435)..(442): a, c, t, g, unknown or other
gtaaccgatccaatccaatccgcacnnnnnnnnnnnnnnttttaaaaaattataatatatattataaattaattttctagtaatattaaaaaaaaagacacaaacttctaattttttaattttttttagtaatatattgagttagtgtattttatttgttttataataaaaaataccaaaaaaattattcttattcacatagacacacataaatttaaatatatatatattcttatttattttaataatgaatacatatatattttagtgtaaatctaaagatgagtacatatatattgacatatatgtatattgaagatgaaaatatattattattggagaataagaaacaatagtctttttttaattttttttctatgaaatattaaataatttaccattaaaaaaaacaaccgatccaatccgcactattgnnnnnnnnattggattggatttaaactgttatgcagatcagattggattcaaaatataaaatccacacttagtgcgaaccggatgttgtttaaccaaaaaagtgcggattagatcgatgaacaccactaggcttacaacataataatttgaaaagtttgagctttatttgagtgaatatggtgtccgtataggtactcttttagaacatattgttaggccttagggtaataaataaagagggtaattgggtaattgtaatgggagggattgatgctatatatatgagtaagtagtgagggtaaggggtagaga

SEQ ID NO: 104924 - DNA, 557 bp, Cannabis sativa
  modified_base (67)..(68): a, c, t, g, unknown or other
gtatattaattttctgtactacgatatatctaatactgttgtatatatttaaatgatctaatatatnnatttatttttgttacaatatcataatatgcaatagtaaaaaaaattatgtcatttaatattgttattatatatttttttttttaaattaatatgtgataaatctatttttataatttttattatctaatttattagatttggtcattttcttaattttttaaaaagtggacatttactaacttagttaccaaattcaggaccattttgcatctcacatccaagcttgaggcccaatcagtatctggatatgcttctaaattgagcaatattgaaggcctaaaatgtaatccaagacgaggtgtggttgtgacgtatctgagaattcctttacaagcattccagtgattcattattagtgcctttaaaaattgacttagcttgttgacactataagcaaggtctggtctggttaatgtgtaaagcccgcttagttaatttggaaattatcagttgtttacgattaattatggaattatttatagctattt

SEQ ID NO: 104925 - DNA, 652 bp, Cannabis sativa
  modified_base (163)..(169): a, c, t, g, unknown or other
acccccaaactatgggggatacaatgaggctggggagccagtcgatgctgatgatgacgtcctggttgaaggtgtggactacgtcagtgagaaacttactactgcggttcctcatagaaggcaaggtaccttgggtgccaagtgggtgagccctccgtccaannnnnnngaggcgcgcctgtgggttctcgaccaggatgtctacctgggcgacttggactgttacattcccgcccacaataatcgagcaacaaaccatgaaaagggatgtgtgcctggtcgggtgctcatgcccagcaaggggcattgttacctttgcacccgtactttaagaatgtggcatacttcttccgcctctgtccgacccagttcactcccaagggcattaagtatttgtccgccttcttcattctttatacctcccagaagtgggatatgccttctccccgcgaggttagctggttttttgatttgaagtccacccctaagcaaggaggtcgggtacttctatttctctcaaccagacttcaagtggttgacgggtaccagggattcggccatcagtaaaattggggcgttttgttgatgagtacttcatggtggatggcatgggcaccacccatactcagtttcagcagatccctacatatca

SEQ ID NO: 104926 - DNA, 552 bp, Cannabis sativa
  modified_base (358)..(360): a, c, t, g, unknown or other
  modified_base (416)..(418): a, c, t, g, unknown or other
acttggaattgaattatcaaaggaacaatgggttcaattcatacttaatagtgttcctctagagtataatggatttgttgtatcttatatgattaacaattttgactcttctgacatggataagcccgaaggagaattgcgagctcatgaacagaatttgattgcaatgccacctcccggttttgcaaactttaatcagaggaaaaggattaagcatgaagtttctaacaaagctgcttcttcaagtacaatggacagtcatattcttctatgttcaaattgtaacgagaagggacatcaggaagaacgatgtcctaggcttgtaaaaaattcgaacgaaggtaatgcttttgtcttnnnatcatgtgttttagagaatgacaaatccttatgaattgttgattctggatctactnnncatgtttgttcttcattgcagctgcttgaaacttgggaaaaccttcacccagaggagttacagcttaaagttggaaatggcgagttagtatcggtccaagccaaaggaaaagcccgcctcaagtttcaaaataa

SEQ ID NO: 104927 - DNA, 632 bp, Cannabis sativa
atatcgatccgatcgtgtcttacaaggcgtgggagcgtatattggaacgtatgtttcctcatgtccgaaaaattttgcgggtatctggagagactactttagagttcgtgtcttgatcaatgtggagaaacctcttaagcggagaatgcgaatttacaagaacaaggtggagtggttctgggctaattttaaatatgagagggtgcctactttttgcttcatttgtggtataattggccattccgaaagattttgccacagattgtttgaggagtccttggaaactattgcaaaaccatacggtctattcatgaaagcgcccgatagacgacaatcacgacagatcggagctcgttggctaagagacaatatgggacaacctttggaggctggcgccgaccaatactcactaggaaatcagagtacgggggtggttgattctgaccgtgattctagggatgtaataatggcagatggcgtggctaatggagagaaatcagggatgttaagggaggttggattgcaatcggttgggggaaaaaatcatggaaaaaatcagggtatactagttgttgatttagaggagggaaataatgaagatattcaacaagatggtcttcttattgctgatt

SEQ ID NO: 104928 - DNA, 502 bp, Cannabis sativa
ctctttctctcttcatcttcttcttctttcttctcttctactttatattattttatattattttataacagatatgtatttatttgttttttttaagagttaccggacatgtattagcaaccatatttttataaaattatatacaatattaagttttagttgataacttccaaaaaaaggaaaaaaaaagttttagctaatcactcgagatcatcaatgcattcttttagttactttgtccacagtaacagagcataatttttattacgtgggagtttaattatgattaattttttttttgtttttttatgtttgttttatttaatttatttatttttgtgggtttcttttttaattgtgctataattattaaataaaaagaaaaatatttaatttgtttttaccacaagtctataagtgtgtccatcacttcttgtcgatatttagattatcaagtttcttatatgtttgtcttcctagttaatatacttttctttttccc

SEQ ID NO: 104929 - DNA, 656 bp, Cannabis sativa
aaaaaaaaaaactaaattcataattaaatttgtaactattagtaattaatctacacatttttatttgttacttttaggttattttaaatttaaattaaaataagatacttatgtttttctaaaaattaaatcaatataattatatagttataatcaatgtctaaatcatgacttttagacattgatttttgaagaaaagtaccaacaattatcaacttaaatttccataattcatgtataataataaatattaatattaataataaattttttcaacagaagatataataataatagtaaatttttcttctaataataataataaatgccttttctattaaatattaatattgattgtaaatttttttgttacagatatagtaataataaataaatatttcttttaatatgataataattaatggcttttaatactcatggactattaactaattgataaatttcattaataaaaagtcaaatgtaaaaaaacataaaaaagaataaccgacctaattattgctaaatatggttacttttcatttgttattgtcattattataatatgataatttttaattaccattttagctcttttaatgggtaaaagaataaatatttcaattagcacacattaaatttagatttataatcct

SEQ ID NO: 104930 - DNA, 505 bp, Cannabis sativa
atttaaccttatggttaattttgaaatttaagattattttatttattttaattataagatgaaatattacattttcttattaaatttaaactatcttattttggtattattatttttaacattaatcttgtttaaatttgaaaatttgctaaccatatatatatatttttttttcaaatttgatatttttgaaatatattttattaatttaaattataagattaggaatatgttagttttaacattttatcttattagacattttttttattaaaattaattttggaaaaaataacatgaaatttaaaaaattggttagtttaggtttgaatagaaattttagtttttctaaccataaatttttttaaacttattttttttttattttttaataaaattggaattattcgaaccataaaatatcttatttttcaaatagtttattttgtaataattaatttattaaattataagactaagaaaaattaagatattatattatatt

SEQ ID NO: 104931 - DNA, 618 bp, Cannabis sativa
tttccatgagtcgaactttccagttacattgctgggcggcttccaagaggctggcaggaaaaattttggaacatatgtctcctcgtactccttgtagatccatttgcatctcaaaatacttaaggtgagataatggatcttccttactcgtgtacatcttccaggctggcattttaaacttgtggggcaactctagaagaatgatctcgggggagaaaggggttccatgtgctcaatccaactcaagatcgttgttcctctaaccggccatgccttggaacatactttttagttcgtccagctgttcctgcatagctggactaacctgttcggcattttggccaatctgagtcacatcagcatctttctgagcaggaatttgaacacgggttctgggctacacgatcggcgtgtcaagctgatcgtccactcctctcctcctattcaaattgtttctgagatcatgagtagtccccaatctatcaaatacggaaatgtcaggttgtctcagaaactagttggtctggctaacgtgctgactggcaccattaacctagttggaattattgggtatgacttctcctgatgaattactagacaaagtctacccgcctacca

SEQ ID NO: 104932 - DNA, 864 bp, Cannabis sativa
cattactaccacttccgttaacttatcataaatataaacacgtggagggctcaaatgcattaaatttatttattttattttaaaatttagtattgttaatatcaaaaacttaatactacttgtttaaaaaaaaaaaaagagagagatgcaatactaaattaccatagcttagtgaaccagtgcagtatatggaacatgattatcgaattgaagtgccaatatcatgtgaaaattgttatgagaactaatttttttttggaacaagtagcatttagtttctgattttaagaatattaagttttaaaataaaataaaaataaatgtaatgcatctgaaccctccgcgtgtctacatttataaattaacgaaaatagtagtaacggtgtaagagaattgtaacattaggtagttttgtctccaaaaataaacattaggtatttaagtatataaaatttgaaacattaaatatctatgccgcaatttatcctactgttatgggtgcaatataaatcaattaaataattttagacaatatcgctaattaatcataggacgccacctgtggaaagtgctaattactactaatattcaatggcaatgctcaaatgagtatgtgtaaattggatttgtggaaaataagaaattctgtttcaacaaagaaaatgttaattaacatcttggaattagtgttttgcaaaaattatttaatggactttttattttgataaataacaaaaatgaccatatatttcacaaaatggtataaaatattattatgaattttaaaaaattaacaccaatccatccgtgtaggtgtagtatagtagataggggtgttcacaaagtatctgatccaatccaatc

SEQ ID NO: 104933 - DNA, 860 bp, Cannabis sativa
tgtataaatgtttaatgggccggcccaaagtatttttgtaattttttttctttttttgtatttttcggtttttttcccttaaaaaaatgagaatacgtaagaatattttattatttttaatatttaaaataagataaaaatagagaaaacttaggaattagattttattgaaaaagaaatttaatatcatatgtatataattaaaccgtatatatttcttattatgtgaaattttatttatttttaattaaattcaaaataagataaaaatagagaaaatttaggaattatattttattgaaaaagaaatttaagtatcacatgtatataattaaatcgtatatattctttattttgtggaattttatttatttaaaataattaactataataaaagaatagaaaaaatgagaaaaaagaaataatactttctagtgtttttagaccgccacatcaccgcctcattcctctcctttatataaattgatgattgatttatttgatatatgcaattgaatttatagccccaaaaaaaaattacagtggaagaattatataaacaaaaatcaaaaccctaattattaaaattctcaaatttcatgaataaaatcatcaaatcttcaattaattcaacaaaggtggctctgataccacttgttaggatttataaaacactcaagaaatatatatattacaaatcaaaatagaatactaaaagggctttaatatagaaaacctaaatcgtaaatttatagaacctttgctaaattaaagaagaagaagatgataaaaaggatgagcgaaagcactatcctgaaaccattgttggagattgcagagaaggttttgatcttccaaga

SEQ ID NO: 104934 - DNA, 508 bp, Cannabis sativa
tccttcatggatgcctactccgggaacaaccaaattaaaatacatgtcgcagatcaggaatgtactagcttcaggaccgacaagagggtatactgctacctggtcatgcctttcggattaaagaacgtcaaagcaacctatcaacgtatggttaatcggatgtttaaaggcctcatggaaagaaacatggaagtatacatagatgacatgctagttaaatccaaaacatgcatgggccatgcagacgacctcatggagtgctttgaagtgatccggagatatgggatgaagcttaatcccaaaaagtgcacctttggcgtcaaattagggaaatttctgggatttatcgttagtcaacgcagatagagccaaaccctgaaaaactacagtccttattgagcatgccttccctaaagaaacacaaggatgtacaaagcttgattgggaaggtggccgccccaagtcgattcatctcctgatcgggcgataagtgcatccctttcttcaa

SEQ ID NO: 104935 - DNA, 10173 bp, Cannabis sativa
  modified_base (504)..(521): a, c, t, g, unknown or other
aaggaagaagagttttggcgggggttttgaaaccctaatttacccacctaaacaaaaactaacttgactttcttctctcttgtgaatgtgatcgaaaaccacgtcaggccttggttagtggactgtgggctctataattttttttcataaactgtgggctctacatttaggcccaaaatacacaaatctggtattcttcagattttaatttgggttaatttcacaaatacacaaaaacaataaaaaaataacaaaaatacggttttacggaattttaaacattttttacaatttttttaattttatttatataaatacggtatttttatgttgaaattttgttcttgttaattttttgttatatgtatgttattttttatttttttgttgttgttattttaattttattttcgtgttacttttatgttgttttcttgttgattttatattattttcgtgttattttttaaaaaaccgtaaaaatgtaaaaaaaaaacattcttnnnnnnnnnnnnnnnnnntattttacaaaaaatggtaccttatgtaattactccttttaattttaattaaagataggatatttatttccatatttttgtattttattgagcaatttttttttttttaaatataaaaaaaaatttgatcgctgagggtaagacaatacattaatcattatataaagagagatttttttctaactaaaaaatcccaatttttttttttatttatagtgcatatcttattaactcattattaactcatgctcttcagtattatattggtctacagaatcattaccataaaaatatcacacatttttagattttggtaaaattaatagtaataccaaatcataaaaacggttttaagttcaagtgacttaatctaaactaatcactaaccaaatcctaagtaaactccaaaagcttgtattctgacttgaaagtaaaaccaataaaatcaaacaaaattgagaacctgctactaaactaaagatgaagaaacaaaacatcatttagttatataaacccttatggaaaattaaaaatgaagaaggatgaaagcagattaacgttcaaataaaaaccatcttaaatattttttaaaaaatatatcatataaaaaatatatctttaaatgttaacaaaattttcttgcaaaaaatatgtattaacaaaattaaagtaaatccataactacccttaaagtagtataaaatattttaatgaacattttaattaaaaatgtatggcttaaaaaatctgtatacattattatgggaatatgaggtttttttatacataatcaaaaaaaaaaaaatctcatagaaatccttatattggaaactaaatttcatattgtattacattgtcaaaatcccattatattgaagattcacatgaaaagttcctaatattggtgattcacttgaaaattcatgtcccttaaaacttaaaaaacctaaacaaggatgagtagtacaccactttgatattagtttagacaatcccatattgttggctaccgagcctgggattcataatatactatcttagttcctcaccaagtgggggttcttttcgggaactagatgtgaaaggtaacacatgatacaaatagtgcattttgttttcaatatgtgaggacaattgtagtgactactgagggtctggccgtctggaaataggaggaaaaatggtgaaaattccaaagaatctgttagaatattagcttcgaagttgtattactagtatcaaatacaagttctgctagttatgacaaatgagtgatgagactcctctatagttatcaaaacatatagccctacaaagtatagtaatttcaactggtcggtaaggaatcaagacttaaccggcaaatgtaatgccaacaggtcggtgaagaatccagacttaaccagcaagagggttagcatgtatagtaactcgattaagccgtatctctgcaaggggtcgatctccaggtcctattggagtctgcaccaaatccaaaacacccacttaatactattaacaccaacacaagccaaaaatgaataataaagaaatagatgttatatacaaaaaggaacaggctaaaggaataaaaacaagaccagaccttttccataaggtccagaacttcaaagccatgaattactttgccaaacacagtgtataacccattcagatggggctgcttcgcaaaagttatgaagaactggctgccattagtattgggtccactgtttgccattgatagcatcccccttgcattgtgctgtgagagcaatatacaagtagaatacaaagagttaaattatgtgatacaactacaaggatgtcttaaaactcaggtacttcaagtctcaacagagtggcaattaagatgaaaatatgaatattaagctttgtaggccttatttggaccttgtatttcaagaagaaaacagaaaaaggattctgaaggattctattatagcatagtataattttataaaatttagaacaattataaatatgcaaatcaaatttgagaacatttttttcaatatttttcctattattttcactcaaaattgtaaaatccaaggtataaataaagctgcaatgacaggtttgataactaagcaagtaaatcattgtttaaatgtctaatattttggcccttgtcagccctacacctctacagactacagtctttagagccagaaaactctagcaaattgcaaggtgggtatttaagtggaatcaaatcccaaacctcatagcctaatcactcaaccataaagctgaacactccaggtaactctcatgatcttataagataaactattcagttgttaattaaagtcttcacttttaagatgaaactacatagatatttacttcagatgaaatgaaagtaatatttaaaacagctacataccaaaccatatccttgttttgacaccttgaattttaaatttgagcgattagcattactgatacaagttcataatcatttttacttgataagaaaaaccaacaaataaaattcccaacaaaatgtagtaggcaatagaaaacattttgtgggaaaaaactaaaagaaatgttagaaccataaaattaataccttgagggactcccttatctcatcattgaacttctttccccaaatgctagttcctcctttaccagtccctgttggatctccaccttgtatcataaaccctttaatgtttctatggaatatggtcccatcataataaccactgccacataacgccaaaaagttctgcattttacatatacaacatcatcatatttcatcccccaaaataaagtaattcttctaattattaacaatatcagtacataaacactactatttcttgcaaaattcactttattaattctcaattcaaaacaagcataactaagttagttgaaatttgtaaccaaaagaagtatccaaattcgccttatgttagggaaaaaataaaaagagaccttaaatgctgaaagaaaatgtcgtatgaacagaatgatctggtttgtcgaatggaaaatgatgtttggggcaacgacggtaaacagaagcaatgaagaaggtgattgtagtgagtaattacctcggcggatttcggaacctcgtcgcagaagatctcgcacttgatgtcacccagattcgtatgcaacgtcactgactgcaaaacccgtttgcttaatatcaaaaacaaaaagaagaaagaatatgaagcttagttcttgaatcttgagtacagagaaccacaaaacactaaccattttcaaggcaactgcgaatcctttcggatttttgtatgtagtaaatactcgtgctgcgaactggtggaggaaaagggtttcaaatctttgcgattttgtaatactaatgatttatttttctttaaaaaaaaattgggggctcttttatttgtcgacgattttagaaccttccacgttctttaaaaaaaaaaagaaaagaaccttccacgaagttctgcctttttcggttgtaccccatattttgtgaatattattagggttgtatagtggacatttcttttttaatttacttgcttgaatagcataggttaaaagaacttgttgtgagtttactacatgttgttgttgataccgtcgttgttgtccatattctccgaggaaactagacaacaccagaaaatataagtattcgaagtaaacaaaaaatataattttaaagaattatgagtattcactagtattcaagaaaatatatgtgagtatgcaaataaaacacaatataaatgagatagtaaagtacaatagtgatttagttagaacttagttttttttagtctaccttaaaaagaatatttttcggtcttttatttggtttggatcacccatgtatatagaaagtagatgtctctttgaattacataaccggtcaattaggtctattattacattaattacattaattgtgttaacgttgcaacttgggaagtcgtatatcgtccgttcatcttccaaacatacaagctcccaggctcttcgatgtttatttgtgtataaggtatttggaccaaagataatctcggggctatcttataggtagaacgcttacgattactctgatcatgtaactaattattcatgtactgacaacaaaacctacagattcatgatgagttgttgtgtatttgtctttcgcacaagacgtataaaaagatgcaatttttatatataattgcaggaaagatgcacttagttattgcatataattgatatatgcgcgactaatgttaatttttcttgatcctacttttttccatgactatcttgagcatagtatgcgactacaccctgttttgatcctcgcaactttatgtcgtgcgaggttagctctcctgaaactttatgctagcacgtcaccatttttcacacgataactgggtctacatatcaaacatttatgagactatactcgtacttttaagcaaaaattttgcactataacactacatatgttaaaagagcatgctaatagacaccctctaagatagaacattgcaataatagtttactaccattggtgcctagtatcatggacgaaccattaacgatattttataataattttaagttaaattatgtgaaatccaatacttaattcaactaataacaatataatattttacaaggtgtttaacatttcattataaaataacactttataaatgattaacaattttctataattattattatagtaaaataactatgatttcatattaaataacaccaataatagtacatcatacctgctacactatattaaaataaacatataaataagtactataaatatatataaaaaaattagaaggttttatcattaaaaaaaaaaaaaagtcaaaaataaacactgcatgaatatacaatatgatataataaaaggttttttttaaatcacaaacataataaaaggttaaaacacaaatttttcacagccctacctttgaataacccaaattattatatataatataaacagttaaaaaaacattagtcataagttatcatgccactattattattaccattattgtaattattataattaaatatgaagtctcagataatataacttaatcatcagtataaatagcaatcctattataaaatcttacctaacacatctcttattccttgttttggttcgtggaattggagtctctttaccactttctttacacttgtttgtttcacacatgaattccacttataatccttactcttatgacactcctattaaaatagatagaaacctggtcgccaaaaaatatctttaaagtgtctaataatggtacatatttttctttatttatatgtaaaaagaataattggtaaaatccagcaaactttttttttctctttcccaaggaatcaaaacacaaaattgagaatgtaataatttttcaagtatctattgtaaaatgtacaaggcctagacaatacaaaatctataaattaataacatcagaacaatcactcaatctcagcagattgggaatggggcaacctacccatcctcaaggatctctttatgaacatgcatgcatgaggtactgcagtatttgtaattgtaccgatggaaaggaactttaccagccaatgacacactacaacaggagcaatttatatcaccagctaacccacttttggtcgttgtgctatcattgccttgaccattaactgctgctgctgctgcagccattctcctctcggcagcagctgctctcttttccctctcagcagcctgtgccctttttagttcctcctggaaacagaaaccccaacaaattaagacgttaaatttaagcattgttggtgaattttgaaacttatttatgtatggtgtacaaagattgaaattaaaagagagaatcgaggaaaattacacagcatttttcgtccaatgtaaataacaattataaatggagctagtaaaaaatatctcaacggctttcaacactaaataagttgcgagaagaatttatggatgcattccttcaaagatttaaacttaacctctttcgaaatccgtgaaactgaagtaggttgagtctgtcgtttgactgatgacgaagaggctccctgagcttgagcaacttttgaggcattcagggatgcagcttcagcctcagcctgcaaatcaacatagactgcataaatgattgactgactgccggatacagtagctgattaatggggttgggtatggatttaattataactatccaagaacactacttataatagatctttaacaaataattctgatacataaatgattacagtgaaatgaacctgagctttcttttccttagctttacgtagcttcttcaattcttttgctcttgctttcctttttgcatctttttccgcctgaaaaaccattaaagaatgtaagcaagagtttaaaacatcacacaatcatcaaatatgacaataaaatcagcaacaaaaagaattttgtagttcatcaaatcaactaaaacagtaagagaaagattactcagaactaatggttgagctataacaaagaaacatagggaatttaaaccatgtctgaaccacaacaacacttaaaatcacaaaatgagtacatgttgggaaatatgtcctagctaactaatgtaaacaaaatacctgcttggttgcttgagattcctccatctcttttgtcaacgcactaggcaccttagcagcatgccaatcccacttatcaaggttagaggccatgaatcgtctgaatacatttcgtacttccttctcattcgcaagcatgtagggagtccgtcctctttcgtctctgacacaaggatctagaccctgttctaagagttctgaaaccttctcggcattactagacagcgctgcttcatgcaaaggtgttgatgtgcctatatcatcgttttcactcaaacttaatgcagatgcttcatcaagactttgattaagcggtcgtgcttcaggatcagtatagtcagcacaatcagagcttttaactaggacctcttcgcccaatcttaagctattattgccaacagtacatttactagacagtgaatcactaatgaaatttgcagtgtttgacgcaatttccttctcatctacttcatgagctacttgagtcaactgatcatataatcgtcgggcctccttgaacgtaggccttcgaacagtcaatggaacatttcgtacagaacaatgttgattactaaagtacggcttttccccattgaaaagaagctgacgattgctagaaggggcatatatgaaaacacaggaggaagcatcaaagtaaggcttccaagtagcaaatagttcttgaatttcctaaataggtaataatatgtaaatcagtaacttaaacaaaatcaattcaaaaatagtttacaaatttcactagataaaggcaaccctaatttcctcatgagcacaactgtataaaatactgggggtaaaaaaccaatgaaaaagtcaatgcttctgtagatacaacattaaatgattatcatgtgtccatgacataatattaacgctaccatacttttttcaaagcaagttcattatatctacgaagggatgctccagcagaatgtgcagccctgccacttgcatcttttgatgattgtttctttccagccttgcctctcacaacatatctacaaatgacaaggaaaataattcaataaggttttccatacacttgaaaccttcaaatgagaaaatatgctgcagaaatgtgtatattttataaaaaaaaaattagagtcctagatcaaacaaggtgcttaactggatcataataatgttgtgaaaataacttaacgaggtttttcatgcacttgccatgacatttcaatacaaaaatattgacaaaaactgcagttacagatttagagtcctcgaccaaacaaggtgctcgatcggatcatgttatgaaagacagatgaagcttatacctcacagtttttgttatagctattgactatcgagaagaatcaattaggacaatgtaaacaaagcttaaaatgttaaccaacctgtgaaatgttttatgagccacaaccaaattaccatcaaagacacaaccagcgaagtgcccaccactagccagcagcacgatcctgaaatgagtcttttctctcggctcatagaccacatttttcagtctctctatcacatctttctccttaagacatggcaccatcccattccccacattatctgaacatcctatattatcactctcaaagagaatatcttcagattcattcatgattaagctcctccacactgaaactcgctcccccgtttgcagctgtataaataacttctgcttaagattctcagaaacaaagcccctccgatgatggatgtccttctcagtctcatcctctgaccctgatatactagatatatcatagtctttaaatgaatcaggtgttaactcctcaaaatcatcctctttcacagtgttctttccagctaagctcagcttaacctacaagaatatagtatcgaatttcacacgaaaactcactaaaacgcactgctcatatggaaaattggtgtaaagttagaatttttagactaattggaaaactgccaacaatcgaatatgttattaccagctaactcagcacctattacaattgcaaaatatacatcaactttgaaatatggagaaatagagaagaaaaaaaacagaagtgaaaatgcatagaattatgctgacagaacaatgtgcaaataatttcagctaactcagcacttattacaattgcaaaatatacgtaaatatataaactatacactgcataacaggggggtaatccaataaaacgcactgattgcacatcaatttgagttccttttttctttttttgaattattaagaaatagagcctaaagagaaatgaaaatgcatagaattctactgatataacaatgtgccaataatttcagactaattccaccaatataaataaacgttgctttgttaaactaaaaataacggagaagtttagggagttgaaatacattgaagcgatgaatatccgatttgaagtgcgaacgttgatctttgagggactcaaactcagttttgcaggtgttgcaggtccacctagttgatatgatggtgttttgagatcgattctcctcctcagcctcgtcaatggcttggagattgaaattattggaggtctcagtaaataaaggagttaatgagtgtggagtcggaaggaggatgcaggaattgaagaagttggtatccaattcgaatatcgaacggtgtcttttctccggcaaagcagtggtggtggaaggaggctcaggtaccgtcgccatgtttgaggtttgattaaattccctaatcctatgttaggcggctctcaagtctcaactgctgcacttcttttacaattttgttttgagatacgtaacgacgtcgtcgcatcctctgccatatatttatgccaagtccggtcatttttatttggctagtctttctataggtgtttttttacaatattagtaaaaagttaggcacgtatactaaattttataatagtttttttctacgttattaaaaagtgataca

SEQ ID NO: 104936 - DNA, 593 bp, Cannabis sativa
  modified_base (142)..(150): a, c, t, g, unknown or other
tgagggttatcaactcccaccacacgagagcatcctcctagaactgaaatgtggcacaagttacccgatcatttccaacaacccccataaaattcaaaattcgctcaattactatgagccactgctcagccttcatcacatnnnnnnnnnccagaaacactggaggtgcttgcttacgaaaacttttgtataacgactccatacagttgccagcagcaggttgttctactggtgccgctggagatgcaacgacctgagcttgttgagggggcacggcaggtagaccctgctgccttcatctctgaatttcttcatcttgttggaggattcgatcttgcatttccgcaaacctctgctcccaatcgagaagagcttgtggtggatttataggacgaccaccctgagctatgccacggccacgaccgcgaccacggggattctggggaatttagtttccctgaccgccttcggtctaaaccatattaacttgacttcttgtattacgctgggcgtccattttataggacttagcctacgaacccataagctaggcaggttagacaacgatcaaaacttaacaccgctcttaaaga

SEQ ID NO: 104937 - DNA, 1044 bp, Cannabis sativa
ggcatttgatagagtggagtggtcttttttagcagctgtaatgggcaagatggggttcagcattcgttggatcaccctcatcttgaattgtttacaaactacacaactttcatttatcatcaatggtgcaatttcgggcaatgtgaaaccacaacggggtcttagacaaggagatcctttatctccttacttatttctgatttgttctgaaggcttgtctcgattgttacaatatgaagagtccattggatgtttaaaaggattagctgtttttaggcattctccatctgtatcgcaccttctttttgctgatgatagtttgttgttttgtgaagctgatgatcgatcttgtggtgcaatcaaaagagtcttggatacatatcacaaagcctctggtcaacagctcaacacggacaaatcagttatgtctttttcaccaaatacttatgaggcttcaaaacaatcctttcgaaatattcttggcatgcccatttgtgagtgtcatgaatcataccttggccttcctgcgtattctgaacgagataaaaaacaatttttcaatcaaatgaaagagcgcatttggaagttgttaaatgcatggactgataagattttctcggttggtggtaaggaggttcttctcaaggctgtcattcaatctattcccacctatgctatgagctgtttcaagcttcctgttaaattttgccatgaaattgagagtttgatgtctaatttttggtggggctctacttctgacaaaaagaaaatccattggaaacaatggaagtttctttgtaaatcaaaattggaaggtggtcttggtttcaggaattttatccacttcaatcaagcacttttggctaaacaagcttggaggttgtttcaaaatccagagtctcttctatttcgtgttcttaaaggacgatacttctcaagatctgatttcctttctgctgctacttgtggtgtttcatctctcacttggcaaggaatttgctggggccgagagttgctgaagaaaggattgcgtttgcaagtggg

SEQ ID NO: 104938 - DNA, 617 bp, Cannabis sativa
ataaagaatcataaagtcaagcaccaaatgcatatcacaccgtccactagacccctagttctcaataccaatcaaagaaaacgacatcaaaagtcgggtagtcgcatctgatatccacataaatatcggggctcagatttaattcactccctgtacagattctaggtctttcacctacaggtgagtgcacgcctgatctacctatgatgacacagagactaggtcgtaaaacaacaatatgcactgaacatgatcaacatgactctcatcagtataaccaaagcacacaaataataagcataaccaaagaacatattcatttttattttatagaaaatctggcagtataatggatgtattttatataaactcaaaaatcataacctgcataaatatttgtacaaaaaaatatatttggcacttagtgctccaaaacaatccataaaaatatgaagacatgttttcaattttttaaacaatttgcaaatcataaaaatttagaatatgtctaattttatgcaatacatataaaaatcaagtccaataatcaagttgagtccctacctctcccaagtcgttaaactttggtccaaaagacgatcttagctctcaagtcc

SEQ ID NO: 104939 - DNA, 667 bp, Cannabis sativa
ttaatctcaaaaaatattaaccggcaaatataatggcacttatatttgtaaatattaaatggaataactccttaaatgtagaagttaatagggtatatttataactcgctgactgcacagtccttagcgagacaaggatgtacgaactgttgactcacgtattgacgagaaaccatttcgtgtcagaagacataatcgcaaggatgatatcgacaatacatagcgaagcgaggcataaacctcgcaatatgtagagaagtgttaacgaggcgaactggctgttagaacacttagcgtatgatatgcattatactaactaagtgtaatagcttgaaggacacggataatgaatagcaagacatccatcttgctgtaggaaggcatactcctggtaaactccaacttgctgccagggttgttgttgctattgagaaccctcaggacctggttgtctagtctgtaaggccttatagtcaaagagcagttcttaaatttgctcagtacattggtgctcatgtcattcctgcaagacttatgaataaatcaagttgtttatacaccaagcgagacgcctcagcgagatacgttttgcagcgcgtctgagtgaattagtataaaaagaaaagaatattctcttaattcaactaatatttttaaacctagtttt

SEQ ID NO: 104940 - DNA, 678 bp, Cannabis sativa
cagaatgtggcaatgactctgcggggtcacatggcagtttggatgaagtgagcttgggcgtgtagggttttcttttctttatgcaacagttatgcaaaaacaactaattaacaacacaaaaataacttaacaacactgcacaagaactactaattgaacatataaaaaatatttacaaatttaatgcaataaatataaaaaaaaaaattgaaacacataaactaaaaaaatattaaaattacaccaaaataataattttttaaataaataaagtgattaataaaaaaatatgctcaattagaaatcaagtagacaacaatatcaaacatttatatatataatttagacataattaactcaaaatatatctataaaaaattatacttaagataataatcaattaaaacataaaataaaaattaacttgatatttatttactacaatcccattcaaaaactataaagtacctaaaaataaaccaaaaatagtattaaaatatgtacatatgaaagctaaacacatatatatatatatacatatgtattttcttttcttctcttagttaaacatttaataacaataaacaattaactaacagtaaagaaataactatataaaaaaaactcaaatatatatatatacaaaatttggcatttaactttatttgacaacaaaaa

SEQ ID NO: 104941 - DNA, 546 bp, Cannabis sativa
tataagtcgatggcaggtcgacaataagaagtcttgcataatagtggcagataggggtgcctcacctaaggttattgcgagctcgattatgccaagactggcaatgatgtcagattcaccatacaaggccttaatttggcctttttgagccccttttttcgtagagtctccttataaaagatatttaccgagctcccattgtctattaaaaccctcttgatccttttattggtgagttgaatggtaatcaccaatggatcgacgtgaggatacctcacgtatttctcattttcctctgtgaataaaatggtaggttcttcagttttcaccttcttgaaaggttcttgggaaaatgccgactactcgttctttatctctttcacatatcttttctgggcattattgctttcccctgcaatatgcggccctcctgaaagaaccaagatgttttctccttcaacatgaagaggttgtaacccctggttgtttgggttattgggcagactgggctggttatatccctgaccctatcttttcacgtactgt

SEQ ID NO: 104942 - DNA, 638 bp, Cannabis sativa
aaaacactatattaaaattaaaataaaccaatgagaatatgcggtgtccctttaacatttttttccttaaaaataaataaaaagcagaagtaaaacccaacagtttgcatttatttaatagacaagcttacagattattcatagagacaagcctcgacaaaagtagttgaagcaagcatagcaaacatactgagtagatccacaaagataagattactagttaactacttagtctgtcttgaaagagagaagattctcaaaggcagcttcggcggtggaggtactactgggtggggggcagctttttgggcattcctcaaccttatacgagcaccaacaacgagggcaaagagacctatcacagaggcaaccttcactgcagtttgatgggcactttccttgtctcgtatcactacgaacacacaccgaattcccagcatctttgttacactcacaacttatacatttcgttggtcctaaatgtcaaaaaattaatatattaattaatgaacacatgtttatatatacatattacgaaaagtaagccttttagcccttgatggaaaaagaaaaagaaaactcaccaggtggtggacagggagaatgaccattagcaaaaagccccacaaagtccacac

SEQ ID NO: 104943 - DNA, 3159 bp, Cannabis sativa
taaataaagatttaaaatgtacaacatctttgatagtttgataagtattgagttcataactctagttgtagtgtgtgaaggaggattgtaaaagaatttctggtgtatatgatccagactccccagtgtgaggagtgtgaggaattattataactggtgttgtacgtcattgatgagcgtaattgagtttaaaactccttgtaatatgctgaaagtcaataaagattcaatcattttgctgccattgatttcgagctaagcttctctgttcttgttttattttctggtctgagtataattctttttgaatgtttgaaatcgtgaatcttatgagttgttattaattataacagcaagttcaaggtgaatctaattcacatcaatgcttctttttactaataagatgactggaattaattattacagctacggaattccatcttcttgcagatgatttgcattgaagaacccaagttaaagtgtttaaagtagtaaaattaagagccatttgattgggaagatgaatatccttgtttaagagcacatcatgtaatttgaaagccctaaaatgcatcatctttcggcttcacctgcatggattgcctttgatcttctactcgctgaagctgtgacgataactgaagcaagttgatggtgaggctgtgtgcacaggaaatacgatacttggagttcggaaaatcagatccttggaacatcccattatcaaagttaacattgtccccaccatcggatatcataatggaagtcatgtgactcccactcatagaatttgttcccggagataggagcgtatttgagacacaacttgatgattctcccacaagcttttctgagacttgatccatgttatagcatgcatggctctcaggcttcactagaggacgaaccacgggacttccagagaagtggcttgaagagctctgaaattgagatgacagaagagagagagcacaaccagagtctgaagtccctgagaacccctgaatggttgtagctgtattaaaagtattgaagtctccacatcctaagatattcttgtggaagaaaggacgagaaccggagtttatacctcccaggtcatgtggatattgaatgttgttcttgctgaaaacatttgttgttacaacattgggtccgctcgcatgaaaagaagggaattgctttccagaatcttgaggaaagagcgattttgagctgagatggacatttgtacctggtactggagtagttgaaagaagccttaaatcagacccatcttcagcttttattcgcctagtccagtcaattgttccatatttctcaggactgtaaaaaccacttggcagtatgtcctggcatatgaaagaagcagtcccctgaagtctgctatctgcaaagtatgctgattattaacatatttagtagtggagattgcagtatttacaatttcttcaatgcagattatacagggattattgtgtctagtaacattgacaacccatttgttattaagaaaaagagactttgacatattatagtataagaaagaccaaacaagattacaaggcttcttataagaaagagcaaacaagaagtcaaggcttctaagttctaagatatacaataaatttaagcatactccaacagaactataagcgaaaataattgaatttgagcgaacaatagcaaaacagaagattaaaccttcaaccagatttaagaaaatgtgcactgcacaaacttttacatttgtagttatttgacaggaagctatgaactacaaatcaagccacgtgaccattcccaaaagaagcaaaaaagggagaggttagaaagagtagaaaatgaaaataaataataccactgtatgactgaagcattctcccagctctactagagtgaatacccacttgaggcttcctccgacgttcattatgtcctgcaagacgtttacgacagctgcgcttgccatcatcaaattcagccagcaaatggaatctggattgtcaataagtgagcacatcttaaaactgtgtcctagctcaaactttacgtgactgaaatgaatttataaacgtccattctttaaattataggcttatcgcttcaagaaatatagttgaccacctttacagaacacattagtagtggccaattataagcaaaataatcaaacacttttaggctagagcaaagaatatacctactacattgctgacaaaacctctgttctataccattcacaattactttagcagttttggaatgaagctcacaaactttatgcctcttatggtagtctttggaagagctaaggtttttgttgcagccataaacttggcagaggccattctgggggttcgctgctgagagccgtaatcgtttcggaggtgtagatgactctgatgaagacaatccggccactactcccatagaaagttttgatttactggtgtctctggggtcgccaacatgtcccagtttcaaatcaatgagtgaagggtcccaactaccagaatgcaaaatagagcttgaaatccttgagctggactcatcttctccagaaaatgcaactgccatcgctggatcattaagctttccaccagaaaccttaggatcacttaaaacatcaccaattgaattattggatacctgttttcccatcatttgtatgtattctccgaaaccttgattctcaattccttgttgacatgacaataacaaattattaccataagtgcatggggtcttaaactcccaacccataagtacatttttacttctagcaaaggaattaaaaggagaaatggtttcctcagatgccaaccccttctcagttgacacaaagttccaaggctccattacaagcaacagaacaacaaacttccaacaaattttagaaacaccaaattcaaactataaaccaaattagcttagttcttgtaatctatttgaaagatttatacctcttagaaacttcagcataaaataaaagctaaatattaggcctattaaagaataatcactagttctagacacaacctacagcccattacacaaacccacctccattaaagtcaatcccaaaacttgtagttctccatcccatcccatcccatcccatgggggaataccgtttctgacaaaaaaaaaaaaaaa

SEQ ID NO: 104944 - DNA, 563 bp, Cannabis sativa
ctatgcatcaattgttgggagtctaatgtatcttcaggtatgtatgcgtccagatattgcgtacattgttgggatgttaggcaaatatttaaggatccctgttatggaccattggatagcaaccaagagggttatgaggtatcttcagagaacaaaagattacatgctcacatacaggaagtcagatcatttgcaggtcgtagggtattctgattctaattttgctggatgccaagatagcagaaggtctacatcaggctatatttttctgttagctaaaggagctatatcctagaaaagtgtcaaacaaacacttatagcttcttccactatggcagcagaatttgtagcatgttatgaggcatcaaatcagggaatatggctgacaaactttaacactagctaggctgcgtattttggagaatgtagaaagaccactcaagatattttgtgataataaatcaacaatgatgtattccaataacaataggagctcatccaagtcaaaacatattgacataaagttcctagttgtgaaaaaaagagtgcagagtggacagata

SEQ ID NO: 104945 - DNA, 615 bp, Cannabis sativa
acattcaagaatcggattgaagagtaagcagtaaagaacacaataacttacaagcttcgtctgcactgagaataaatctcagccgactagtgcttgggttccccaaactagggtaataacattcactaaatccaaaagattcgtattacaatctccagttcacaattaggaatttaatacaatctttacaacaattagtaatgtattaccaacaacaaccaagattctcggttgtacgcacaagattccctgtgcagcagctaagttcttcttcgacacttttcttcaatctgaaatcccttcagatatggtgacgaagatgacactaaactcccttcagtctaaactcagtagcaccaggctctgatctttctactatggatatccatcaccaagctatgcaatcagacttgaaaaatagcaacgaactatacaagataccacatgatatatctgaactaaccaaaattataaattagctagttgactgctttacagaatgaaactagctatctatagacaatagttcaaccgacctaagaataatttaaaccaacagttaaaacataacagactcacgtggactttaatagaaaactggtatgcagttataac

SEQ ID NO: 104946 - DNA, 698 bp, Cannabis sativa
tttcaaatagtttataattctctttttctaatttcaaagataaatacttttaagaagaggtataatattattagattatgtctgtattacttacattgtaacacacatcaaacaaacacgagatattgcatgtaattttatacgttgtaacttgtataactgaaaaaattactttaaacacatgttatgagttggtgaccagattcaatataaaaccgttcaatatttattttcagtaacgtaaaaatatataaattaatatcgaatcgaatctatacaattgatttttttttatttattttatagaaagttggatttttttcttcttacaaaatcatgaattattcttccccattaaattatatagaagtgagaatgagaagactaaaaaagaatcttcattacaccattcaatatatttctttccaagtcaatccataaaaaatacatttttattaataataaaaaaaaccaccaaaacaaacattcttatctacttaatacttgaaaggggtatttttagaacataaaaagccatatgccccttattattatcataatatacaaataatacatgtttataataataattataattaatacattaaacactaaaacaaacattcttatctaattaaaacctattattagtcatatatattaccttaatcagatagtaataatattataataatata

SEQ ID NO: 104947 - DNA, 1472 bp, Cannabis sativa
attgaaatttaataataagctgtttattgaaaattttggaattcataatagaaataatttttttgtttggttagatgtggaaaatacaatacaataaatatactattgtctaagcaaatattattcaacagatgcttttttctagaaaaagaaaaagaaaatcccaagtattgttttaaatatgacccttttttaataaaataatatatttttaaaaagtttatcctatttctaattattattattttacttatgaaactttaattttgagaatatgattaaaagagtaaaattgatagctatcaaaaatgaaaatgatgttttcaatattctatgccgacaaaggcagaataaagtgattatttggtaaaaatattagattttattttaaaattaattaataataaaaaaaattatttataatcttatatttcatatttattttcaacagtttttttttttaatattattacatttccacaataacaattgtgatctattcctatcataccatactattcttgatttatttacccataatatatatatcttttgataaatgttaaaagatacttagattgatcatatgagattccaaattctgctttttattcttaatttcttaagaaattttctcgagaaaaactggctgatctggcaaagctatttattttttaccttgaacttaattcaaaaggttaaaacatgatgagtagaatggtaaattgatgagagccttaattagttgaaaattaatttagtttaataattaaatttgatcagtagtcaaactgaaaaatacatcattatattagggctctatcttctgattacagttttaggtagggtatataggaagttgtgcagctttagggtaccctttcatgaatccctacattccaaaacacactttctctctctcactcttgaattggtcaaacttaaaatcattttactcttctgtcccattttggaccattgtgctaattaggcctcttaagtcaaatacaaaagtcaaccaaaccaaacaaggcaaaaaagtaaagaaaagataaccaactgtaaaagccaaacaagacaagttaaaagccaaagaataatctttctctctctccggatggagtaatctctaccgttctttacactcatacacaaatttgaggagaaatcaacggctgggatttgaggaaaatagcacgtcaagtaagacaaatgcataataataatgagtagtttccgtatatggaatttaatcaaattagatgaaaaaaaataaagaataataataaaaaaaaaggtatatagtttatcaaattaatcaaatcaaaatgaattgaaggttagggtaaattagatttgttgagacggtgccgactattattggaaccagcttgtgcttacctatatatatattccctttttctaaagatatttattttttaagtaaataaattaagataatttcacacttt

SEQ ID NO: 104948 - DNA, 627 bp, Cannabis sativa
  modified_base (335)..(336): a, c, t, g, unknown or other
atgatcttgtcaaaaccactataagcaagatgcaaatgtcatagatatattatagttgttgttatggtcttttgatgacttaggtctagttactataaagtgtttttagattggatcttggtcacagaatacaaaactcatattccatacattaacatacagtttggatccattgacagaaaatagatattaacaacttgtgaaagttatactgtattgtccaatgtattctcaaaactgaaatttaaaatttctatttgcaatataaaatctaaagtcaaagattgaaatttataccaaatataaaatgagtaatgattctagcttggaccacnnctactaatctaactctaagtttgaatttccttaagtaagcacatagaagtaagagatttcaataagatcaaggatttatatcatttcaggatagaatgtcgggaatatagtcatctgtgccattcaatttcatggaagaaaatagaatgacatcattagcagatgatttataaaccattcatccaatgtgaacgcatatttttgttaacgatataagcctattttcgtgataggattagcacagaaataatataaaataaaaataacaagagtaatgcaaagatcacacca

SEQ ID NO: 104949 - DNA, 575 bp, Cannabis sativa
ctggacgggcaacacgctccatggtgtaccgtggggttaaggatagattacttccactggccccaaacactcaaccatcataataaggtgagcatgaacacctttatactatgttctacaactatcaacaccagatgatatttatatctaaaaccagtggggttaaggatagattactttcactgaccagatcttcgttgccattctccaatcttttgagttggtttttgcttgcatatattcatagaaattcgtttgcttcattcttctttggtccaaatgctaaattagtttcaagcactcacatcttccaagtttgttgcactctctttccttttccagcctaatcttctcgccgtactactttttctactagtcttttcccgtacaaacagttaacaaaatcttccatcccttccagtctctttcttcagccgtactactttctacttcagctcttcccaagctgctccatatcgatcctccattctttgttaaggtgagcatgacaccttagtcctttcacatattatgatcaatcctccatgctttgttaaggtgagaatgaacacctt

SEQ ID NO: 104950 - DNA, 591 bp, Cannabis sativa
ggggagtttataatgaccagttgactctacaatattttctaattgcttggctcatatagcttgatcaagttttaattttttggattttttggtctcctttatgagaacaacaataaagtttctatctgaattctgaatgcttccaactttaagacatggaaacgagatgtgaaaattactttaggcataatagatttggacttatgcctgggagaagaaaaatatgctgatctaactaatatcagtattgttgcttagaaaattcttcatgtacaagggaaaaattcaaatcatcttagtctcattgctatgaaacgttcaattcctgaacgtcttttggtggtttgccaaacaccacaaatgctaatgaatatttcaaagcagtagaaaaaactatttgacactggtgaaatcgctgcagttggacatcttatggatgcaatgacaaccattcagtatgataaatcaaaggagtgcgaggttttattaatgttcaatccgagttgcaagatcataatattcctcttcctaactcttacattattcatcgtgctcttcatgcacttcctgtctcttttagctttatcaaga

SEQ ID NO: 104951 - DNA, 717 bp, Cannabis sativa
cacgtgtcgcttaaagtttctgcgcgttttcccatgtgccaacgcgtggaggcacgtgtgacagcatcttcgacggtgttcttttgccagttctttactctgttcttatatatgaattattttatggctttcaagaaaacatatgaagaacttaatgtgctattaccttttagtcctgatgtaaaagttcaacagcgcaaacgagagcaaatggctattatgagttttcttgcaggactctcatttgaatttgactctgcaaagtcacaagttctctctggttctgatgtctcctctttacaagatgtgtttactcgtgtttttcgcacaaaaactacctcttcaactcctcttaatagcgccttggtgagtcgtaataattctacaccagaaaaaaactctactccaagtggattcaacagaggtaattcacaaggacctgataatcgaacactgaattctgggagcatcatgtgcaactattataagaaaccaggccacaccaagtttgattgtaggaagttacagtttaagaatcgacaacaacacactactaatattgcaatcactagtgatgcatctgacaaatcggtccttatttctgctgatgaatttgccaagttcaaaaagtatgatcaggaaacacttaagtcttcatcttcttctatcactgcgattgctgattcaggtaactctaatgcatgccttctttccaaa

SEQ ID NO: 104952 - DNA, 780 bp, Cannabis sativa
  modified_base (725)..(731): a, c, t, g, unknown or other
aggaaatgtaagtttgttcctctctttagttgctgaatccacttgcaatggattccccaattggcctacaatcttgaacaaagatttctcaccccaatatttcagttctaggtcttttacttggatccaaatgggcaccatagatatgtcctcctttctaaaattagtgtcagggtcccaagccttcattatcactggtctcttattgaaaacatatcccccattcaaaattctatctctggtttgtacagaatcaaaccgaaccaagaagacaccacatgtaagcatccccactctatctacttcccctttccagaccctgggaataaatccttcaattacagataatggaggatttactccaaacacatagcacgcaatagagggtctccaaaattcaatctcatcttctatatcctctgtagtaatcttaaccttagccttaacaccctattcattcttaaacgaattctccagattcctaatcacagtgccagaacgcaatacaggagggatagtcgggttacctttaatgctcaaatctgcacacctctggtttgctgataagaagaactcgaagtcagattgaatttcctcctgcagcttgatctgttgcagagacgacctgggcgttaatggagatcgaaacaggtccttctgatcccgttccacagatttcggagcaggggtatcgttgtcgtcctctgtaaagcccgcttagttannnnnnnaattagcagttaattatgattaatcatgaaaattatttatagctattta

SEQ ID NO: 104953 - DNA, 548 bp, Cannabis sativa
aattaattggtaaataggaaattttaaaattagatgagggcaattgggtcaagtgaaaaattcattaaacaaaattgtagcttcccttaaaagctgaaatcccaaagctaaggtggcccaacttttcctaaaagctataaatttcacttaaatttttgaaaaagctatttttttaaattttaccaaacacatattaactcataactttttttaaaagtgattttaactttttaaaaagctcccccaaacatggcttaaatcatgttaacatacttgtactttatgaagtaagtagtgaatgtgtgggagtgagatcattgacataatatattcagaaaacatatagattacactcaataaagaagtatcaacagaagcagtactctatgaagatattactacttgcatcgctcaactaaaaagagggtatattattgaaggagatagaattaaaattatttcaccgaattcttttttagacattttaagagaatgcatattggtgtccaacatattcaatcaattgttaatcttacaaacttattcac

SEQ ID NO: 104954 - DNA, 983 bp, Cannabis sativa
gaatacacgtgtcctttaaagaggagtctggtctcgagtttcttaggtgagagaaatctcactataacaaaatcaaaataaaataaatcccattaaatccataaaagtaagaatttttacatgtagcaccttattatatatctaaatttaaaaaataacattaacttcaaatttaagttttcctttaactattattaacgttttgtaataggcgggcatatttcaatacctgaccaaatagtattgcctatcatttttgtttcttctctttgagccttgattctttgtttcttcattatattctctcttttttatttctcaatctttttttttttacttttaaaaataatttatggccacattattatttagttgaccctaaaaaaaataccattgtaatttattattcaatgtgaatatttcaaaatgtgtgaagcatatatttttccgctatttctaaaaaataaactatacggttactaatatagtgattagttactattttatcattttttttaaatcttagttaacattcattcttaaatagtatggaaggtaacataaatattgttacacaaaagaaaaaatataacataaaagtacatcttaatcaacatgatataaactaaaaatgaatatatagttacaaataactaatttaaaaattaaatattatctacaagagatatttttatttaaagtggaccatttttatgaaaagtaaccaattagtgtattatcgaaatcataattaatttaaatattactataaagtatactaaataaaactattttatatctatgcttatttgtaatactatttgaaaaataattagtttctacctgtcaacttaaattgtaactaaaaatataactttaaaataactaattagtaatttaaatgtttactacttttaccaataagttacgtgattttttttaactattgtaacttattagtttatgaaatagacttgaaagta

SEQ ID NO: 104955 - DNA, 525 bp, Cannabis sativa
cccgtggactaggagtgttcgggagaacaatgataccacgtaaaatctcttgtgtcaagttatttaattttctacaaatatttttatattctgcctggtctattttgtcactcgaaaactggtttctgcagtaacataattattttctgcttctgcagacgtacacagttttatattttcgtttatataattgacatttgcaaaaactcggtttttcactttctaaaaacaaaaacaaaacttgatttatatacctaaaaaaacaaacataataattagttcatttttaattgcaagaatttaaaaaactaacaatgaaagtttaatgtaattaaactatctcatacctacaaatgggacagtatttgctatagccacttcaggatacattcgctatgatatgggtgtttacaaggaagttgtgtaacttctttagcatcatcaacattctcacaacaaatagtacataaaaatatttcattgttattaacaaacttctccaatttttcgatagagtcttcactg

SEQ ID NO: 104956 - DNA, 971 bp, Cannabis sativa
caagtatcagagctaactttttcatgtaaagaaattgtgatcttgaatttgtcctaatttctgatcttctataaagttcctctgctaatctgttctttctgtgattttctggaaaactgacccactacgagtctcatctcgttgtgcaacagagtttccttgttaagtgtgtgcagatctactagaaatggaaattttcagagaaggaggatcaacttccagacctcccatgctggaagggtctaattatccctactggaagacgaagatgagagctttcttgaaggctgtggatgaaagagtctggatggctgttgccgaaggctggtcacctcctattattattgacgatgaaggagataagatcaagaaatccagtgaatggacaactgacgaaatggaacgagctaatttcaattccaaagcgttacatgccctcttcaatgctgtctctacaaatcagctaaaagtaatctcaaattgcgaagttgccaaagatgcttgggaaaagctgaaaatcaagaatgagggaactgatgctgttaaaaaggctcgacttcgatctctagaaaaatcctttgagaatctgtcaatggaggaagatgaatccgtctcggaatttcatgctaagctgtgtgacatttctaatgaatcctatgcactcggtaagacctactccaacaagaaactggtaagaaagctacttggtgttcttccaaaaagattcatgtcccaagtgacgtctattaaagaaagtcgggatatcgaagctcttgatctagatgaattgattgggtcactccaaaattatgagttaactcttgagagatgggagaaagggaagaaaaccaagagttctataaaggagaaaaccgaaatgggagttgcatttatccacaaggaagagaactctaaagaagttgatttgtttgagtcttttacagatactaatctggcccttctggcgaaga

SEQ ID NO: 104957 - DNA, 565 bp, Cannabis sativa
agcacaatcaggtaacccattagcttgtgtttattttgaatctaatctagttgatgttcctattgattcttggtggttaaatagtggtgctactgttcatgtttctacttcgtttataggggctaagggatcttaggaagcctaatgagagggagtccaagcttaaagtgggcaataatgttgcagttgacgttatctatattggcacatttattcttgaattatatatagtctcgtgttaagattattttgaacaattaatactttttatgttcctacttttaagatgaatttagttttgcttccgcttttggttagactagaatatttttttctttttgcaaatgataatattgacattatgcttgattcccaaattattggaaattgtttttattctgatggtctttacaagttgtcattggcttctttaaattcaacttgtaatgttgtgaatactttgggtaaaatacctcatattaaggaaacatccttattgttatggcacaaaagattgggtcatatttctaaagaaaggattgattgaaaaaccgtgtttttgcaa

SEQ ID NO: 104958 - DNA, 514 bp, Cannabis sativa
tatagaaaatcaaatttcccatactattttagaatctgtattttgcaaaaattattaattaaaccatctattttattaaataaaaaaatagactatttatttcttaatataatataaatagggtcttgaacttaattttcgacaattttttttttaatgtaaccaacttgaaaacaattcctaacacagacagatgcagaaaatataattagttttgtcataacacttttagattaagttattgttaagttttattttgataaaaaaaaatcaattcatgtatctatttgtaccattttaaaaaaaatatagaattttttgtcatttaacaaaacaaatggtccaatcaataacttttataaaacagtgggttcaaaataatattttaccctatataaatacaacatttttattatatagacattatttaaatattaaaagccaaataaattttttgccgtggtttaagtgtaccactaatattaattgtacattgtagataatttatatatga

SEQ ID NO: 104959 - DNA, 919 bp, Cannabis sativa
gcaagctcttactcacaagtatatggatcaatgagttgtaagctcattgtttattcgttttgaatagccttaattatgttttatgtttatcccgagatggacttgtttatctcgttggtctcaaaatttaatagttattactcacatctcggtattgcctatgtggcggcgagttcgaatgattctattagatgtaccttccgaagcgagtcatttaatgtgcatttaataatgcatggtttaaattggttcagattccagccctgatacacgtgtcaaattcttattgcaagccaaaatttagttttaacaatcacaaaaatacaagtaaaattttaaaaaatatttttgaaaaacaaaaatatgttctataaacacttaatatgttctataaacacttttgttttttaattttaaaaacagaaaataaaagtgtatttgtaaattttatttttattttcaatattgattttatttaagttgggtttgggttagaggccaggattgggaattggtctaggtacggggtcagagctagggttcgagttcgagttccaagatctacgttggggtcgaagtctaaaatattgattaagaaaaaaaactgtttaaaattttttaaacttttctgaataccctttattatgttttctgtttatccctagatggacttgtttatctcgctggtctcaacatttaatagttattactcacatctcggtattgcctatgtggtggcgagttcgaatgattctattagatgtaccttctgaagcgagtcatttaatgtgcatttaataatgcatgatttaagttggttcatattccagccctgatacacgtgtcagtttcttattgcaagtcaaaatttagttttaacaatcacaaaaatacaagtaaaatttttaaaaatattttt

SEQ ID NO: 104960 - DNA, 1100 bp, Cannabis sativa
taggttacacacaatgggacctgttgggctccgaaaagtgcccatcaccatcaaaagctaattttcacggttagatgatcatcaacggtcaaaaacatgttatttgtatttctcactatttttgtgggcctccttcacctataaagggagagcaccataagctcatttttcaagttcaaaaaattacccacaaggtcagagcatctctctctagtttctctctcttgaaattggagcttctgacacttagtatttttttttataattaccatctcgtgagaaataaaaactcgaagaagacgtagttccattactgtcgtgatacagtgagcgaactactataagtttgccatctctctcttatagttacttaaatacgaattctagcgagcaggtatgtcttagaagtcttgtccagattactgagtcaatattttggagctttcattaagagctacaactcaagaaaaatactaacaagatagttgcaacatgttctacaagtgttgacagacggactccaacaattggtaagaaaataggggccatgtcaggtgctgagatgggaactgagaatacttcaacttctaggtgccaggagtaggccttagaaccaactcagcatctcatcctctaaggttaccaaatgctcacggaactggcaccaatgaccagatcccacttagggagcctcacatggacattgatgactatgaagaggccgatcctcaagtttatcagctcaaccaaactatggctgacttacaacaacagctacgagactctctcctgaagtaacatgaatagttttaacactggttcgtgaaaattgcaggaacattgaaagctaatgcattgaactggaataacaaagagctaacccatctaaataaagtagagaagcttgtcgctctagtcgcgaaactacctcccataagggtttttccaagttggtgagagagactccccgttgacaaactggtcatattggaattagtgttaaaggaaaaacacttaatcctcgaaatgccactaccacattgggtaattgagtaagcactaagaaaacactaggtgtggaaatcttttggagggaaagt

SEQ ID NO: 104961 - DNA, 610 bp, Cannabis sativa
atgtgtcagtatcgctattggtcttactaaatatcgggtcactaaatatcgggtcccaaattatcgggtcccaaatagtttgtcccaaatagtttaatataataatttttagggagtatcgctaggcaatcgcaacgtaattgtcgagaaggtgctaagcaccactggtacctaatagcaatactcaaaaattaaatctctaataaagtcaataaaagtaattaacatatttaatataaatttgattaattgatgtgtcaaactttgatagatttaacacaatatgagacaccaatttttaataagagatcttgattccagtcaacccttgacctgtgacctgcgaacccgctcaactggttcatttcacgggcgggtacggtctcatttttaaaccctaaacatgtgaactcgatttttcaatgaagaaacaaaaaatcttcatttgctggggtagtgacacgtcatcaaatgaagaattgcactcctaattacatagaatgttctatataccaaaaatggatgcgctttgaattacatattgtttcaatcaaaatgatcaaagatcctctatagatgatctacatcgagaagggataattttaccgtt

SEQ ID NO: 104962 - DNA, 658 bp, Cannabis sativa
attttaaaaataaaaaatataagtatattttataaattttatttttattttcatttgttatttatgcaagtgaggtttgggtttgaggctgagatcgagaattgagtgtccggggtcggagtctatattgattaagaaaaaaaattgttaaaaaaaattttgaaagtgatttctttattctcaattaaaaagtaaaaataggtttatagaatatgattttggaaaatacttttacttttttaatttttaaaatacaaaactgattaaaaagtgttgtgcacttttaggtgtcatttggtaatacttttgctttttaattttttaatcacaaaaattaaagtaaaattttaatttttgaaaaataaaaatgtgttttataatcactgttgttttcaattttaaaaataaaaaataaaagtgtattaagtttgttttcatttaatttgggtctcggtccagagttagattcgggtttgggtaaagagtcgggtcaagagattataactttatttagttataatctctcaattagaatacaatttaattggtccaaaatatatttttaaatagaggttctaaaaaatatacaaaatactaaaataatgttataaacggtctattttcactattacttgtttattatttttttgaaaaaatt

SEQ ID NO: 104963 - DNA, 924 bp, Cannabis sativa
caatgtaacaagaaaaaaaatttaatgatttttttattaatttttttatgcattttaaattttattccattccattcgtattcgtattcctattctcatttttattcatatacttttattcctcccaaccaaaacgcctcctagtccaaatgagagttagaaaatttacttaccaaagagaccaaaccatacaattttgtaattcattacatgaaaataataaaataatagggaaaaagagcaaagaacattgtatacatgtatcatatagtttatagtatgaaaatttgaacatgaagtaaattacaggactaccccttagtattagatttgggctcacaacagatgtgtgggatggggtggtgtgtttccaaagatgaaggagttagtgtggtgggcctagtgtgatgactcattctcacatttttcttatgaaaaagtttctaacctttctttctgctaatatacaattggtttacattgatatttcatattgtattcttcttaaatattatatatcttccatgtttgaaggctttaatagcttcactccaccacgttggctcttgccatttcaacacaagtctttatcacaattacaagtgaactttttttatttgttcgtaaggaagggtttattgaaactatactacttctctctctctctatttgttttttttttttttgaactatttctatttttgagacattattgaaattgtactttttttattattattatttgagatattatttatttatttatttttgagatattattgaagccatacttgcttacctttttgttgggctattgggcctgcgtgaaacattaactttgggcatgatatctctcatatggcaaatacctctatttttatagggttaatttgacaaatgaacggtttcacggaattttaaata

SEQ ID NO: 104964 - DNA, 530 bp, Cannabis sativa
ttttgttaattttttataaaaagggacatttattaacttaattgttaagtttaaggccattttgcatcttggccctttgtgaaatatcttaatatatcctataactactactattcatgaaaatgtcaaccaaaacgattcgtttaatgagattgcactttttgttccttccatacacctatatatatcaataaaatattaataaaattgttcaacaataaaaaagttactgccacactttccgcacttatataccccatctcatctattccacattttatcactattttcttcatttttttttttctgttaacttatttataaatctattgaacaaatcagcatattagctttttgttaaatgtattttgtaatttaataataagaaaccataataaatttttttaaataaaaataatcttattctaaagagcatagtaaatttataaataattacaaaaaaaaataataatatttgtattataagaatattttattttgggaaatatatttctatttaaggaaataaa

SEQ ID NO: 104965 - DNA, 794 bp, Cannabis sativa
tcaaaattgtagggaactcaatataaaaaaggtctttaaggtaattgtaaagggaacttttttggaaaaaagatcaatgaaacaagtagttttctaaaaagagtttaagaatctaagatttttctttgattgttcttccattaaaatctttgaatattacatttggtttttaatattttgttgacgagttctcatcgtcaacatgcctctatgtatattttgtagttagacacttctagaaaccctcaatttatagggttctaaaattttgaggtaattagatataattcaacttaacaatcttttcaagtacattttcatggatgagtggtgtgaacttcaatcccctatctaaataaaattacaatgtgaataaatttagaattctggcatagatttcccacctaccgaaaaacaaaaggttaatatttttcattttttttttctaaaaactttttttaaagggatttttttaaaatttaataatatatatatattcaaattagtgttatgttttcttttcttaaatctttatattaattatttagaaaaattgcagtataagtcctcataaacatcaatttaatgtaaataaatccttaactttaaaacttagcagtgatagtctctaaggtaaccatatttgtaattatgttagtattttttttttactaacagatatgtttaataatttaaaatgacacgtgttgaccgaggtttttggcaaccagtcaaataatatataagaaaagctgtaggaagtttagcgcatgagatttttacgtggttggggc

SEQ ID NO: 104966 - DNA, 1311 bp, Cannabis sativa
tgttgagtaattgtccacacaattcaaagcaatactcagcataatgaagaagattgtgtagttcaaaatttcaactaaaggagaatccagctttagattttgatcatactctacaacagaaaggatcaaaggttaaagatctgaacggaagaagtcatattattatgttgccatcaatgtacagtttttcataatttttatgtgtttattttattgttttaggtaattcatatttaggatgctagattatagaattataattcaacatacatgttagtaaatctaaatcttggtaaaataattttcaacaacatatacatagtttacaataataaaacgatatacatagttcaaaaaaaattacacatagtttttcctaatttctcatatcacaaaactaaaattttcaattcaaaacaatacatttcacattctaaataattattaacctaagaactaatttacatatatatattcattgattaataacaaataattttggccaagaattaaaaaatattgaaatcatcttctaaacttttctctaagattaaccaaacaatttcaaacttataacaatttcaaactcacattttcaaaaaaaaaaaaaaaatacctataacaatttcaaacataaaagattacaaattattaagtaaaagggaaagaaaaaagaacttaccaaataggacaagcgacgactggttggaggataagtagcgctggctagctagaggacgaacgacgactagaaaagggctagaatcgtctctagtttggatggtgcgtgcagttggctatggttttagaagtaagaagagaaagagagggaaaaagagagatgggcgggctactaatgttaatttagacccgtcgagatcgggctttctaattaattttttttttaaaaaaaataattaatcttgataattttgataaaaactgccgaaattgttatctatctcgacagtaacacacggaatcgccgagattggggtgccgagatagcctaatattcttgtagtgaatatatttgtattttatatatgcataaatacatgatattttgttcacttacttttaaggtataaatcctaacaaatggttactcagtagatactcgatataagcatgttcttgtggttagagatgaattttcgatatatactctatggtacttgatagtactcaatggtattgttaagttatgttatttaatttaaagcattcgttgtactcgatagtactcgagtaccatcaagcttatcaagtgctattaactgctatcaaatctccttgagtactatcgag

SEQ ID NO: 104967 - DNA, 708 bp, Cannabis sativa
cgagtttaaattagtataaatttgcattagttccgaatcaagctcgataaatatatagaatggtggtagttattatgtgcaaatgaataaataactaattgtgctaatttgaggtatttgcttgtgtctacttgaatggaagtatctaaactatcctttacaattataaatttgtaaagaaaatggagtttctatgcttaaaagtgcatgggttcctaatttaaaatgcctcacttttatacactataatacccaaaatatgttaatctctccatttacacataaaatactctcttatgattttttattttttaaactcaatctattctctctctttctcatttgtttatctcgatctctctcttgttcaatccctctaattattttttctctttgttgaatccactccccatggtctaaacccaaagatccattgccgtcaaacccaagagtcactaaaaattttggaatttctgcccatttcatactgtcgagtaaaaaaatttcaacaatctataaaattgtcgcaaatactgagtagaataaacaataatagaaaaatgtcggggaaaagaattcccgacaatttaaaatcatcaactatagtcgatactatgtaggtcacggtttaaaaccgtcagctatactatagtcgacggttttaaactgccgattcccaacagttttaaaccgttgctatagtggatt

SEQ ID NO: 104968 - DNA, 1250 bp, Cannabis sativa
agaactccatccccaagcaaattcgtcgtacctcccactgtttacaacatctaaaatagacctaggtacatttttaatcttagtgccactaagcaaaaaccattccacaaaatacaaaactgccaacttaacaacatcctcatcaaaatcaccccacctcttagtggtaaaacattccctaacagattctttagtaatagaggatgaagttggccaatatttctcacaaagactattaacgtcttgcttaaaatctaacacactacaatcaccttcacaatctaaactagttatcaatgtaaacttcttaatgctaaacctaatcctaacaccacgtatcataacccacaattcagcatcattaggttgttgaacctcccgcaacaacaacccatgaaaaacttgcggttgaactttaaactcaggaagcttaaggaaatgtccaaaacaggttttggaaaacatttcaagctgttcaagggaaaggcaagacttaatattttgtataaccttgaatgtagcagtggaaacggctttcgcaataaagagattcttctgatcatatatgtaatcccattcctgtatcagttgaaacaaaaaaacatgaggaaaaaaacaaaagactaaaaatagatttagaaaagtactaataaaacaattaaaaaaaaaaaagacaccttaggaggattttttttgggtaagtcaaagccttcaatcttctctgagctcttaacatgtacctgaaaaaaatagaaaaacaaaataaaacataagcaacaaatctgaataactaaaaaaataaaattcaagcaacaagtacaaggcaaatctaaaaatcagtaaccaggaaacaaccaatacacaacctaaaaataacatttatagaacaagtccagtatgctaagcctaaaagataaacaacttcgaaaaaatatagtaacaacactgtaacaacttaaaaaaaaataaaaattcgaaaatagttgtcaatactgaaattgtgattaaacaaccaaaaaacactcaaaataaacagataaacaaccattggtaaaaatgtcgtaaatccctgtaaaataaaatacgcattaagttgtgtaaatataaaaacaaccaaacaacaacttaataacaacacgaaaacaacatcaacaacaatacataaaagatatacaaaaagaacgacacaaaacataaaacagtgatgataaacaaataaatcattgacacaaaaaaaaaaaaaaacaaat

SEQ ID NO: 104969 - DNA, 1059 bp, Cannabis sativa
  modified_base (164)..(166): a, c, t, g, unknown or other
cacgtaaaaaaacccggtgttcatattttattgttttatagcttttattatttctgtgttgaattatcattgtgaggctcaaatttggataacaaatatctgcattaacaaaaaatatcctaagttaagttggtctaaaattaattaacaaattaattttcaannnaaatatatttttctactttattaaatattagaaagtataaattagttacttgaaatcactatctagaatatttcattaaactaactgtaattttctaaattaatttcaaaataatccaataaaaaattaattttatttatttcaaaattaagtatgttactaattcaattttaattaggttaaactagtataattagcctaatataattatttaaataagataaatgtgccttcacaattggggtttgttcatgtgaaggagcgctggattcagtatgtcgtacccctactaatggccccgtaactctcacacaatgccgaaaggagagaaatttaacctttcattaaataattgttattcattgaataagtctaatactaattgggcctaaataaaactattataagtagtatttcattttagcaacctagtctatttatctatctagaaataaataggcttcctatatgcatctaagcccaaaaaaacacatataggctcacagaggtcaaattcatttggatgggccctaacatgtttctaggtttacacatatgaaagaagtacaaaatttacctgttacaaattatttatagtatctattgataattggagtatgattaaaatcagattattggatctttcaacaagttaatcatagctatttataacaaataaataataagtttgttaaaaaaagttttgaataaataattaaataaaaacaacaatacccatgtaacaatatgtgaaataagatattaatataatcaaattattattttaactaaccaactaaattttgaaaatttaggttgttaaaataactttaactatctcttcaaaatttaaaatttaaactaatttaaaatatctaggtttatttgaatta

SEQ ID NO: 104970 - DNA, 560 bp, Cannabis sativa
  modified_base (85)..(87): a, c, t, g, unknown or other
gtttggggagcgagaaatgatgttgtatggcaagggaaatcgtttaatttttcagctatagtcgcctctgctaaaagctatcttnnncaatggaaatacgctcaaaaaacttaaattgagtcattatggtttgatcttcaggactatgatgggatggagcgttggtttaaaccacaggttaatagtatcaagatcaatgtggatgcagctatttttgaaggacagaatcgatttggaagtgctttggtggtgcgtgaccacaatggtatgctcatcgaaggccgtactaagttacataatggtaatattgctccgtccattgctaaagcactgagctttccggaagctttaagttggattaaagaccatacatacagttcagtttgggttgagacggattgcttagtggtcgtacaagctttgcggaactcggctattatgtcttctcattttggatgtgtgatccaggagtacaaagcaatgttggctagtttaaataatgtctatttttgttttgttaagcggtcagctaatagagttgctcatgagtttgctagagc

SEQ ID NO: 104971 - DNA, 1582 bp, Cannabis sativa
  modified_base (90)..(90): a, c, t, g, unknown or other
  modified_base (1186)..(1190): a, c, t, g, unknown or other
tatcaaagtctagggagcatggtttagtacataaacaatcactgaaaagtaaaattgaatgaaagtagacaaaaatccttaaatttaacnatctcaatagttcagggaaaatttctaacaactaaaaaattcaggaggcacgatttagtacatgtcaaagttcgggggaaaaattattaattagccttattattattgatttatttgggaatatgttcactgagattctaaaattgatctacacctttttgatcgaagtttatataatataatattattgacagatacaattattttttatgcacatgaaaaagctattagatggagtaaagttgtatatttgtatatagttcatcattgacgacaaagctccaaaattatgagtaagctctgacaagacaagccttttcatgtcattatatacaatacaactcatatattattaaattaatgatggctctattaattaaattagtgacaagttattttcttgcactactctcactataataccatcatatgcattattatattggctggtgaaactgctacttcagctcaaaagtactttaattatgggcatcatatatatatcatatgatgatatatatcatgcttggtgttttcttcaataatgtttatagtgttatgaagacatagctaaataatctcctaaagtacccatcactatattaattttttttttttctcagaatgaaatttaattaattatcatactttaaaaagagttttcattataactagttaaaggagttttcaaacaattatgatggtttttggtaatattttgatgatttttttattttttaatcacaaaaataaaaataaaaattttatttttaaaaaataaaaatacgttcggtaaatatttttattttttaattttaaaaatatttgttttttgtttttaattaagttgggtctgggttcggcgtttggggccagaattcgggtcagggtttagggtcggggtcgaggttggggctagggttgggtacaggtgcgggtctagggccaagactaggtttggtccaaggcttgatcaatccaggttccgagtctacaaaaaattttactttttgtgactaattataaattattattcttatgctatgactaaaaagtccgtagctaaaagtatatagtcacaaaaattacaatttgnnnnnactaaatgtatttttagtcacaatacttgttgtggctaaaattaaattagtgataacttgtagctaaatactatgttttagtcacatgtaacgtttgttgtgactaaaaatcacatttagtcacaaaaaatttatattatgactaaaaagttatcactaaaaatagctatttttataatgaaaatgttatatatgtgaattaaaatttaactttattatgaggaagtactgaacttaagctcaaaactagatttctgatgtcattataaataattttatatataaaagcctttgtagtcacaacaaaaaatattatattttgttttgaaattcaaaaataattacttgtagtaataatttttagtcaaaatatatattttttgtgattaaat

SEQ ID NO: 104972 - DNA, 1080 bp, Cannabis sativa
atttaaaatatattttataagaatatgaaaaggaagaaaaataaaataaaagaattagtataaattaaaaatatatattttatataaaataaacattattaaaataaactgtacttataatataattttatacgtgcaaataaaagtcccttatataaaataataatactaattagtgatacttataatttctctttagcttcctcttgtggagtcagttcaaaaaaaaaataacatttttgtttattatatgctatgtcaacggggacaacccacttctacaactctaataaaaaccaagttttaattccatagtagtattaactagttctttgatttcgtaccctagtttataatttatgtatttgactcaaaaataattattatagcattcgagttttaaaattttaaacaataagctagttgtttgatgttgtaccctagttattgacttgactcagaacttaattataattcccaaatattaataccctaatactgtaagctagctgttagatgttgtacccagttgaagatttggctcggaaatttattatagcatccaattgttacctaatccttcaattgttcattatattacaaaagaaaaatattcaactccctttttaaaaaataaaaattattaaacttcacgtgcttttattgttgttttatttaaaagcctgttcaacaccacgtgttgttgtgcactgtgtagttactaactcacgttatgtccagtttcccaaacataatttaatactcaaagtcaaacatacgagggcaatttagccgttggatcagaaaagactcatccaacggttgtaatctcatcctatgctgtaagctataatagcaaaaattagttaaattacatttttaggggaatcgaaagttggtcaacaatttcactttaaacgtctaatatatgttggaatttcgaaaaagtcaatattcacaaaactttatttataaattcaacgttgtccccaccagaaacgtagatttttggctccctaatgtttgatttggtttctggtaaagtctccttacaaatctgaatcggaaacttctcaatta

SEQ ID NO: 104973 - DNA, 506 bp, Cannabis sativa
cccaaacctcggccatggtcccaacctcgaacactgaccacagtctcgatccctgactcggcctcagcctcggacccaatgtggttgtaaaatacatttttatttttcataaacaaatttttagaaataaaaacttttatttttgtgattaaaaaattcaaaaataaaagtgttaccaaatgccacatttttaattatttttttgtttttaaaattagaaagtgaaaatattttccaaaattacattctacaaaactgtttttcaatatagtataattttcaaattgagagtcaaaatttagaaaacaaaaaaaaatcactttcgaaatttttttaaacaattttttttcttagcttagttaataatattttattttggactccgatcccaaccttgaccttggaacccagacccaaccctggacccaaacccagcccaaaatcgaaccagcatcccaaaccctaaccctaaccccgaccccgaccccggaccctgactcggacct

SEQ ID NO: 104974 - DNA, 827 bp, Cannabis sativa
tattatactttataataataattaaaaaataattattattcgtactaaatttatcttcggaattaataaaaatgacattaggatcattgtaataatttttaataatgatttcaaaattttattatgctattatttagcttcagatcttcagagtaaatatcaaaatttaaaaataatttttaataaaaaaataaataatatgaacaaatttattattaattgtaattttatatagaatagatatataccacacaataattggatatatatgatatatatttgaactgtagaacaaattttttattttacgaaagatattttaattaagtaacaaaaaaataaaaaaatttgagatgagatatgagagtatgggtaaaaaaaaaaagaaagaaacatataagtaagagtattttctatatctatgtataataaaggtaagaatgttaaaataaatttacttcatataaatttgtgcatggaaattattgataaaaccagctaattaattggagtatgaatttatgaaaatgatgaaacctgatagtgacatggctgagatcgatatatgaaacacaaacaaagttttggtatatatatcctaaaccacaactcataactttgttaattaaacgtataccgtacaaatggttatattatataatattaataataatttgttattttttttattttaaaaaaaggtaagaatattaaaataattctttcatataaatttgtgcatggaaattattggtaaaaccagccaattaattagagtatgaatttatgaaaatgatgaaatttgatagtgacatggctgagatgga

SEQ ID NO: 104975 - DNA, 911 bp, Cannabis sativa
aatttcagcgattaggttcgggttatgaaggatgaaatttaagtgtgtgtgtgtgggtctattaactttgatgggtgttaagaaaaattaggcttttggctcaataaggtgactattgacaatcaaaaaatttcgggttagcttgaaaggctcaatcgtcaaaaaatggcctaaatcatttccaagttgtaaagctagctaggatttctccttaagaattacgctaaccaattctagatgcttaaactttctcaaagtgttagctattctagaaactcaaagtatggtgggataacacaagtacacctatttgaaagaattctccttaaactagcatttagacaaaatagcctttaaacttagcatttttaacacacaaaaatcagggcacatcacaaatgaaaggaaatcgttatttttcatcatcgagcggcgctaaaccaagctaaagcaaaatgatatatacttctcagttacaagctaacacaacatagcacaaacatgaccacgtaacattactaacatgactttaactacacaatgttactacacaaacaactaaagacaacaataaaaacaaacgatttaaacagaagcacacataacaacatcacataactaacatcatttaaactaaacaaacacaactatcacacatatttacagtaaagcaaatagattaaggaaagaataaaactttctcacgggtcggactcttcaccgacagagcccctctcttcaccatcaatcggatgccaaggtgcaagaatttgatctggaaaatctggatatcccgggataactttacgcacgttggtctacagcgcacgcttcacccacatgtctcttttcctttcatactcccagtttatagatatatttttttttgaacccaatactcccagttgttg

SEQ ID NO: 104976 - DNA, 511 bp, Cannabis sativa
acccaagatttaccttaccacttcaactacaggatccgaaccaactaccataaaggaagccttagccaaccccatatggaactctgctatgaaccaagaaatgacagccttggtcaaaaacagaacttggatcttggttcctaaaccagaagacacaccaatagtgagttgtaaatggattcatcgaataaagtacaggtcagatggctcggttgaaagacacaagtctcgattagtcgccaaaggttttcaacaaactctaggaattgattattttgagacatacattccggttgttaaaccttgcaccatacggatcatgttcaccttggcagctaccaacaagtgggatattcaacaaattgacattaataatgcatttttgcatggtgatcttcaagaaacagtctacatggcacaaccttcagggttcatagatgctcaacatcccacacatgtgtgtaaactcaacaaggctatatacgggcttaaacaagctcctcgagcttgg

SEQ ID NO: 104977 - DNA, 1682 bp, Cannabis sativa
  modified_base (47)..(53): a, c, t, g, unknown or other
  modified_base (291)..(291): a, c, t, g, unknown or other
tgttgacttcgcttttagcaaccgacaatgagtctttttgataagcnnnnnnngatatgtcgtaatgagaatatgtaataaagcaataagaaaacactggaattttatagaggttccgcccccagcagttcggtaatagcctaatcctcgatatttgtattgacttaagaacaaggaataagtttccttttcttatagctcttacaatagcatctcggaatatataattcttagatagccttagcttacagcgtttcagcttataatttttccgtcctttgcccagtgaanattcctcactatttatagggttggaaacttgaggaggaagagtttcctctcccgttacaatgcgcataaacagaaagatcgtgtgatcaatgctgaatgcaaggatcgagggattgaggctgaatacactcataatgggatcgtgtgtatgccacatccacgtaagttgatccgtgagttgtaggaatttagctggttgctcatgatgcgttaagctaaattcgctaagttttgatcattctgcactgctcgttaagtattccattctggatatgccagcgaggcatcctactcggcatattgctctgaacagatactccaagtagagtccacgtgtcaccattctcgtgatgccacgttagagtgccaaatttgggataacagacacttccttagtggaagtggaaggatatcaccatcgactttgtcgttggattacctacaagcataggtttatttgattcaatttgtgttctagtagatcaattcacaaaatgtgcacattttctactagtaaaaacaacctttacagtggatcagtatgcatatttgtatgtcatagagatagtaagattacatggtgttccaaagtctataattttggatagggatctgaagtttacctctaaattcttgaagagtctttagcgggctatgggtaccaaacttaaattcaatacagctttccatcctcagtctgatggacaggttgaaaggacaattcaaatactagaagacatgttacgagcctgtgttatggatttcgagggctcctggagtaagtatctaccactgatagagttctcttacaataacagttatcagagtacaatagggatggctccttatgaatttttatatggcagaaaatgtagatctccaattcactgggattaaacaggagagaacaaatatctgagtccataatcagtgcaacggactaatgaagcaatagaaaagattaaggccagaatgtttgcctccctcagtaggcaaaagagttacgcagatccgaaacgcaaaaatgtagagtttcaagtaggtgttcatgtgcaacagattaaatgttttgagaaaagaggcaaattatgccctaggtttataggacctttcgagattcttgagaaggttggacaagtggcataccgtttagctttgccgttaactctttcagcagttcacaacgtatttcatttttcaatgttacggaagtacgtttcaatttcttctcatgtactaagttatgacaatcctgagctgcaatcagacttatcttacgaagaatagtcagtccagatcctagacaaaaaagataaggttctacggaacaagaccatagctttggtcaaggtactttggagaaacagcaaggtggaggaagccacctggga

SEQ ID NO: 104978 - DNA, 687 bp, Cannabis sativa
gtggtacagactcgtaggggcctggttgatccaacaaatccacagacggtggatcctacattgcagaacctaggaaatgcaagggttctgctagctgttaatcctgaacaatcagcaaatgtgggtcacggtgtaacgactcctgtagatgaaatcgcgcctggtgtgcaggagactagttcagcacccaaccagggcattcataacatagtcgttccgcctgctaccaacactcaaacaaccattggagatgatactgagttacaaaacctccgtgctgctcttggacttgtgcagggtcatgtcaataccctaaatcatgatcaggaagaactccgcactgcggtaaatctcgcgttcgaggaacaaaggcgtgtctttgccaagtggagagacaaagagatggaagcgttaagggctcataatacagagattgaaaatcgtagtccgcaagctactgtgctaatacgaaaagcctaccaaactgtaggtcagcaacctccgagtgtcatccttgtgggtgagacgtacgaagatccagcgatgaatacttcccagactgcaaatggtcagccgccaaatctggtgaaggtaagttttatacgcatgagggtttctagtttagggagcataagttgtgtgtgcgtaattgttctttacaagatttgttagttcgggaatcccatg

SEQ ID NO: 104979 - DNA, 622 bp, Cannabis sativa
  modified_base (479)..(485): a, c, t, g, unknown or other
cttaaatgaaaaacgccattaacgtttggactaagctttaaaaggttccaaacttgatttctaactcaaaatcacctcaaattcaacaagtaaacgtcagatatagtcccatgactacccaagaataatcctataaggtcagaaccttcataactattctaattcacgaaacccctatataaaactaattgtttttaaacttaaaacgaaattaaaccataccttaagctttctcttttcaaagatttgatatcctgctacaaccggagcttagatcactaggtttcgggttgaaaatcaaagaaaatagatataaggggagaaagttttatcgaaggagagagaacgagagtttcgttcgtcgtcgtttgtttctgtttactgtaacttatataatatatatatatatattaacttttatacgataactttatatatataaaataatatattaataataatattaataaaaactttannnnnnntagttatcttattatttcttagttgttaagaaatctatatttttagggtatctggtcgactccgagtacccttaaatactttagtatttctaaaatcaatttatcataataatcccatcaataattctaactaaaac

SEQ ID NO: 104980 - DNA, 680 bp, Cannabis sativa
caaaggtctgcttctttggtattgtatgttttagtataatgtaatattgtatatattcacaggtaggaatgattggagaaggtgcaatctcaggaacgttgacttttcaggtagtattttcattgcttataagtatgtaaagtcatttggctaaaagattgtgaatgaaaattaggaatttccctattgaagattggtactgtctcgaagagtacaccgaatacaatgtttttgtgtagttagtttcttttattctaaattttgttccttttttctttaccctctttcttctaaattttggtgagttcctctgtttactgctcatataggtttcttagcagagtggttgaaaaatgtttgtgctgaaatgtaacagatgaataaactaacttgtatacactttttaaaaaggtttcttaccattgcccttgaaagaaaagtctgtttatgggaatacctgtaaagtccatagtgatcataatcttcgtatctgtttttgagaatacaggttcatatggggcataccgcgtgtcaaagtttagaggctggaatgttaaagaaacacattgttgttctggattccaaccctgttccttgaagcattgcacgaaaagtactgagacatctgtctttcactatagaaaaaataacagattccttgttaatgctgctgctgaaca

SEQ ID NO: 104981 - DNA, 797 bp, Cannabis sativa
  modified_base (490)..(491): a, c, t, g, unknown or other
cattggaaagctcgttccgagctctatatgattatctatattttgaatgcaaactttatattatgtgaaagtagaattagggattgatcctatttgtaaaatctaagattgtgtgactaggattatcgacacctgatcagcagcacccaggggtttggaatctttgttattacgagacaacaggtaagacagtagtttgcacgtagagtatgcacggtggcgcttatgttgaatatgatatttgtgagtaacggtaacggggattaggcttattaccctaataggagcggttaatagccaagggttattaccctagtgatataagttgagtatatgctatggtatgataagtatatgatcatattgagattttagagttatgcgctcaaggcataatcgggttggaatcgataaccataaccgagataaaccattctaaggccttattgtatttagacgtgtgagagaaacacgtaggtctacgccacgnngacataaatagacgtgtgagagtatggacatgtctgggccatatcagacaaagcgggttggggtctaccaatgttgtgtttttgggactctgttttgccgtttaggccggctaaaagaaaaggacttctaataatattttgtaaatgtttttgggatcccaacttctgtaacttttagtttataaagtttaaaatattacaagtttatttccattgctattgttattaaagtttcaattctgcgctaattttattagtaatcccatttagaggattagggtttcataagtatcttgggtaacgtgc

SEQ ID NO: 104982 - DNA, 819 bp, Cannabis sativa
gtttgataaattaaaaaaactgcatgtgcaagttactttgaaaaaataatcaaaaatcgcaccacccacaccgcgaacactcctattattaatattaggtggccaaataaaatttcgctacatgaatacttgtatacacagtgacaaccctatttggcacttaacagccaaaaattaacagaaggagcgctgaccaaaacgattgtggagttcggggagtttagccctaattttttcaataaaggggttaatctgtaacgaacctcaaagtataaggagtttggctgcaaattacccattaaagtattagatataaatatgatattggttattttcttagtctagcagtggagatatgagtttccgatttagagtaacggtgcaacatttcactacatgttttgaaattttaacgaaataagttgaaaaatatatcttttttgtattcattaataaaaaatattttcatattatattttattaaaatatacccacttttttaaatgatttacccaatgtactctctcagtctctacttaagtctagtgtataatttatattaacctaacgagtctaattgagacatcatctataaaagtgtatatctttaaaaatataaaaatagagataaaaattaaaataagtaaagtaaaatgaataatgtaatttcctcaattttaacactattacattttaaggttacattaaatttgtgcgtaccaaattaatgcaatattaatagtgtttgattttgattctatactaaattgttgtataactttttttttcttcaattctaacatttattttaattttttt

SEQ ID NO: 104983 - DNA, 553 bp, Cannabis sativa
cgttaggaaatttaaattttcttttaagaatttaaacttaagctttgagtatttaaatgctaaaataaaaattaaagagacaaaattataattataattggtatattcattctatagattgaacattcttttaagtaattactactttaggtttccaaaaaaaaacaaagtcattattactttaaatttaaatgaaataaagacagaacctatctaatcttttccaaataacttctttcacgggtcactttgcaaaacttaaaggtaaaaggaccagactccaaaacacgaacaattatacgaagaaaagtgcatacatacaaattatgttaaatattatgtcatacaacaaatatcacaaatcagagtggcgcagcggaagcgtggtgggcccataacccacaggtcccaggatcgaaacctggctctgatattgagtagctaatccgcttaagccaaattttttttgctcttatactttggaaaattctacaatgaactcctttaaaatagatatattgatgcacccctatctattttagcatccgaaata

SEQ ID NO: 104984 - DNA, 835 bp, Cannabis sativa
ttcatcttcaacctcaagctttcaagaatattcaacaatggaggtggagtagtggcttcttcgggtttgtaagtatcattctctattacatttgagaaattgattaaggattttgggaatttttatgaagatagtgattatcttagaaattctttgttgatagtgggattattgggtttatattgtgattttggactgtgagtgtgtttatttgaattgttctggtgtaatttgaaatttgggaaagtagaaatttaaggggaggtgctgcccaatttttattagaattatttttgtgaaaataattgtcattgtgctataatgggtcctaaaagaacaagacacgttgaagaagggggaacatgatcaaacctgccacctaccagttttgatcgaactcggtttgtaagtgaggcggcacaaatccggttcatgaggcttaaggtgaggccatacattgatgatcggggtattgaattccctgaaaatcctttaaggcgtcaaccgaggtttgaaacaatccgagcccaaattgaaagaatgaagtggggcagttttgtggatgctaggggttgggccaatgtcaccatggcatgtgaatttctcgccaattggcccgagcgtagaaatggggaagtgaaggtgcagggtaagaaggttccgctacagctgatgctttcaaagctacgttcgctgtctcagactactcaagagaagaacagcggcaccgaattattgaggaggaagaaaaactcgacatggtggatgtggctgaaactatgggagttttggggctgagattctgtaacgccctaatgctaaggcacgctacagt

SEQ ID NO: 104985 - DNA, 612 bp, Cannabis sativa
tcggatgaccatatcaagtacgaaataaaagaacatttgctcttaagtgaatggccttctgggcggaccatacccaaaggttcagataagattatcaagtactcatgtcgcatgaccacttttgaaagtacaatttttattttctactagttgttttgtttatgctaagctaaagatcagatcagatcagatcaacatgatagctttgatgtaagttactacggtaacagacacattttcgaccaataaatgaataatgatgtttatttaaattcaaattgagtcaaattcatcagcatgttaccaatttaccatctagtgcgtacaaaaggtttggtcgtacccaaaaccccgaacagcaaaaaagcatacttgtgaaaaaaaacaagtgaccaagagtcataagtctgctcagtcacttgggggcagctatacgtgtacaaagcatttggtgaaaaacaaaactaacataattgcacgatgattataaacaaaggatgaaattcattgtgaataacaaaagtattcaaacccaggattaaaggatgcccggtcagccagttattcaaaaaatgaaaaatatattcaaagtttaaagaccgcttggccggt

SEQ ID NO: 104986 - DNA, 831 bp, Cannabis sativa
  modified_base (354)..(358): a, c, t, g, unknown or other
acaaagagaagcggggacatcgggtccccttgacgaaggcctttttcacctttaaacgacccttggattcttccattaagcagaagggcataagaagctccgtgaagagttagtctggtcaaatcgtgatcaaataaaaacttactaattgccgcttatttggaaattaaaaatatgcgcctattctactatcaggctactaacatgcttcctaacagacttttcttaaatcatattattaaaataaattactaaagcaataaaagcttactgaaccgtgaaacgagctgatcactgatgatgattgtacatgtcgtaacgatcttcgaaagacaacctggcggctctgatacnnnnntgtaacaccctaactaatttaggtatattagcgtgattttaacataaacttgaatgaaaaacgtgattaattaaaatttacttatttaattaaaaaaactaaagtaatataattataaaatcttgggatcccatttacaaaatacatttacaaaagtttaatattcatatacaaaagtttgtcacctagcgactatacaacaaaaaccctgatgtcccaaagatcgtacgctgtaggcctaaccgccccgacatgtacaatcttcatctgctcgccctcacggttgctcagccttagccttgcccttacctacacatggaaatagcattgtgagttgacaaactcagtaagaaaagcataacataaaacataggaatatcccaggttatagctaggcgcccatacacccgatcataaccctatccccgtgtcccacacggtattgagtctagaacgttcatacgacaatacta

SEQ ID NO: 104987 - DNA, 720 bp, Cannabis sativa
taaggtatcttcacatgatgatctgtgctgattggtggagactgttgttgtggtgcaggactatcagtagactttttttttctgttgatgttggagttggtgccggttgatctttaatctcttcatccacttgttgtatcatctcaggcccatcatatttcttaccgctcctcagggtaattgccttgcagttttctttaggattaacttcagttgtactaggcaaatttccctgaggacgggttgctacctgagttgctagttgtcccatttgagtttgcaaatctttaatggaagatctagtttctgtcataatttgtaacaataaatctgtcagaagaccagaattcccactagagttttgctgctgaatctgttgttggttttgaaactggttctgatttcgctgttgatagaatccactattctttcgttttcctccttggttgaacccaaagttgttgttttgagaataatttccaatggcttttgcttcatccattggcagattattcacatcttcctagcactcagaaaagtgatgaggtcctccacatagctcacagaccacttgagcttgtttggcttgcacaagcatcagctttgttagggtctttacctgagctgtcagctttgtaatggcatccacctctaacattccatttaccttctttgtctggcttctttcagttggccactgctgattattcagggccatct

SEQ ID NO: 104988 - DNA, 875 bp, Cannabis sativa
gcctagatagctactcttgtatctcagatgagggaaaccaatgaaagcctcaaaacggtacaagaatagaataaagcattccgagaagagaatgctctgctgaaatcaaaggtggagatactggagtccgttcaacgtagtacgacagagtttcagtcaaggtttcatgttccaattccatccatgcaatcccttgattccactctgactaaaaacgtaggccaacgtccagcggtcataggaacaccacaaaaccaaacaacacaccaacattaaaccacaacgactattggagcagatggatcggtaccagggggatctactctaacacatggaccctctttggtaggtgacgagactatgatcaacgcccaagtcacatcagttccagacagaagtgttcccgcaccaagtgctcaagaaggacaactcaagacctccaacccaatcactccaagtattttgatatctaatgttcctattgttccatttgtaggtcaagccgtcacaatgacacctaaggagatgatcgaacaaatggtagcaaggaagcttgaaggcatggaggctatgattcacagaatcccaggagtccttgcacctatcaaaaagagctcgctaagtagcttcccagactctccatttgtggatgctatagctcttgtggagatgccaaaaaagtttgtcttcccatcaatgaagatgtacagcagaacaacggaccctaacgatcacatagcgagttacaagcaaagaatgttcacagtcgtcatccctcgtgaactgcgagagacttgtatgtgtaaaggcactactacaaggaaaggccttttatcccggtttttaaggctttttatcccggttttcgctaatat

SEQ ID NO: 104989 - DNA, 1200 bp, Cannabis sativa
  modified_base (1026)..(1031): a, c, t, g, unknown or other
agtaaggaattgaagaatctgttcctgattcaagaaggtcgagttgtcagcagaagcagcacaggtacatgggatccgtggccttaattcttggatttcatcccacatacatttaagctttgtaaaataagagctaacagaatcatctccttgtcgaagagtgatcaatgtttctcttaattcaaaaatctgaggaccattaccttgatcaaaatgtgccttgagttcggtccacatttcagcagaagtttcaagaaagataatgctgcttttgatttctggtgtgactgaatgcaaaatcctggacatcaccatttggttgcatcgaaaccaatggtgatggagaggatcttcgatcggaggttgatgcaaggtgcctttgagaaacacagtcttgtttcttgctccaacagacagctcaaaatcgtgacgccaagcctggtaattgtgatcagagagaggaggattaaccaagatcaatcctggatgatcaccggagctaagataatatgggcttgagctgtcttcaagagcaggtcgaggaatgtgaagatgattttgggtgagattgtctccagtcatggtggaagctggaggaatgatcagtgtatctgttggtggagcagctggaagtgtagaggaattatttggctaaggattgtggccagaattcctggaagcagtcgctcgagttctaaccatggttgagtatcaatggcagaaaaaacatagagaaaaagaggagaaagagattttatcgtctgataccatatgagtaaaaacagttatgatctttattaatgaaataagagaggtttatatacacacccatgtattacaagactcaatagatgaataacataatcagttagtaaactaactgtaactgacaagagaaacaaacaaaactaacagtctaacagtttaacaaatcagttgtgtctaagacagtgaacaaaaatatatagcatagtgataaaatatatagaaatgttcatttcaattaataaaaaatacaataaaatnnnnnntttactaattaataaatatatttctttgatgaataattattttattttttattataattaacattaaatagatattataaaagaatatttttatttttcaaaataatatataaaattcttatactcaaccaaacaatataatttaagggtgctgattcggtcacgcttt

SEQ ID NO: 104990 - DNA, 721 bp, Cannabis sativa
  modified_base (419)..(419): a, c, t, g, unknown or other
ttcattctttaaaaagaaattgtcgaaactgtgcacaaatacttcgctgtctccttcataaagcagacgaccttgagtttgaagctttcaacttctcctttggtaatctatgatttgttaatgctttgcttatctcttggtattcaagataccttcataagctattacccccagcaattttagcagatctctttctaacttcttatcttggattctattcagcacgcatttctatgacagattcatctctaaagtcttcacatagatacttcccatctaccttaggagtgtgtaacttataaaacatccatcaagatagtacttttccttaaagatctattctttcatccttcttaataagcgaattttgtgaaatgccctgtcccagtctagtatagcatcaactatcctaagccatnacctacttcctataggttcggcttcctttcataactaggtgtgggaactgcctctttaaccatttatagacgagtacaatcctatgcatcagtatttagttagctattggtacattttattatgtgccttaagttgcactactagtgttggtgatctatggcgctgagcctgtgaaaactcttcaacaaatcgtctcagtcatgctcgcattccttttaatgcctctattagatcattagccttaactactattgagttttctagaaaatcaaccatatgtgggtcagcggaacatacatcc

SEQ ID NO: 104991 - DNA, 521 bp, Cannabis sativa
gatgtaccatagactttctcaatactaattatatgtatactatctattaatatgttttctctaatttattatgagaatacaatattaggtattcgcactcataaaagtaaaactaccaatatatatatatattgtatttttgataatcgaatagttataatttaattattttttacaatttattttacacgtataaaaaataaaagaagtacgcgagcaatttttaaatttattttcaacgcattaaattattttaaacttttcaaaaaattacatgatatatactattatataaaaaattaatatcaaagctatatgaatattaaaacacgaagaatatgaatctatacacctttttatgaggggtacaaagtaccatagaatttctctaaaatattttacacaatatttagagctaaattaagagaaggaagatgtatgtatatgttgacgctaaaaagtagttctgagaacgtggacatcaatgtttgatacgtgacaagaaagatgacatctcggag

SEQ ID NO: 104992 - DNA, 810 bp, Cannabis sativa
aattacaattgaattgaattggatgctaaatgttggattctaattggatttcatcagttattggatgtcaatttcaaaatccaattaaaaacagatccaatccaattacatttatatatgttaaaaaattatttatatttatttatataacaaaaaataaaaaaaatatataatatatattaattatatttttattggatttttttgtgttaaacttgtaacagttggttgttttgtgtatttattttcatgatgttttgacctattttattacttaaaaatattattgttttaattatttgaaacttttagttgcattacattgtaatgatgatatgtttatggaatattaaacttaaataaatggtgatatttaatttttatgtatttttcttcatatttttatgttaattaatattaaaatttaggtgtgtaattggatatccaattaaaaaacttatccaatccaattagtaattggattggatgagattagattttgagatctaattagattggatcagctgaggagaaaaatattagattggatcggatacacacccctaacacattgtatatatattttttctgtgtggctgtcgcgttcctgaaagattgttatttctttcctttttgggaaagtagggataataatgattataggaaaatataaagctattagattatctctaattggaagatataaatattgtgttatatttaacacaaaaaaaaaataattttatgatatatttatattaatttttaatattatgctcaatacacaattataaaattagatgcaaaatt

SEQ ID NO: 104993 - DNA, 1112 bp, Cannabis sativa
tatttgtaccattttaaaaaatacggggtccattttgttatttaacaaaacagagggtcaattgataacttttgcaaaacacaggatccaaaatggtatttactctatttatattgtgggatccattttcaaaaatagacattagagttataatttttcaatttcggagattttattaaactctatgtgtattatttataacatatgcaaaatttaaaatttctatgatttgtgctcggtaatgatggaaaataatggatgaccattagagtcataagggatagcttagaacctttttttttagtgggacaaacataagtgatatttggaaatatcataattatgcgggattatggtgtttgactattttacctctaagcataaaagaaaacttaagttttaaagaagggcatttttgaaaatgttaccttttatggattttgtcttgtagtggttttagtagaaatttctttagtattattaagctgaatgattttgctattattagattcattaattaaaaaagaaattagaaaagaaaattagataaggttaacccacctcttggttccctttgctctttgttcggccctaaagctcatttttttcttcaaaattctgagggattcagtcatgattcaagtggttttaaagctaggaatcaaaggacatccattcagcgcgtgattttctatttaggtcgaccgacaaacttgaattcgaaaacgagataagactagcatagaatatatttatatatgaatgtatgtgtattatatgcatgctgatattgtgattcatatgctaccaacactagtacggtagaggtactgagtgcatgtggtacatcacatgatgtttaagggtacaatccgatgttaccaacactagtacagttaggtacgtagtgcatgtggtacaacactaagtggtgctcagggtacagttcaaaccctaccaacactaatagagtagcgatacgtagtgcatgtggtacggtggtcgtatcttagttaagaacgttctttattatctgataagccttgtggataggggtatgggtgcctagatacaagtcggtaatacatatgtgttatatacttttcttatag

SEQ ID NO: 104994 - DNA, 1124 bp, Cannabis sativa
  modified_base (189)..(200): a, c, t, g, unknown or other
actgtcgtttcacttgcatttaactctctaagctcaaattttggcggtaaaacactctaaactattgaactagtagcaaatttaaagtgtccgttggttaatgcttatgtgtataatactcttatacacatggcacgtttatattggtacacataatattattatttaaaaattattttcaaaattcannnnnnnnnnnnataaaattataaaaaataaaaaattttaaaaaataaaaaatattataaattttgaaataatttatatacttttaaaataataatattaggtataccaatataaatttgacacatgtacacaagtgtacacatacgcaatctatattggcaactaactgtaaaaaaatagatgtcactttagatttgcaagcagtttagtaatttggaaaattttaccgttaaaatttaagcttaattaagtgcaagtggagtgatagttgtgagaatttaaccacaaaaaattctttttagtttagttctttaaattttataaaaaatctactttttaaagtatctaatgagagacttcattcatggaagcttttacttttctaattattttaatttacgacttttgattaagatttgccaaataaatcctttaataagaaaagtattgctatataaaagagttgttaattataatagaggaaattatactatatatctcttttaacttaatatttttaatgtttacctcttttttaaaatatattgtgtttatctatttttttaacgattctatcaattttacttctatcacttcacgatagttttcattttttttttttaaattaaaattttgcccaaattttcgcacaaacttacacatccatctacaaagaatgcaaatctattatatttgaattatgtcttaattatgtaagcgtgtgagaataatttagatacaatgttcataaaaagaagtatatttaaattaaattttatttaaaggtaaatttaatcaatgcatacaaaaaatattcttcaatttcttccattatatttagagttgttaattataatagctccttaaaataattgcttagtattattattacattttttttaataaaataaaagtgttgtataatcaattaaatg

SEQ ID NO: 104995 - DNA, 1836 bp, Cannabis sativa
  modified_base (830)..(833): a, c, t, g, unknown or other
  modified_base (1294)..(1304): a, c, t, g, unknown or other
aagttgtctgtcgagtaaataattgataataggtgtcatccatgttagagagctatctatcatctcgacgtcttcagtttcacatatacttggctcgctcaccatctctaccgaaacgagattcaattcatccaggtcattctgtgaggccagttttgctaaggcatcggcgttggagttttgttctcttggaatttgtttgattttaaagtaatcgaatctttccaagttcttctgaactttctctaaatactttgccatttttaagcctttggcctggtattccccgaggacctggttcacgatcagctacgaatcactatgacaaatgagatttttgactttcaatgcctctgctatctttaagtcgacgataaaggcttcatattcagcctcgttatttgatgcatcaaattggaatctcagagcataatgaaacttaaagccttctaacgatattaatattacccctgcacccgaaccctgatcgttggatgcgccatccacatataacttccaggttgccgcgtctcgttgatcaggtggaatttcttctggagttataccttctatcaagaagttagctaaagcttggcccttgatggatgtttgaggatggtatgttatgttgaactgccccagttccattgaccattttatcaatcttccagaaccatctggttttgataaaacttgtctcaaaggctgatcggttaacacttttatggggtgagcctggaagtatggtcgtagtgtacgaggtgcatggactagccataacacgagtttttctagaggggaatatcgggattctgcccctagtaaccttnnnnttacatagtaaataggttgttggtacttgccctcttcttgcactatagctgcactaatcgcatcttccgagatggctaaatagagaaacaacatctctctagttattggtttcgccaaaactggagtcgttgctagatagatgcctctttatgttctgaaatgcctcttcgcactctttttttcactcgaactttttgttacctcacaatatgttgaagaacggcacacacttatcagttgacttcgaaataaatctgttaagtgcagccattcttcctgtcaaggcttgtacttccttaggcttcgtcgatgatggcatgtctattaatgccttgattttttcaagattcatctcaatacccctcgcgttaattatgaatcacaaaaaatttcctgaggaaactccaaaggaacattttttggggtttagctttatgttatacttctttaatatcttaannnnnnnnnnnaggtctgaggtatgatccttactttttattgatttcactaacatatcatcgatgtaaacctccatgttttgccctatttggtttgcgaacatttcatttaccaatcgttgatatgttgccccagcgttcttcagtctgaacgacatgactttttaataatagagtcccatgttggttacaaagcttgtatgttcttaatttggaacgtatatttttagcaggttatatccagaatatgcgtccataaatgacataagttcgtgcccagcagttgcatccactaactggtcgatcctaggaagtggaaaacaatcttttggacacgccttatttagatcagagaagtcgatacaggttctccaagttccgttaggctttgggacgagaacaggattggctatccacaagggataaaacacctcgcgtatgaagtcattgactaacaacttgtcgctcttcgctgggtagtttgaatcaacatttaaatgatggcagataatgatagggttgatccctatcatatctccatggc

SEQ ID NO: 104996 - DNA, 620 bp, Cannabis sativa
ttttttttttcaaaataactataattataactataattggaagtctttttgttcttttttttgttcttttttttttttaaaaaaaaaaactattaagaaatgaatattatttttaaagaaaaaaacttgtttcagttgaaaaaagcaaaaaaaaaaaataaaataaataaaaataaaaaataataagtcaactacttttattcctagtattaataattgaatatatatatatacacgttatttaatgctgacattaacgttaatatttactaatcatttgtataaggttatttttgtaaataaattgttaattatgtatattattgaaaaaatcccattataataggtgactcattacactttctcttcttttcttttttaaactgaaataagtttttttttttctctttaaattcaatattcatttccatttaaaaaaaaaaaaaacacaatattcatttctctttcttaatagtatttttagtaaaaaaaaaaaaaatccaattatagttattttgactaaaaaaaataccatcccaacttattatttaagatgttcattttgatatgtgaaaaacatatactttattgtcacaaaagcatctttagttttctttttt

SEQ ID NO: 104997 - DNA, 512 bp, Cannabis sativa
  modified_base (73)..(73): a, c, t, g, unknown or other
taattattttaaaactaaaattactaggaccactaaaaatttaccacgtgtataagtgtgtacacgtggacantccaccgtggcacttaactgtgatttttggacgaaggggtacagatcaaaacggaaccaggatttaggtagttacgtcgtcaaaatttcagtttttgtggttaattgttacaaaccgtaaaattaaagtggtttagccgccaatatccctattttataaatatacaaaaaaaagaaaagaaaatatgattatatgaaattttaaatatttttgtgattttatttatagaaaatacagttattttatatatttttatattgtatttttattaatttattattatttgtatattttttttttggttattttgattttgttcaaacgttatttttctattatttatatttaattgtttttaattttttataatttttttaaaaatataaataatttttttttgagaaaaatataaaataaaatatttgaacatatatatata

SEQ ID NO: 104998 - DNA, 589 bp, Cannabis sativa
tgccgtgtggcagtaaaattgaaaacaattaccccaaatgcagtatttttgtaaaatgccctaaatattaaacagccaaaagtataaataaaagggaatcaagacagctaggcaggcgcattgctcatcacctatataaaaagagattttggtgatcatgttttataaataaataagattatattattattttttcccagcgaggagagttgactttcttattcttgttcgttgactttcttcttataatttcttaattttagttataaacttctcatcaccattattacggaaaacaccatatgacagaccacactcacatatattatttctctcaatgaaagggaaaaagattaattattaacatatacaatctgttaatcatatatattatttgatagatacaaataattattcaagcaccaatcttcatagccaataaattcatcacccgtacgttgcagtaaagtttgattcattaattcatctactctgtacataactataatttcggttatatttatataatagaaacatgttcattttacttacagaagggttcaactaaaatggaagagatcagccttag

SEQ ID NO: 104999 - DNA, 630 bp, Cannabis sativa
ttagttaatattgtaaaagcgtgtatacaatttaaaacttttaaaattagtttatttctaaaaatatttattataaaaaaatttagttttagtcacaacaaaatttgtagttaaagataaaaaagttgtggctaattataaattattattattgagttgtgattaaaagattcgtggctaaatatattaatcacaaaaattacaatttgttgtgactaaatatgtttccagtcacaatacttgttgagttcagagttgtgactaaaattaaattagtgataacttgtatctaaatactatattttagtcacaaataaccttttattgtagctaaaaatcacaattaattacaaaaaatttatattgtgactaaaaaattatcactaacggtagctattttttgtattgtataattaattacctaaaatgaatataaaaaatgagctttttcatttttacactctaaaataattttttttttttttttgtatttatacaaaattctacatagaaacatttattgcaactagcggagaaacctaaaaatctcaacaaaaaatcgtatagcaatccacatagaaaccactggagagaccaccttagaaatccaaatcgtaaatttgaaaaaaa

SEQ ID NO: 105000 - DNA, 692 bp, Cannabis sativa
atttctatattatctaaattgtgatattaatatacacttctaataagagcaaatattaaattttaaatttggaattaatattttataaaacaaaaatttttatatgaataaaataatttttatatttaaaaaaatttaacacttaactagaggagatcataaatcctaacttctactttagtaatgaaagttatcaattagtgagtgattttgagccaaatgtgtaaaaattataatgagaataaatgtactaacttattggtaaaagaaaagaaagaaatagtagaaaaatagaaaaataagtaataagcaattgccttattttatttaccttctactggtataaatttaatttgaaaagtcaattcatttctaaaaaaaatcagtttctattttatttttattaaaatttaatatatattatttttaataaattaaacacttaattaatactatatatattaattagtaatagatattttaaatgtttacttattattatttttttatttatatctgtattttattttataaatatacagatatttatatatattattttaattaccaaaatatcacttatataatcaaacaatagttacagggtggttgctgcgtggttgcgcagtggttatattagatgaaggtttcaatcagacgatggttgcagggtggttggccgaaggttgcat

SEQ ID NO: 105001 - DNA, 527 bp, Cannabis sativa
  modified_base (389)..(398): a, c, t, g, unknown or other
aagaaactgtactttaaaatggtcgctcgacctgagtactttgtttcttttatcgaaacctttgagcagtccgcccagcaggccattcacttttaagtaaatgttcatttagtacttaaagtggtcatacgatctggtacattattggtagtattttcttaaatgttccccattccaataccgtggtactagaatgagttgcattttttcgtcatacttacctagtttgtacgctccggagtcgaaaacttcaaccacttgatatggtccttcccagttaggtcctagtactcctgccgtactatctttggtgtttaggaatacccttcataggaccatatcgcccacgaagaatttctgagccttcacttgtttgttgaaatatcgannnnnnnnnngttgatgggccatcaactttaagtttgcggtggctcatctttctttgattttcatctttcttcgatttcatcaagtgattctgctaggagtatgtgattggtaccttgattgtacgtcaatcttctgtg

SEQ ID NO: 105002 - DNA, 553 bp, Cannabis sativa
tcgtggttggattgcctaggactatgggatattacgactttgtgtgggccataggtgacaagtttacaaagtcagggcactttttacccgttcgggtgaatttcccattgatcaatatgcagaactgtgtgttagagaaatagttcatcttcatggtgtcccaaagtccattatttctgatagggatccaaagttcacatcaagattctgggagagtctacatcgagctatgggtactcaattgaagttcagcacagcgttccatcctcaaatatggacagtccgaaaggaccattcagattttagaggacatgctacaggcatgtgtactacactttcaaggatcgtgggtaaagtaccttcccttgatcgagttctcgtacaataatagatatcaggcaacaatcgggatggctccttatgaactattatatggtttgaaaatgcatatcacctattcactgggatgaagtaggtgagagaaagttcttgggtcccaaagctgttcagagaacaagtgaggcaattcataaaatcagagcgtgaatgctcg

SEQ ID NO: 105003 - DNA, 784 bp, Cannabis sativa
aagacaaagtctatgagtaggacgtgatctatgagtaaaacaagatctgccagaaattactcccaaccagatctacgagagtacttgaatcggaagaaacctgacctttgcaaacagcttggtccaaagcaagaggatccaatacaattgtggataaacgagctggaggacaagttcaagagatatcaagtgagggaattagggtagttatctagatacaactctgacaaggagcttgagccgtatcatccagacataatgaataccctttttccttcgggattcaagaacacgcatgtctcgtcatatgacggaaccactgagctggtctcacatttgaataactttaacacaataatgtgagtgagtaatgtgacgaacaatttacgttgtattttgttccccacctcgcttgttggagcggcgagtagctggtttaacaagtttactcatcattcaataacttcctcggagcagctgtccaggagtttcaagaaacaatttcaggctgctagagataggcgacctaaagcggcctcgctatccaatataaagcagcaacccagcaaaacacttaaggcgtacttaagtcattttagcacggctgcagctagggttaggaatttggatgacagcacgcaacttacagcccttcaggcagggatctctactaatctattaaccgcaaggggagagttatgggatgacgtacaaggatgcctagtgagaagcatcactgagttcaacgaaagggctcaggtgttagtttggaaggaagaagccc

SEQ ID NO: 105004 - DNA, 557 bp, Cannabis sativa
ttatttttatttatttatttattgtctagatattttttagtttatgtgcatttgttatggtatatatttttagtttattctagataattttttttatatatgtgtatttgtttaattatttttatgttgtgtattaattgtttttagtggttttcataataattttttgttccacaattattttttattttgttttgttatgcatgtacattttttatggtgtatatttttaatttatccctgacaatttttttttattgcatgtgtattgttttgtagatatagatacatatatttaatatattttttgatacatttttttaaaatgcaatgataagtttcttcattttttttttaatttaaacaatgtgcattagtagatattgacatattaatattatattgttatctatttaatttttttgttgttttaattatatattaccattatctccgaaaaaaaaattatattacccattatatcatataccccattttgaaatcataagatatattagttctattaataatgtaactatttatttaacttctaaaaa

SEQ ID NO: 105005 - DNA, 1099 bp, Cannabis sativa
cgttttagaagttcaatattaggttgttaaatcaacatacttgcaatagatctaagatcctggataaatataataccaacagttgagtcctcatatcacactctaattcccaagtggcttcttccactttactattcctccagagcactttaaccaactctatggttttgcttcgaaggaccttctcctttctatccagaatttgcactggccgttcatcataagacaagtccggttgtaattccaatgcctcaaaactcagaatatgcattggatcagacacgtacttcctcagcatcgaaacatgaaatacattatgtacaactgacaatgatggaggcaaggctaaccagtaagcaacctgtccaaccttctcaagtatttcaaaggaccctataaatctaggacttagtttgcctttctttccaaagcgcatgtttcctttcattggtgacacacgtaggaagacatgatctcccggctgaaacgtaatagcccgacgcttgggatcttcataactcttttgcctgctttgcgaagcaagcattcgcgctttaatcttatctattgcctcatttgtcttttggaccaattcagggcctagatatttccgttctcctgttttctcccaatggattggggatcgacactttctaccatagagtagctcataaggagccattcctatagtactttgatagctatcattgtaggagaactcaatcagaggcaaatacttgctccatgaccctcaaaaatctatgacacaagctcgtaacaggtcttcaagtatctgaatagttcgctcagattgcccatctgtttgaggatgaaaggtcgtgctgaatttcaaattagttcccatggccatctgcaaactcacctagaacttcgaggtaaatttaggatctctatctgaaataatagattttggtaccccatgaagacgaacaatctctttcacatacaagtcagcatactgatccattgtataggatatcttgacaggcaagaaatgtgctgactttgtaaagcgatccaccacgacccaaactgagtcgtacattcctgtggttctgggcaaaccaaccacaaaatc

SEQ ID NO: 105006 - DNA, 1048 bp, Cannabis sativa
  modified_base (49)..(50): a, c, t, g, unknown or other
  modified_base (350)..(354): a, c, t, g, unknown or other
  modified_base (608)..(610): a, c, t, g, unknown or other
  modified_base (857)..(858): a, c, t, g, unknown or other
aatgttgaaaaatattaaggtaagtggttaagatcttgcgaactgatannggtggagaaatatttggatatgcagttcaaagatcactaagttaattttttttaatcgtattcaaacttacctcccgagaaattcaattttcatattgatgatagtataaggttatgattagttactagtaactgcctaagtccttctagggaaataccctagtgataggaaaatttcagaatgatggaatggttatgtacttagtgtaaaccattactagattcatggatgagcttatcgtgaacttaacaaaagttagaacttttaatttaatctttgcatgtttgatagctattctnnnnnattaggggtggaccatcctatggttattcagtgagaaagtgtttatttcaataaatactaattttttttttaagaatatgactatgtctgaaaataaagaagcaaagtaaaggagatattttttcttgattccaaagtgttatatcatcttattcgatataagatggtctcactgctctcttgtcttgacacaaccgatgatgttaataccacttctgttgttagacagcaagtcacggtaccttgtcgtagtnnnagggttttaaggaactcaccctattatgacttggaagacacttgtgatgaaattcggatttgttagtttaaacaggtaatggattgttaaaataaggatctaagaagtaaagccaagagaactatggttaaaagcattcatatggaccaacaaaaagttttctattacaaggacaagaaaggaaatttttaaaataagtctattcaagggacttaacaaaacctcttgttcctagtattataggttnnagtttatctaaacctgtggcttatggtatacttggtaatttacttactctagtgcaagcaacttactttagtaggttgctatagcattcttctaatggcaatctatagaagcttctcgacttctagaaataaattttatttatctaaggaaaagtctcagctattccagaaaagataaaggccaatgaaa

SEQ ID NO: 105007 - DNA, 839 bp, Cannabis sativa
  modified_base (173)..(173): a, c, t, g, unknown or other
  modified_base (293)..(295): a, c, t, g, unknown or other
  modified_base (473)..(476): a, c, t, g, unknown or other
  modified_base (511)..(511): a, c, t, g, unknown or other
  modified_base (592)..(606): a, c, t, g, unknown or other
tatcccaataagtctaatggtaaacaattagagtttatatttatattatgtgttaatcaggtagtaagtgggataatgatcctactaatttgtttcagcataaaatgtaaattttactataagtgagtaaataagcgtaatttgtaatttacggagatttatatagcatgtgngaatgtaatatgagctatatgtagaataaaatattttcaggttcggcgaccctcaagactcgataagtggatatataagcgtaatttgttaattacggagatttatttgaaatacgtggnnntaatatgagttatttgtgaaatacaaatattttcaggttcggcgaccctggagacccgattggaggccaaaaatgtcacaacagttttagttagaaatattgatgggattattaagataaattgattttaaaaatattagggtattttagggtactcgaagttgaccaaataccctannnntaaagatttcttaatggctaagaaataataagatnactattaataataaagtttttatcaatattattattaatatattactattatattattattaatattatattatattattnnnnnnnnnnnnnnnattattattattatatataaatgaaacagaagtttcgttcgttttaaatatatatatatatttaagttttaaattataacagtagaaagaacgaagaacgaaatcctcgttctcatttttctgacaaaaccttctccttctatattcattttcttcgattttcaacccgaaacctagtgatctaagctccggtaacagcaggatagcacatctttgaaaagggaaagcttaag

SEQ ID NO: 105008 - DNA, 809 bp, Cannabis sativa
ttccgcatttaattaatcacttaattaaataattaaattgggaatattaaaatatggaattttagggaggagagtttcaagccttttcaaaatgtgttattgaaagtggcattgattttcaacattcatgtcctcacacctctgcccaaaatggtagagctgagagaaaacatcggcatattgttgagatgggcttgactcttcttgcccaagctcatatgcctcttaaatattggtgggactcctttcaaacggctgtctatttaattaatagacttccaacaccaaatttgagaaataaatccccatttcaggttgtgtacagcaagaaaccagattacaaattcattaaaacctttggagtagcttgctatccttgcattagaccctaccaaactcataagtttcaatttcattcagtaaagtgtgtcaatctaggttttagtgactctcacaaaggttacaaatgtctaagttcaatagggagaatctacatttctcgaaatgttattttcaatgaggataactttcctttccaatctggtttttctcaataattatcaacctgaacattctatttgtgtgagtgctccttcctggtctgccttgtttcagtccaccaaaaatcacctcaacagcaccacaccaatttctacatctcaggtccctgaagtagcaaccttagacaccaactcttctgattatagtgataaaaatcagcaacaggtatctgtctctcatgaatcttctgcatctcactctcatgaatataactattagggctgtacatcggtcggtttgggcggttt

SEQ ID NO: 105009 - DNA, 612 bp, Cannabis sativa
ccataacaaaaaaagaaaaaagaagcagatttttttcccacagaaaaaaaaaaataaaagacccggctaacttgcgccgcgtaaaccggcaagcaagcacagaaacccgaagtgagcagtagctaaggtccacccacccgagttagaacgaaatgaacaaaaaagaaaacaaattgaaagagagagagagagagagagagtaaatgggaaatgatgatagtttcgatcaaaattctcagtctttctatcaaacaaattcaagtttcaacagaaaactatgaagaaaaggaggcttatgaaatagagacaactggagaaatgggggaagagagaggggggagggagagagttcgattgcgccgttgtttcgtagagagagaggaagaggtaacataagagggaaatctagagagagaatgggtggtggtggtgcccacaatgtttacatgaagagaacttggacgctcttttgtagaagacgtcctcgtcatcccttctcaaatatttttgttttattctctcttttataccaaaattatttcatttctataaacaaataccccaataccgaaactggtttcaagtttttcccacttttttattttctttttt

SEQ ID NO: 105010 - DNA, 557 bp, Cannabis sativa
aagaggtttattatatattattttattaattgggctgattatacttagcttttttttttctttttttattaagtttttttaatgtttattgtattatatttattttatattctattatttaatattttatattagttggtaaatgttttaattgattgagaatttaaattgattaagaaagaaagagttgcatgaataattaagatttactattattaaatatattttttattttttttatttattaattacagttgtactttttttataaaaatattaggtaatgatatagtgacacgccagatgcgtggggatatatttatccattcgctcgcgcctggctggcgtgcgtgtcactatatgccaatattttttatattaataaaaataaaattgttttgggttttactctttagtgacactccatatttttagtgacccacattacaagagactaacactcaatttttagagtctaatattgcatgtcactaaaaatcactcccaactctttagtgacccgcacttttctgcgagtcactatatagtgtcactaa

SEQ ID NO: 105011 - DNA, 561 bp, Cannabis sativa
gttcatacattcataaacccaaaactattctctgtacaaataaaaaaaaagaaattaaataatatatatataaataataccagacttgaagagatcgactaagatgtggactgtggagtttcgaccgtccctgtggctggatgaaggttcgacgaagtggacgggcactgtggaccggcgttgtggcttcgtcgttcaggctggatgaaggtccggcgctctccacgaccgtctacgctggctggaagtggagaagggagtcgagtgggttgagtcgttgatggcttgaggctgggcggcgatcgtcgacgatgggagaagagaagaatggaacgagaagagaagaaggggggacgagcggctgtgcggtttaagagcttcagacaattagttttagggttttgttttgtgttttagttttaggtataaattaaaaaaaaaataataataaataaagggtacggcttggacctgcccctttttaggctaacctgtacctgcccgccaaatagcgggttaaaacttaacccaacccaatttttgcgggtttttaatgggcgg

SEQ ID NO: 105012 - DNA, 556 bp, Cannabis sativa
tttatatcatattttctgggttggatgtcgaacttctgggaatgagttcacctgagtttactgtatgatgcgttaaattcctcttttttgcgtcttgcttgctcctttttactatgtttctgttgaggaatcatctttatcttacgtgataacgcctttagggcttagagtagatcttgctttctcggctttgccctttttcccctcttttccttctttttttttcttttgcaatgtcactgcctttgggatttttgcaccagattcttgccaaggaaagcctcttgggattttcttatttggcaagtgtccggagggggcctccttccagcggttaggggacccccattcccttttttaaacattagggctgggctcggggcctaactgctcgattttctcaattttttcagaaccaaaatgtccgcttccgcgtccatttccaagtcttccaggaacggggcggttcaactagccaccctggaagaggtcatgcagggtcctgtggcccaggagaaatttaagtcccgtgctaatggttgggaggcggatgagc

SEQ ID NO: 105013 - DNA, 954 bp, Cannabis sativa
taaattttatataaaataaaaaaaatatcaaaatggggtgcctttaaaactttttggggtgtaaataaaatttcccataatataaatgataaaaaaaaaaataataccgaaagagtacttcacttttttagggtccattataaaaataccttatattatataataatagtttcaaaattgttcacgctcagaaccaaagactgccaaacatgtgtagccaataatgtatgaacaaatatactgaacaactctcatctcatctcatctttttgagtcttagcgccacataaaaaaagaaaaagaaaaaagccaaattcatgtgtatgaatgttcttttctcctgcaccataacttattcatgaaattaggaatttgaatcattagcaattattattgtgttatactgtatattaaatagtaataaatttaaattatatggggttttttatagaaagaatggaaaatggtggagatttatgagtttgtttatatatggaatgatatgtttgtgcttgcccacatgtacagttgtactctactaccatttgtctagctagttatggtcaaatgacattggaataagagcattttagaggcattttgggatgaaaactagaatgttaagagattttgccaaaatatgaggaagttgggaatgcatactttaatattaatttttattataaaagaataaaaataattggagtctaaaaaattaggaggtgtcgagcaatgggccaatggcgaggctaattttagtgggttataggggtgttcattaaaccgtcaatactatacaaattgtgacaataattattatataacacgtgtacccggagaaaactgtgacaataattattactgttagatttgatcttgtttgatgtttgatattttttttttcaactaatacatctatttaattataacatcttaataatgtaatttgttatc

SEQ ID NO: 105014 - DNA, 631 bp, Cannabis sativa
  modified_base (199)..(203): a, c, t, g, unknown or other
aataaaaaagtccctaaaaaaatattttttagtggtattattttagttacaacataaattttttgtaagtaaaagtttatttggtacgtcatacgtataagggttttattgtattaaataataaataataatatgtatggataaaataatgtattgtattaattattacgacagaattttttaatacaatgtaagttgnnnnntttaatacataataaatagtctgtattagcttatattataatatttacaaaagatctctgcgtcaacaccaatctccgccccgtcctcgaccggacagaagacctaaacttaggacgcaggacccaaacttgggcccggacccggacccgaacctagactcggggcccaaacccaaacctggacttgggacccaaacctacccgggacccgaaccctgacccggacccgaatcgatcgggacctagactcgggacccgggactcgaacccagacctggacccagacccagaccaggatcccagatccggatccgaactcgaacccgagactcgagacacgaaccaaggacctagacccgaacttgaacccaagatcggacccaggacccgagacccaagacctgtaacgtccccgcttcaagcctcca

SEQ ID NO: 105015 - DNA, 522 bp, Cannabis sativa
gccatgagtgttttcctcattcccactggcacttgtgatgagattgaaaagcttatggcccgattttggtggaagactagttcaagcaaaggaaatggaattatatggatgtcttgggagagaatggctacccataaaacctcgggggaatgggatttcgtcatttaagtgatttcaatcttgctatgctagccaaacaaggatggcgtctcttatgtaatcctaactctcttcttagtcgggtctataaagcaagatactttccccactcagatttcctcagtgctgaccttggctccaaccccagctttgtgtggcgaagcatttggagtgctcaaaacctccttaaacttggagtctgtcgtactatccgtaccggtatgcacacaagaattcttgatgctccgtgacttcctgataaggacaatccatttgttacaaccaacaatcctaggctcttgaatcagaatgtttcggcattgttcttgattgattcgttgtgttgggattatgatttaatca

SEQ ID NO: 105016 - DNA, 1236 bp, Cannabis sativa
  modified_base (461)..(461): a, c, t, g, unknown or other
atctattttagtaattttacacaaggttaaatatgtaatgatatttttggggtgtaattataattttatggggtgtaaatataacacccctattagtttattgtagaaaaaatccctacattttaatcactcttactatatttatttaattttgtggggatttttttactattttggtctataattatcaaattagaaaattaatataattttttgaaggaatatttttgttagtgggagctatagcccctacattgatactagtgggtctgtgtccctgtacattacacaccgccattaaatgttaattttttgagcatgactaagaaatttatatatataccattggagatacattgatcatagaaagaggagaaatgctaaaggacaccagtgatgtttagcatcctcttatatgtcaatatcattattggtccaattaagtatcgggtctcatatantttaatataatagcttttatgaagtatcgctaaccaatcacaatgcgacatgtcgaaaaagtgctagctagggactactgacgcctaatagcaatgctatagaaagagccacttgctaatattaattgactattcatttattcatatgggagacgggtgtgtgtctttctctcttatatcattaaatggtttggttaattgtaccaatcatgtaaatggaactatatgtaaataattttcgtatatgaaaacaaatcataaaggtgaatttgttttaacaaataataaagagtttcacatctttagggcactgctggtataatcttatttgagtttgtcttaatacatctaaataaacataattagacacagcaaagtaagccttgtaaacatcttaaagttgtgagaaaatgtagaataattgtactctttcactgattgagatctcgatcttcatatctttattattatctcattggagatatacaaaataataacataaaataatcccatattgtggagcactgtaaagatgcctgacacgtttggtagaagtaaccatccagccacgtgtataaaatagtatagtatatcgttgaagctcccataagaaaaggtatcaatgaaatataccaaaagccaagccaactaaagctttatagctccccaatatatagctctgctcaacttaaactcacttgctttcttcacataatatcttaaggcattgctttgcatagagactctgaatatggattcagtgattgagagtaca

SEQ ID NO: 105017 - DNA, 1164 bp, Cannabis sativa
  modified_base (182)..(202): a, c, t, g, unknown or other
gttttagatttttacttgtcattcctacttggtaagtgctgataaattctgaatatgattttgtgttaaaccttacttgatttctatttactattatttgtagtatccgacatgactatgaacaatctcatggtgtcacttttgactgataataagctcaatggagctaactttatcaaatnnnnnnnnnnnnnnnnnnnnnctctcattggtgaaaataccctgtttgtgttgactgaagaggctcctgagcagccaggtgagaatgcaaccaatgcaagcactctcacggctgcaaaaatcatgaaccagttaactaaacttttcgggatggcatcaattcaagctcgcttttaggtgactaagaatttcatcaatgcacggatgaaacctcatcggagcatgcatgatcaccttctccagatgaccagttacttccaggaagctgagaatcatggagctgttatagatcagaaaactcaagtgagtttgatcttaaatagtttgactccagcctttctgcccttcccttcaaattatgtcatgaacaagttggagcttgacttcgacgagttaatcaacaaccatcagacatttgaaaatttgattaaagaaccacagaaaggaggagctaaagctcctaattctgggacaactaatggtgcggctaaggctgaggcaaatattgcctctacttcaaaacccaacaacaagaagaagtggaagaataacaagaagcttgttcaagcagtgaaaacagttaaaaagaaaaaggttgttaatcccgatggaaaccaaataggaaaatgcatctatttcaatgaaaagggccattggaaaccccaatgccctaagtttctagcaaagaaacaaggtatttctttatcttgcgtatgccaatacaaattataattatatgtttataatttttgtatgtgtttgtgtcttattattgatacaaaatctatagtatattcttctctggaaagagataataccacataaacacttagaattttcaattcaaagtttatgaataattgttaattcataaaaaattattatgtaacaccctaactagcataggcctattacgtgatttttaaacatactgtgcagctcgctgctaatcaacgaggtttatgaaaaatcgtgattaattaa

SEQ ID NO: 105018 - DNA, 768 bp, Cannabis sativa
gtaacaattgcctaactgttagcatcgagattactgggatctgagatccctgaaccaaaccaacaaaaaaaaaatggttcttcaccttcaagttggaagataccatcttcctcttacaataaatactggctgagtactttgataagaaatccattcccggtataatatcaaaatccactaaattcatctctatgaaatcagcactcaactctctatcttctattctgattggcatagacctaatccatcttttggagataactaactctccgccatgcagtagggttccaaaccctgtttcataactatcatgcggtatgtccaattcactaaaaattctagcagccacaaaagaatgagtggccccaaagtctaacaacacagagaaataagagttgttgaccgagagctgacatgttaccacagaggggttggcttctgcatcagcccgagttatcgcgaacaccctggctggaatgggtttcgctgcagtctttggtgtttcggtcctaagctggggacaatccatcttgtaatgccctggcatgccacactgaaagcacccctgccctttacactcccgcagatggtgcttgtttacaactggggcactctgggtaagtgtatccggtttcagtgccactggggcgattaccttgaccttggttcccccggaacctcttattctgacccgagccactggttgcagtggatgcctttcttttctaatctagggctaaaccactacctcccctgctaaagcttgat

SEQ ID NO: 105019 - DNA, 3040 bp, Cannabis sativa
ataaccttattattaggggcggaccttccctgccggtaataggtccgcccctaataatcaaaaatgttgtagtgacaacaacggatgattattatcatataagtcataactattaactacttttgtaactaagacaataatcattgactatttgactcctaaacgaaattaattctctacaacaatagccaaaaacgagttgaagccacgatgacattgttttgttatttattttttttttttaacaatatattgttctgttttttgtttcaacaacatatatatgataatgtgtttggtctttcgaatcagaaaaataggaacagacgatttggttggtgaaatattaaggatatacatatatttgcatgagtaacaagaaataacaataatagcaaacatgttagaaaaatagtaacaatgaacgtgcgacgtggaaggaatgtagttatttattattattattattttttttttaacaatagatgcatgttattattgataactcttattttaatttattaaataaattataaataagtatattaatgaggtttgtgttcgtgcgaattttacgcaactcttatttggctcccttaatcttatttcctctcctttcttcttctcatataattttctctttcttctctctctccttaaagcttcattggatcattatttccaggttagattcttttattattatcaattccatacattttgttattattataaatttgtagttttttttaacagtgaaaattcattaataataatttatctgcatggtttttcattctaatctcattgtaataaaagggattttcagatcaaagtaatgacatataccaaaactctagtatgacattaatgtattctaaaagaagagaaaattcttgtacattgtagaggaattatcaaaatcatcgtgttggatcgatcggttgtagatatatggagcattgagatatagctggtactacaaataagagagattttttcttagaagtatgttctgttgtggaggtgcagaggaggaaaccagtggtcccccagcaaatcaatatgcccctcctagagggaacccttatggtggtggtaattcttcttcttcttcttgttattattattacaatatggggttttatatatgtagatgtttgttgtgtgaagcaggtgaaagaggagagcctaggggttccaatacgatcaaaagtggagcaccacagaaggtgttacctattgaaataccatccatgtcattggatgaattgaatagagcaaccagtaactttggttccaaagctttgattggagaaggttcttacggcagggttttctatgcaaagttgggtaatggtctggttgcagccattaaaaagttggatacaagtacatcccaagaaccagattctgagtttgtgtcacaggtgagtgggaatgagattaattctcaccacctttcttcttatatagctttaaatttttccaatttgggtttttaataaaggaacaaaaattggcccatgtagttatcacaagtgtcaagactaaagcatgagcattttgtggagttgcttgggtattgcttagatggaaacaacaggattttggtgtatcaatatgcaacattgggttctttacatgacatattacatggtatataatatgatttgttgcttattatgttctttttagataatgaaataactcttttggttctgttttcatggatgatatgaataaacaaacaggtagaaaaggagtacaaggggctgaacctggccctgctctaaattggaaccaaagagttaaaatagcctatggagcagccaaaggcctagaattcctgcatgaaaaggtgcaaccatcaattgttcatcgagatgtcagatccagcaatgtcctactatttgatgactattttgctaagattgcagatttcaatctcaccaatcagtcatctgataccgcagctagattacattcaactcgagtcttgggaacatttggctaccatgccccagagtaagtcataccaaaacaaaaaaacacataattatgagtaacttttccttgaatttggagtttgattagtaaaaatcattactcttttgtccaggtatgccatgacaggacagataactcaaaagagtgatgtttacagtttcggagttgttctattagaactactaacaggtcgaaagccggtagaccacaccatgcctaagggacaacagagtcttgttacttgggtaggtttgtgttgtgttgtgttgctagttttggtgtgagtgttttttgtgctcttctgctcccatatgctctactttttgtagctctaataataaaggacatgaaatactcaggcaactccaagactgagcgaagataaagtcaagcaatgtgttgatccaaagctaaataacgacttcccaccaaaggcaattgccaaggtcttcattttattgtctctttctcttttccttttacttctcaatatcattatttgattatttgacaagtattctttttgttattttgagccaaagtcatcatgttatttgacaagatgacttcgtaactaacataaatctaatgattttcttagcaacgtaagtatctaatgttaataaaattataattttcgtaaagttttgccagtatagactttagtagttttttaaataagacagatgcaagattaatattctaaattattgagtttgaaggaaaaatatatattatcatttacttccaaactttcttttaataatttcaaaacaagcttatattaagaaaaataaacgaaaattacatttttactaatattgaatgcttatgctttaagaaaaatttattagatttatgtcgattacaaaggtaaaactttagatacttataatgcaattatccctttcattaatacccaaaaatgacaatcattttatatttttacgacctacacttttattttacttttttacaatttttttttacaaaaatacaaactgttattttttggtggttctaaaaaaaa

SEQ ID NO: 105020 - DNA, 1105 bp, Cannabis sativa
ttatcttcttattatcaatttttatgcaatagcaagtttactaaagtaatttatagtcttctcagatatataaatctcaattacatgcaaattttctactctcgtgataaattaaacacgataaccctataatctatctaaaccatataggtactctcgtcctatatcaaaattcagttctatttcactatagcataatcgacactcccttctcagatcttgcatcgaaatcataaaacaattcattgatgaccaggcaattagaaataattaggtacaaatgaaatagaatacataaaaattgagggaaaatatatcatatataaactataaaacaatatcaaacaatatccatctaaccctaagcaactgtttagctactcatgttcatggaaacaaaattacacatattaacttaagaaaatagagaagaaaagaatgctgaaaaccctctgaaaaatgtctccagtattgacttcggtctctgaaattcgtactccttttttggctttttatctccttcccactttcttgaagaaatcaattgaaaatcactctttatatagccatcgagggattaaaaagatagaaaacacacatgctaaaaattctattcagcattgaattaggaaaccacactcgagcccatgtgagatgctgaagagggggcgggccgcggcacccacattgctgggtcgcgacccgtgtggctttgaaaggtggtatgttggttttttaataggcgggtcgcgatgcccacattactgggccgcggcccgtgtgctccagtgcccacgtgtgcaacgcgtaatatctttttcttctggttaggattccgatttttcacattgatatttttttgcaattttttttttatctttttctcttgatatttttcaattattcttctattttaaatttgtaaaaataaaagataacaagcgtaaaattactccaaacacgattaaaactaaattaaacatatactaaacttaatctaaaattagtactaaaaataacctaacaaattcctccaaaactaaatttttactcgtcctcgagtaaaacactaaataaacaataaacaagtcaatctccaaaacat

SEQ ID NO: 105021 - DNA, 549 bp, Cannabis sativa
gaaagcagcagctatagagagaagtattctgatggatttgagcatggcgactggactaaaagtatcttcatagtccacaccttctatttgggtataaccatttgcaatgagtctagctttaaaatttttcgacttttccaccagcacctcttttattcttgtagacccatttacatccaattagatgataatcattaggtgcatctacatattcccagactttgttctttttaatggaatccatttctgaatccatgccagctgaccattgtttccattccgaacttgccattgcctatttataggttaatggattgtcatcaatactatcaccaacaaccatattgatttcaccatccaggccataatgagctagttttctagaaaccatcccactaagatgaggagtcgtgatcttctgaacaagaacattagtggtagacttctcggacgtatcaattcttgcattggttcaactgagggagtgggattatcctcagtttgagtagaagaggatggaacattagttggagttatatctgaaagcat

SEQ ID NO: 105022 - DNA, 650 bp, Cannabis sativa
ctctcattgtaactccggtgacacgtaaaatattttgagattaagagctcttaaagcttgtaaatatggggtaccgtgagttcaaaggacttcctaaatttcgttgtctcattttttgtttggccccttctatgggaatcatctttcaaaataggagtacaatcttcatgttttgcagaaatccatggtgatcttggatgatatatagcttatccagccccaaaataggagtacaatcttcatgttctttgtcttctaaaagagaattaaaacaaatcctatgttctcaagtaaataaaactcaaagaaactgtcttatttgaaagttgcaaactcattatagtttagaattaaatgatccaatggagctcaaagaactcgaagtgtgatatatttgtttcatataatatagaaaatcttgaatcacattctacgagcaacagagatgaagttgaatcacaagtaagttatggtttgttttctttttggttgctcctatatttctccaaagagtgaaaattattttttttatgcttttcgtgtgctcttttttcaggtgataatgaagttggaacacacctgatcattttggagtgaatggagatggctttctttatggagattatagattatagattatttttttattg

SEQ ID NO: 105023 - DNA, 764 bp, Cannabis sativa
  modified_base (35)..(37): a, c, t, g, unknown or other
cacacacacacacagacacacacacacacacacannnacacacacacacacacactatataagtatagtgtatagtaacacgtacttaacatttccatattaaagattctcaatactttaatacactatcgacttattttattcatatcgtataatcttaattctcttgtgcatccttacaagattataccttctccatatgaataaggaattttttgatatttaataattatattcttataattaatatattatttatcttataactgtatttcaaatattcttctaatatattatccattaattacttacttttagggcataaattccaacaactcgaacttgactccactactacaaattatactatttacatcggtcaacgctactgttcattgcgttgaccgacgtgaatagtgcccaagtaattggacttttctgtttataaatgacgctaataatatataatttgcgtcgtttattaattgatggtaaaaacgaaaccgacgaaaaaaccaagaaaatttgaaaacctactttacattttgcgtctattgttaactgtcagctatgacgttttgcgaggttttaaaaaggatgcaaaataagcttgtgagagtgagaaccgacgcaacaccttcagtaaaatccctaaacccaatgtgctgttcatacttccctaatctctctctcttcgaaatttttcgggcaaaataagcgaccccaccccgacctcttctagcccctttcctcctcttcaaaat

SEQ ID NO: 105024 - DNA, 2907 bp, Cannabis sativa
  modified_base (2199)..(2206): a, c, t, g, unknown or other
ttagacttatcatggaataacttgttattaaagtagaccatttttatgagaaaattattaaaattaaaaaaaaaaaaaacaaaagtagtaataattgaattctagcaatgaatttaattataacaattaagtgaaggcatcacaataatgtaaaattaagatatatgataaaaaagaaaggacaaatcacatgactttcccaaaagtcttttgaatagaaacaataaatattaattacttagtagaaaaagagacaaactacagagtcaagatagtgatcctcaacttccacatttacaaggtatatgctacactacatttaaggtagacataataaattcttatatctaattctcaaattatttaatactaaggtaggtataagtttaagcgcatttagtactaaggtatatatatccaatctagttgtatatttataatttttttttgaaaaatttacagctaaattcctttaagttttaattaatatacacttaattttttatttttatttttggtgagaaaactcccttttcggtatacccgtaagcctattgtagtttcccttttcgggttagttcttgcataacaaaaaaaaatcacttttcttaataaaatcgaggtaaaagatgaaactactaaaagaaagatcaagtaatcatacatcttctctcttcttataataataataaattaaatattttatagttttttttttggtattgataaaaaaatattaattttagtattaataatgtaaatgttaatataaattgttaaaggcatatattttataaatattatttattaatttaaaacattgaatcatgatttgttatctttctattgttactattatatttataataataatagtatgtgtgatttttttttgataaactatgatattaatattaatatttttattttaattgataaatatttttatctcttctatgtcatattttttcttaaattcaattaagatgtttatatatgctaattaagatttttttgaaaaaaaaaatcttaattagtatatatatacatcttaattgaattataatgaaaataattataaaataaaaaaaaatcacaaaaaaaaagtaaagtgaaaaaataatcaaaaaacacaatctcattaaaactccaattatatagataagcagtacattaataattataggatgatacctcatttaatttgtatttttctttgtataaaatagatagatggatacttttatataaattttaggacaaataaaaataacaaaaaaaattatctatttataacgcatttttaaagacaaaaaaaattatgtaaaaatattataaaattctcacaaaatttttaaaaataaaaggataaatatatatatatttaacttttatataaacatataaataatgatatatattattatagattataagttatatgaatttatttttaaaaaaatattataactaattaattggataaaatgactaataaaataatttatttatattactctactttctaaaatgtgagaacttagtaaataatcatgtattttaggacctcaacatgatattcttacctatcaaagaaaggacaaaaacacatgactttgtcaaagtcttttgaatagaaacaatacatattaattagttagtagaaaaagagacatactacacaatcaagatagggattgtcaactttcacatttacaagtcatctcctacactaaactatatttaaaaagtagacatataaccaattcttatatttaattgtcaaattatttagtactaaggtaggtgtaagtttgccctaacgcatttagtactaaggtctatatatccaatctaattgtatatttatattttttttaaaaaaatttacggttaagctcttttaagttttaattagtatatacttagatgacgtttggttgtgaggaataaaaatataggaatgaaagtagaaataagaattagaataagaatatggaataaaatttaaaatgcataaaaaaattattaatttttttttcaaatcttatattagaatggtctttccttccattttaaaatagaatagtcattccaccgacaccattttattggaataatattccaatactttaaaatgcatgcaaccaaaggaatgaaataaaaattgttttctttccattccattccatttcattnnnnnnnnccaaacgccaccttaattttttattctttatttttgataggaaaaacccccttcacttagcttctatttttttgaaattttaccaacacacttttaaaagatttctctaattttgattaaaaaaacaaaaattcaattttaaaaatactaatataagttactaacattatatatatttgtatttatatttttataagtgaaagcaaaaaatgatactatcacctaaagagtttcctgttcatatatatataagacttcataaaacacacaccatgacttgaagtttgttttgatagtgacactaattttgtaattaattcatgccgtgtttgttttacattctccaagtcttcataacacactcacacatagttataagaccttgaagagattgtttatttatatcatctcattattacatatcttaattattattcttgccagaaatataatatggatagatcattttctcataaaatggttgtgtttttggtgattttgcttgttagcacagaatcatcatcatcatcaagtagcattaatatgatgatggtgtagtggtgctagaaacattaatgggtaagcatccgggagatcttttatccaaattaatgtcatcttcttcttcatcatctattcaacacaccttattgagtgaaataatagacaatcgcccctcaccaccaagaaatagacttatt

SEQ ID NO: 105025 - DNA, 647 bp, Cannabis sativa
  modified_base (251)..(252): a, c, t, g, unknown or other
agcgcaacacataggtctacgttatgtagacataaataggcatgtgagtgtaacatgcaggtctgtgtcatacaggcatatgagaatgtcattactatttatatagtgtgataatcatgttattgatattttatattatcttgctgggtttggctcacgggtgctctactgtgcaggaaagggtaaagctatttctgaccagccatgggtataggagctggacaaaaaatgtacatgttcgggccacactnnaccaagcgggttggggtctaccagagatgtattttgtgactctattttgccacttaggtcggccaatggaaaaggacttgtaatagtgttttgtaaatatttttgggatcccgacttttgtaacttttagtttataaagtttaaattattacaagtttattttcattttgtttattattaaagtttattttttgcgctaattgtactagtaatcccgtttaggggattagggtttcttaagtgtattgggtaacgtgcctaattatttagggcattataacttccctctgaccaagtagcaaaaatatgggacacgtgtaacgccctaaataattaggcacgctacccaaaatacttatgaaaccctaactcgtaaacgggattactaatcaaaa

SEQ ID NO: 105026 - DNA, 542 bp, Cannabis sativa
tgaggcttcgaccatacccgtagtcagtgtttgaatccaggacccgaacccagatccgtacccaaacaccgaccaaaactaggatccaaacctgattccggacatagaatctaaccagcactaggacaggaacgcagacctgggactgtaacaggacccaaactcaaaccaaaatccatactaggacttggacctagaccgggacctatgacctgggacataaaccaagactgcgacctagacctagaccaagaccgggactcggactcggacccaaacccagtcccaaaaattgagatcacaccaaggaccgaagaaccaaactcggacttgggacccaaaacccagactcagactagtactaggacccgaactcgaaattaaaccctaaccgagacctggactcgaatcgggacccgagacctgaacctgaactggaacataaacttagacctggatcaggacctaggacccaaacatagatggggacccaaacccaggaatttggcccccaaacagggaccaaaacttggatcgagatt

SEQ ID NO: 105027 - DNA, 601 bp, Cannabis sativa
accccaccatggtccctcactttacctgagacgttagcatacaacaacatacaacatatacaagtcatcacaaccataatccatttatcaatttacaaattaatattgtgtccataccacacattctcatttccatatacatatttcataaatcatattctaatacataaagaatctaaatttatacagataaacacatacaaaactatctaatttccttacctcaagtcccgctgcttaagacttgttatctcgccactactacctataataaaacatgagtcatggccctaatattaaaattcgtactcttatagtacagcagaaaacttactattttttatcaacaactacactaattcagtaaaagttgcattcataaaaaatatagccaattaaactatcttaccaatgatataaagatcactaaaaatggactaaaaatgagggagttatcattgttttactgaaactgtttctgagaaggaatatagagtaacgaattacatggctcagtgaaaatacaatcttttgatattgaaaagttcagaacaagaggataatatcttcatgaaagttttaggaactttaattctctttc

SEQ ID NO: 105028 - DNA, 1456 bp, Cannabis sativa
  modified_base (406)..(407): a, c, t, g, unknown or other
aagaggatctcaagaggagaacaaatgctaaagctgtagaacaatccatgatcctaggagaggtcaaagggtgagaaaacactactagaaaattgggttttagtgacacacattgagtaactctaaaactatatagtgacacttcagcgcgcgtcactaatgagggtgactggaaagacagtttttagtgacacttcacacgtgtcactgaacccttttgcattcattttctgcccgtcaccataggcggtaacaaccacacacatgaagtgtcactatatcttttttttattttattttttattaatatttttggagatatagtgacacactaaaagtgccactgtattaaatatttttctacaaaaagtaatatttaattattttaattcaaattttatatatnntaaataataatttatattaattttatacaaatataaatataacaataataattttaattaagtaaacaatattttgtattaatcattttgccaaaatcaccagagtttacaatgatacaaattcaaaatatgtacacaaataatctgtatactcaaatacaactaggccaccattgatcctgcaaataagaacaattttcatgaacagaaaaactaaaacttgagtatctccacaaataatttatgtttgtaacaagttttttggcatgtaaaaacctaaaagatatatataaaaaaaaaaaagaaaaaatagatctggttcttggtgtagctcggatctccatgaatggccactcatctagtgattcacggtagagcgagatggagattggaggaagaagagcacaacttgggtctcatttagtgatccacggaggcgagagaagctgaccagaacccatctcacacgattgagcaccattgatccttgcacgaacaacggtggggcttcatgcaaggaatcgagagggagagaacgggaaaagacaccgaggaacgagaaagaggtcgtctgctccgttcacctagccgagagagagagagggagttgtctgccacggttcatttgaacgagaaagagagaggcctccgcctggccgtccaccttcgtttacctggacgagagagatgtagagagaaaatggaaaatgggtgaggcggatgggagtcaagaggagctgctagggttcatttgagagtaaagtgtttttttttagaaaaaaatgttttgtgtatataataaataagcagctgccatatcagcttttctaaaagaaaattattttatattttattatttaatttcttaaattagattttaattggttaagaaagaggtagtgcgttgttcaaaaaaaaaggctagctggcgtggggatgtatttacaattattttttttttgttttttatttacttattaattagagttgtactttttattatatataaaaaaataaattatgatatagtgacacgctaaatgagtggg

SEQ ID NO: 105029 - DNA, 516 bp, Cannabis sativa
ttgttgaggtctgtgaaatcaatacacactagccatttcttgtttggcttgggtaccagtacgggatttgcaacccaagctgggtcaaaaaacttcaattatgaaattattgttgcgtagcttctctacctcttcctttagggctagcgctcgctctttgtccaacaaccttcgcttttgttgaactggtcagaagttgggatcaatatttaggacgtgcaaaattataaaaggatcaatttcgaccatatcctcatgtgaccaggcgaaaacgtccaggtttaatctcagaaattttattaatgccgattttacttcgagcaacaaaccttttccaatttttaactttctgggcagaatatcaggattgatcttgatctcttctagttcttccactggtccaatattactgcttgggtgcccaagtcgaggatccacatcttcatccccgccttgggaagttccctacttagaaatgtttttcccttgtccgtgttctggctggaggatacttcc

SEQ ID NO: 105030 - DNA, 542 bp, Cannabis sativa
  modified_base (509)..(509): a, c, t, g, unknown or other
taaaaaatcaaatttccctaaaaaaaattacaaagaaaaaaaagtaaattgaaaaaataataataaaacacaatttcatcaaaactctaattaaatagataaatagtgcaataatagttttaggatgatacgccatttgatttgtattttcatttgtatagatgtataaatatataaattttggataaataaaaataatgaagaaattatttatttatttatagtgcatttataaagataaataaaaaaaatcatgtgaataatataaaattttcacaaaatttaaaatataaaatgaaaaagtatatttaacttttatatagacatacataatataatatatattattagggaattttaattttctatacttacatatacttaatattttatttctaaactaatacatatcaccattgaaaatatatgactactttctctaaaacccaaaaaatatctctctcaaatttcccatactttttttttagtgcaaaaacataaaaaaaaanaaaaaattggtagtccgatggtggtctgatggt

SEQ ID NO: 105031 - DNA, 658 bp, Cannabis sativa
tgttaataacatacttgttagtaagtctagatcctggtaaaataattccaacatccaatatacttaaaaagaaaataaaaataaattaaagtgcaattttaacaatgattaaagcttagggtgattaatttcaattgaatctactttatatgatttataataatttaattcctaaatttcaattttcatgtgatagcagatttattaaagaaacttatattcaggctagaacatataaatctcaacctatatgtaaattttctactctcgtgataaatttaaacatagaggaggcattaagcataaaaatcctaaatgctacacaaatcatataagtactctttttcctatatcgaaatctatgtctattgaactatagcataatcaacactcacttcttagattttgcattgaaatcataaacaattaattggtgatcggacaattaaaaataataaagtacaaataaaatagatgcacatagaaaattagagaaaaattaaatcacatcaaaactaaaataaagtgtcaaacaatctctattaacaccctaatctagtaggttgttacaatacttgtatttcctgtttcttgtacacctggagttaacccaaccagagggaaagtccctccatggcctactgttggtggttgtgta

SEQ ID NO: 105032 - DNA, 1095 bp, Cannabis sativa
  modified_base (1029)..(1040): a, c, t, g, unknown or other
actttaatttttatatttatataaaaaatagtatttagagtcattttaattttattttatttagtcttttgtgatgtaatcctcattacataacttttctaatgtaatagagattctattgtataatgtaattatgattataatgttatcccgttacattatttttaaaagcaaaacaaatattgtaatggataattaaattttattacgattcccattacaacgaaacaaaacaaaattatatcacacaaataaaatttaaacactcataattatgtcacaaagacaagacatattgcagtagtaaataaatcgtagtagcaaaatataatctcgaccaagctgcagctatgcctgagaaaggcgagtgagcctaaccggagaaaaaatataactcatgcagctataaatttagcattgagaaactctaattttttaaattatttgataattctttaatattgatacttgtaaattaatttatcaatttgttttaaaatggtattttgtttgttttttctggtttactctttttgccttggaataagaatgaggtttatcattcctaggacagatgggctctaagtatgtgagattggtggaatgtaatggtaatggtaatggaataataatagtaataggaattgacatggctcaatcttttttacaaaaagatgtttctcattgggctttgggacatgtcatttttggagtttggacgagcttttagtactctctttttataatgggcttgtgaacttgactcactatatcaattgggccttgggacatgtcattttggagtttggacgagcttttagtactctttcttctataatgggcttgtgaacttgactcactatatcaattgggctttgggacatgtcattttggaatttggacgagcttttagtactctttcttctataatgggcttatgaacttgacccactatcaattgggctttcggttttaacttcattttggggcaatatattatgggagaagttgaaaaataccacttttatnnnnnnnnnnnncaaatttacctctaattttatattgaattgaaacatacctctttttatatgtatt

SEQ ID NO: 105033 - DNA, 869 bp, Cannabis sativa
gggtttcgggttgaacccgccaacccgcaatttaaatatattttaattttttttattatagtttatatatattaaattattaattaaaaaacaaacctgaaagatttttacatttcagcactcattgaacaccacaaaaacaaatagctattctctgttgaagtgggaaaattactggttattaaaatggggatggagcttcctcttcgttttgaatttcaaaagcttccacaggtgatattaataatttgagaagttgttagtaatcgaaggcttgaagagttgaaggagtctgatatgtttaatctttgttctaagttcttccactatgtggcagctggcactcatattgcccatcatatgcagtatctcaatttattgcatgccttaaacaattgacttattatgtgtgttctcgcttctgtaattattgatgcaaatttgtcgatccttgtatgatgatctttgcttcgttcaatgaagttctggacattacatttaccaataaaccaacgatgcctcttctaacacagtggaagaacctgccaacccggtcaacccgcccaatcgaaacccgctaacccataactcgccaatccgccaacccgccaactgtgccctattcgggtccgagttcggtttcatttttttgaacccgaaacccgtgaacccgaaacccgtgaacccgaaacctgcgaacccgaaacctgcgaacccgaaacctgataaacctacccgatgttcagccctaaatgtaggcatcatccacgtaggttataaatattattctttttatgccatattaattcatccaaaagtatttttatttatgggtggttgattagtttcttaccctataagtttttatt

SEQ ID NO: 105034 - DNA, 2682 bp, Cannabis sativa
ttaattaaaccgcatttaataatgaaatttagttgttgtattctttgagctgattcatattctttttgtaggacatgtgtcaacttctggtgaatagctaaattttaggtataataattgtctcctaaaaagtattttttaattaaaaagaactttttaaatatctctaggggtataaccgtatttctcctatttaaaaattacatgcttagaatttgggcaattcaaaacttcgagacacatcattgttcatttaatgttctgactgttccattcttgcaaagttcccacctgttagatcaaatttcctttgatcgaacggtgacaacctattaggtgtaaatttgaaactacacatcactttcgccatttttagctatcatacctcaagttttttgccaaaatctcaaccaccttctccccaaaacttgcatgccctcgttatctcttacattttttctgtgcatttcatctaagcatacttcgtgttctagaaattatcaagaccctgttttaaaaccttcagagtttcaatcgcgaagtttttctctgcccagaaatttttagtcaaaacagtaagtgatacaccctcttttcttattgatttttccttctgttctcataatttcttttccttagttagtgtctccttatctgcgttgctctgttatttgggtaattttgattttattagtctgaataactctagggctaggaaattttaggttatacacgattcgtagattttttgggttgtacttgtattctgtttttccaaaaattgggatattattagtcataattgtgtcccaatttatcctagaaatcacaatcctaaaatccttagaattagtttgtcctcaaatttccgccataaaaatttagacccaaaactcataaacctcaaacctttgttgaagtaaacgatgagaaaattagggatcatctcgttaaaaccagccaagatgaaacctctaaccgtcataggcgattcttacaagagataatttagggtaggcgccactttttgcaagaagcagcttggcttgaacccctaaatttaaatgatattcccttagcgaggccaatgtttttacctccagtcactgttgttttttcaccaagtgacttagattttgaaattatggcccaaaaagcacgcaaatcaaagacccctcaagactctatagtcaccttcgagactgaactgatcgagtcttaagtcagatccatacgatcttatgttggggaagtattaaggtcatgtggcatcgaaaatgagcaaggatgccagattatgtctcttgccgagggggagttcagctattatccccctgaacgtgtagctcaagaagagggttgtagcaccaacgagccatctaggataggcgcttggaggctagaacatataagagttggagcagtactccctcttagggactattttaaggaattttacaactatctcgacatttctccatttcaacaggcaccaaatttgtacaagatattagtcagtttgaagtctttgtatcatatcctgaagtgggagtgtccgaccccactcaagattctttatttttactctataaaggcctcccatgcaaggaagcgaggttcaggtggtttctactaccttggaatacacaccaacgatcacaggattgttgtgaggcttcccaacaaaaaagagttgaaggatgattcttttggacctcgggtcttttccccatcaacaccaccatatttcaaatcatacacaagtgtttcttttctcaaaaacttggttttgagttttaatccaatgctaattggccatactttactgattttttttatttgttgtgttaacagcaatcattatgagacttattccaactcctaaaattgagaaaaggcacaggattcttcttggccttcctttcagattgtgagcagcagacttcttgtcgcatgagaacaacttgaaggcttgcgctcttctcggcaagaatcaatctattggagacttcacggtcccaaaatttttagattggcaatgagttccagttcctgccgacgaggaggacagagactatgtggctcgcagccattatctgaataatacaacccctcgagaagctgaagatgaggcctcctgaattaataattttggtgtttgtggatggtctccaactgttcttaaagttgaatgaacaaccttagttaaatttagggatagtcagtacaacttttacatttagaactgtgtagatcgtattgcttataggtttaatagttggtaccccgagcatcatgtccaattaagttgtaatagttcctacttcagaatttccaagtaatatggcactaactttgatagggttggtcattcggattgggatatgtctggttttaacccctttgacctattcatgataaatggttctagggaatttagtaactattatagttcttcttcctcatcaaatgactatggtagttttcttaagtgggagactatctcaccacatttttcctgcttatattgcacaagtattgacatttacccctctgtctcgcagatatggactttgaaaatctcttgtccactttgggttccaaaaaaggcacgaagcgagctgttgtgtcagagacttcttctaggatgaaccctgaaccattgaagatattgaaaaaatt

SEQ ID NO: 105035 - DNA, 701 bp, Cannabis sativa
tttaacaaaattttaaaaaattcaaaaaaatttaacacgtcaaaaatagtgtttaaagagtttgttgcacacatgatttttttatattatacgcgtgttaaatagacggtttaaacatagatttctatattgtaaattattccaaatttctcaaaattttgtaggatgtcttaaataactataatgtatacgattataaaaaaatttagactaaaaattcttatagataccgaaacagttaggggttgaatcagtacacactacaagaaatgtcacttttgccagcatatttttgtgcgggcaaaagttggtattgcgctggtaaaatagaatttacttgtgatatgttggcaaaaaggggttggcaaatcaatgttggtattagaacttttgctagcataaaatgaaaagcgctggcaaaaatggcttttcccagcgcgtaaatgcgatggtaaaagttagattttagccactgcaaatgtacgctggtagagcagtttgcgaaatgcgctggtaaaagttacttttagcagcgcagtagccaactgtgttggtaaaagtgacatttcttgtagtgacatccattttaatggggtgtgttgtagaagcaccctataatatattgattaaaatatgataatatatattattattatgtgaataatgtatattaggtatttttttctttttgaaaagtaatt

SEQ ID NO: 105036 - DNA, 506 bp, Cannabis sativa
  modified_base (275)..(280): a, c, t, g, unknown or other
ttttttttttttttgttataactgaaaaaaaaaacccttattacatagaatatataaattgacattttatttacaaaaataccttcataaggtaaagtcaacatttaaaccttttatgtaattttaattaccaaaataccacttacaaaattagacgatggttgtagagtggttactgcatggttgcgcggtggttgcatcatacgaaggtttcaatcagacgatggttgcagagtggttactaggtggttggccgaaggttgcatcagacgaannnnnnaatcagacgaaagtttttggatggttgatgggtggttggccaaaggttgcatcagacgaaggtttcaatcaggcgaaataactattagcagaatttttatgcaactgttgtgaaacattataaattagaaaagtgtttccacgtaagtaactctatctacatgtctctttatgatttaatatgaacaaattcaccattagaaattcggaaaacaacaaaaatacac

SEQ ID NO: 105037 - DNA, 731 bp, Cannabis sativa
  modified_base (340)..(342): a, c, t, g, unknown or other
gaatcttaatgtaaactttggatctctatccgaaacaatggaccttgggacaccatgaagacgtacaatttctctgacatataactcagcatactcgttaatggagaaattcgtctgaacaggtagaaagtgtgctgactttataaacccgtccactatgacccacacagagtcaaattgtctcgtggttctaggcaaacctaccatgaagtccatagtaatatcttcccgtttccactctggtatgtttagtggctgcagtaactctgcaggcctctgatgttcatcctttacttgttgataggtaggacatttagcaacatactcagcaatgtcattnnncatgcctggccaccagaacatggcctttaggtcttgatacattttcgttgaccctcgatgaactgaataaggagtcgtatgagactcatcccttatctctcttttgataccatcatccataggcacacaaacacgatttccgaatcacaacattcccgtttcatccactaaaaatcactagtctttccagccgaaaccctatctcgggtttttaccaattatggatcttgcatttgcacttctttagttctctctaaaagagtagattgcagggtaacattagctaacttccctacaacaaactcaatcatagctcgggtcatctcatttgctagttaatgggagatttgtttcactgtatttatctctgtccctttctgctcaaggca

SEQ ID NO: 105038 - DNA, 670 bp, Cannabis sativa
gacggagcaagagggacaagatgtgatgggttatgtgaaatggcttgattcctatgggcccttgaacagaaggtattatgaggagctgggagtagttccaaaagacctcatgccatctactaaaaaacctccagaacttgaattgaaggtgcttcttagtcacttgaggtatgaatttttaggtgaagacaaaaagctgccagttattgtgtcagcctctcaatctgatgtggaaactgatagactgctgagggtactccgagctcacaacaaggccattgcttggacactgggtgatgtaaaaggaatcagtccttcaacggtgatgcaccgaatcctgatggaagataatgccaaaccaacaatcgacgcacaacgtagactcaatccacccatgaaggaagttgttagaaaagaagtagtcaagtgattggatgttggagtggcctatcccaactcagatagtaagtgggttagcccagtgcaagtggttctaaagaaaggtggaatgaccatgatcaagaatgaaaagaatgagttaattcccataagaacagacattggttggaggatttgtatcgattataggaaactcaacaaagcaacccgaaaagatcactttcccttgcccttcattgatcaaattctagacaggttggcggggcaagaa

SEQ ID NO: 105039 - DNA, 666 bp, Cannabis sativa
ctcatatattgaactatataataatataattcctcaattattcataattatctaattagggttttgctaatccatttcataactctaaggtattacaccttctgttcacttttgtttgttaaatgccaaaatgaactgccattctctgtacacaagtgtacacgcagcaaaattttattggtccacttaatattaataatttaaatattaaaaaaatatttaaaataaaaaataattaattttttttcttctttttttccgttttcgtttctcttctcctttttttttccttctttctttttctagaaatcctaactcctttctcccgctctatctctctcgattgagccacaactgaaatctatttgcaccattgatcccaaaccccaaccaccacctgcaaacccaaacttcacccactgctagtgaccccaacaacctatgataaccttgacgaaatgagtgacctgtaaagagagagagagaacaagttcgaatacagtcaaatcttaaaaaaatgatttaagaaaaaaaaaaaagaaacacaaccaaatagggtctcatcttcggctctggcaactatagagctgaggacggctttaacaaccacccacggcaaaattctcccacgaccgtcgacctacataggagagagagagagagaga

SEQ ID NO: 105040 - DNA, 815 bp, Cannabis sativa
  modified_base (216)..(223): a, c, t, g, unknown or other
agagtccacttccaacaactctagtgaccaaaagtccacttagagaagaaaggcagtgacaaatcgaagaaggccgaatagtttggaagagtacatggaagacgatataaagtcagaatagaattttttttgggactgtttgactacagttaaatacaggacattttttggaattgcaagatgttgcttacttgccctctattaggaggaacttgnnnnnnnntatctattttggatagactaggttatagtcgtattttggaactggaaatctgattttgtatcgtgactctatgttggttggtaatgaaaatttacataagcttgatttatataatgttgtttatgttacttcttcctcttgcccttcttcttcttcttctcttaatactgttgttggttccaaacgtgcaagattagatttgaaatcttccatgctttggcataaacgtttgggccatatttctagagatagaatggagagattggtgaaaggtgtacttcaagatctcgatttctctgaattcactgcatgtgttaattgtataaaagaaagttaactgctaaggttagaaagagtaagtcagataagtgcacagatgtattggagcatattcacactaatatttgtgggtcttttgttccacctactatgggcggctataaatacttcattaccttcattgatgatttttcccgatatggttgtattgagctcattagtgagaagtctgaatctttagatgcctttaagattttcaagacaaatgttgagctccaaaagggaaagaagattaaagctgtcaattctgata

SEQ ID NO: 105041 - DNA, 870 bp, Cannabis sativa
tagttttctctaattttcttagttttatatgtagttaatactacaattttctagataagaaaagtgtagaaatgtgtagcacttttcatcaaaagaaaatattaaggactctaatatttcataaaagaagagaaaagaaaagaaaaaaaaaagtttgaatattggcacttttgaaagagctttagtgccacaatcttattttaatctctctttttttttcaaatataaaatttttatttaagaatatatttgagtttaaataaattatattctaattgagagattataactaaataaaattaccttaaataaaaatcaaaatacaaaaaaatatcaatataacaacaataacaataaacaatcgttattactatataaaattactgtaaatataatatgggaaattttcatttatatggtttttaagatataagtttgtaaaaatatagttttttttcacaaaaaatttaattttatgaaaaaaatttagaaaaaataaaggtgcatttggtatacactttttcaattaattttttgattttttaattagaaaagtaaaaatattttccaaaaatatgttttataaaactgcttttattttttcaattttttttattgagaattaaaatttgaaaaacaaaataaaaatcactttcaaaaattttttaaatagtttttattttttaataaatattttggacttcgactccaacttggacttgggagccggacttcgatcccggccccagtcccaaactcggaccacagccccaaccccaaatttgaacgtggacccgacttaaataaaataaaaaataaaaataaaaataaaagttataaaacacacttgtttttaaaattaaaaaataa

SEQ ID NO: 105042 - DNA, 623 bp, Cannabis sativa
  modified_base (547)..(550): a, c, t, g, unknown or other
tatatttaattgaaacatacctctttttatatgtaatatacctaaaataccctgacataagagaatcatggagagtatcttgaactgacagaggcaaaattagtatgtttaagaaaataggtaaaaatgatagatattaaaaaagaaggtaaaaacaaaaaagaacagtataaaaacggtatagagtgtaattttctctatattaatttgagctgagatgcaaaatgcccataaatttgaaaactaagttagtttatgtctctttttaaaaaaaaaaattaagaaaattgtcaaatataataaattagctaataaaaattataaaaattcatttattatatattattatttttaaaaaatatataataattaaattaagttaaataattttttaatattgcatatgattatattgtaacaaaaatgaataaatatattagatcattaaatatatacagcagtatttgatatatcgtatcaaaaaaatactaaatgatatagtaaaatatatctattatatgaataaaattatatataccactattannnnatgtatacataccaaaaaatttatatataataaaataaaaaccaaatattataaatgatatactatagacaac

SEQ ID NO: 105043 - DNA, 980 bp, Cannabis sativa
gttcaacaaaagcgaaggctgttggacaaggagcgagctctagcccttaaggaagaggtagagaagttacgaaataacaatttcatgaagctttctacccgacttgagttgctaatcgcgtattggtacccaagccgaacaaaaaatggtgagtgtgtattgatttcacagacctcaacaaggcgttccctaaagactattttccacttccaagaatcgatcagcttgtggacgcaacagccaggcacggaatattgagcttcatggatgcctatttggggtaaaaccaaatcaaaatgcatccaccaaaccaagaacatacaagtttccgaacaaatatggctctatattgctataaaatcatgccatttggtctcaaaaacactggagcaacataccaaagattggtaaacaagatgttgaaagaccagatcggacgaaacatggaagtatatgtggatgacatgctcgtcaaatccaggaaggatgggggcacatagatgacctggacaaatgcttcaaagtcctcaggagatacaacatgaaactcagtcccttaaagtgctcctttggagtcatctcgggtaagtttcttggctttattgtcaatgcccgaggaattgaagccaatccagagaagattcaagctccttgatatgaaatcgccaacaagaaccaaggaagtgcaaagcttaactagtcggatcgccacactcaacaaattcgtttcaaaatcaacagacaagtgtgttccgttcttcaacatcatgcgaggaaacaagcaatttgagtgaatggaggaatgtgaaaaagcttttcaagagctaaaacccaactcgcaaaaactcctgtactatcgaagcctctggatggagaagaacttgtgatatacttggctgtcacgaagtatgttgtaagtgtcgtactgatcagagaggaaaacaacatacaacatctggtctattacattagtaaaagac

SEQ ID NO: 105044 - DNA, 505 bp, Cannabis sativa
aagtctcctactatgtagacttggtttttattaatttctattttatttaggcaaatggccttaaggccgagacaatggtatgccccttgtggaacttttataaaaacaactttgcaaggttggatggccaactttacttttattttatctttattgaacgcttcgtacttttatatttgaacttaatatatgtttgtttgcttgcatttttattcacaacttaaacaactatattttgattaaatgcaaaatactttaggaattcccattgctcatattttcctctgatatgcgcgagcatttattatctgttatgcttttgatttgcgagcaattatcaattctgcttcacatagacaattataatctgtttttaagcaaacttgaatatattgttaatgatttatcactttgtatatttttgattgccaatataaaaagttaggtcgtctatccatatattaggtttaagtatttttttcaaggcatcttggtgtcttgttta

SEQ ID NO: 105045 - DNA, 538 bp, Cannabis sativa
tgttatgcttaatgctatctttataattaaacttaccatagaaatacaggaagttttcatatagattgggttcataagtcttaaccagattataaatttcttaacccaactcatcaattgaatagaaagaagagaaatttggtaattacattatgaagtaaaataaaagatagttggagatcataataatcttttttctttattattgttatttttctaattttaattattggattattttatttacttttatcaaaaaattattattcatcaaatagaattaagaaattaattgaattgtaattgataatcaatcattgagggaacgatacttgatttatcattatattacttatttcgattgtgtatacttgcataacaaattttatcgaacaagtttttgctgtcgttaacggagattgaaatcaatattagtttaataaatatttcttctaatttagttatcttttattttgctaatatttttattgtatgagtttttcttgcagggtacataagaaaaaaatgctacatcaag

SEQ ID NO: 105046 - DNA, 636 bp, Cannabis sativa
aagcacagccttttccctgaccttaagcctgcattaatatcaatcaaacacaataattgtgttaaacattaacaacaaacagaaaaaacagttgatcccatttgatagcattcatcaaaatcaatgttatcaataatataatacctcttggcagatcctggaatggcttcttttgttttcacaacctgttttttcttagaagctttttctcctttagcttttgcagctagttttttcttaggaccagccttcccttctttccctagtttagcaagtagttttttctcaagtgctcgaattgtttccacttctgaagaaactgaattgtcatcagttcgggactcagattccgttccttcttcaaacttatcactagaattgttctctaaagcattaaccaagttcaaattctccataccatcttccaattctgacataagaagctcgtcgccaacatcttcggtttcaacataagaactcttctcccattcattcggggaagagtcatttgtatcggtatcagaatctgcaatttggacctctcccaaactttcagccttaactttaagtggaggaacaccataagtgttgctagaagattgtgtaagagaagactctgatgttttcgagtttatt

SEQ ID NO: 105047 - DNA, 531 bp, Cannabis sativa
cctgaagcaacaatggagtcttgctccttacaaagtgacaatcgagttactcactctcaaatactctctctgtctctctcaaccctctgattttctgtcttaaaactcatcatcgaacatagagaactttagagccttttatattgatgtcaactaactaacttaactgtcaagacagttaagttagttggacagttaccaactgtcaaaactgacagtaacaccaaatttaagtggtcaaacctcaacataaaccactagttaaaaatagtggtagagtggtggctcagttggagtacgcaagtgttatagggagctttatgtacgctgcccaatgtacaaggcccgatatatcatttgtggtgagtaaacttagtaggtttactagtaatccaagtgtggatcattggaaggcaatagggagagttttgggttatctaatgaaaactaaaaacctatgccttcactactccaaatttccttcaatttttggaaggatgtactgatgcaagtgttggatattattttacc

SEQ ID NO: 105048 - DNA, 931 bp, Cannabis sativa
aattatttatacattacaccgattgttcaataattaaaagaatagggttttacatgttaaaataaaaacttatcttattatctcttatatattgacatgaaaaatagtaagagaacacgtattatgttaactttgaatcaagtgggacaatgatagaaagagattgtaaatataaaaaaaattacttatatttagtaataacattgtttgttatttaatttatagttgttttaaagctgtaaacatgttgtttaactttattacttttaaacatgtttaattgttactttttaaacatgttattttcacgttgtttgtacgttgatcaatttcagtagttatttatagatttcttaaattatatatacaattatttttatgtttatattgttgttaaatagttgttaacagttaaaaaatctattaacaattattatcttttttctaaaaaaaatggaatataaatatactaatactccatgtagaaattaaaaatataataaaagttgtttcttcctatactaaaagatataaataaattcaaaaaaaattataatgttcaatatctcatgcaatatacattagaagttaactagaaaaaaatttacaaaaatataaaagcaacatttcttgaaaatatgttgctcttcagtgcatacaaccaaaaccaaacacatttctcaatcattaatccatgcatagtagcttcaacattgttagaagacttttgaacattttcttcgacactttcaatgtatgtaactcacttcattttaccaaagaaatagaaatgaacaacaagcttattctcatcaaatttgaagttcattatcacaagaaatcaagtcctgcagcagttaaaacaacatcaaaacaacattaaacaaactataaaataactttcttttatgattttttttcttcaaataaa

SEQ ID NO: 105049 - DNA, 846 bp, Cannabis sativa
tgtttgggctgaataatgctggggaaacaaatcaatgattggtgaatgagatgttcgcaaatcagattggatggaacatggaggtttacgtcgatgatatgttagtaatgttagtaaaaagagggaatcataccatagacctagcggaatgcttcaaaatattaaagaagtataatatgaagctaaacttgaaaaagtgttcctttggagtttcctcaagaaaatttttgggattcatagtcaacgcgaggggtatcaaagcaaacccagaaaaaatcaaggcattgatagacattccatcaccaacgaagcctaaggaagtacaagccttaacaggaatgatggctgcaccaaacagattcattttgaagtcaactgataagtctttaccattcttcaatgtcttacgaggcaacaagaaattcaaatggatagaagagtgagaataggcttttcagaacgttaaaagaaatctagaaatgcctccagttttgccaaaaccaataactggagaaatgttactcctctatctggctatctcggaagatgtgattactgcggctatagtgcgagaagagggtaagcaccaacaacccatttactatgtaagtgaaaggttattgagggcagagtctagatatccccctctcgagaaacttgctttctgcctaatccatgcatctcgcaagctgcagccgtaattccaggcacaccacataaaagtattaactgatcagcccttgagacacgttttatcaaaaccaatgcttcaggaagattgataaaatggtcaatcaaactggggcagttcgacataacataccaccctcgaacatccatcaaggg

SEQ ID NO: 105050 - DNA, 526 bp, Cannabis sativa
tcccatgggttcgacctcgttcttcacaatctccatactacaataaagattcgtgtgcttgcaagttgttaaatgtaaaacgtaccactttcggtacacaacaagtttttagcaccgttaccagaaaactgcaagaagagaaactactttaatctaggttgttataatttttctactagttattatattatacatattatattacgtttcttggtagtgaagtaaaacttatatatgtaaacttatatattattattattattattataataataaaaacgaaaaaatattatatatataagtaactaatgttatttttttttaaaaaaaaactcaaaaaaaatgtatatatataaaatattattatatattaatatattattattattttaataagtaacttactattgactaatatatatatattatatttattatatatataaatttatattatattatattattataattatatataataaattttataaattattaataataattaatattagtatttata

SEQ ID NO: 105051 - DNA, 750 bp, Cannabis sativa
  modified_base (555)..(572): a, c, t, g, unknown or other
  modified_base (722)..(725): a, c, t, g, unknown or other
agttatttggttttaattaatcaattataattctataataagaccatatcttatttatgaattttcactaagtaagggcttaattgtaagaaaagaggtttgggattaatttattaattaggagacgttgtatggtctaattaataataatatgaatggaaattttatttgataattaattataattattaaataaatagtttttatatttataggattaaaattggaaatatggtcttattaaaagaagaataactagttgaaataaagtggcaaaactgtaactagagaatggtccttaagttgccggccttagcgtgttattttttgcccaatattttatttcttttcaatccatataattcaaacctaagccctagttgaaagactataaaaggaacatgatgctctcatctcatccaacacttctaacctgccaaaatctagtttttaactctatcagacaaagtagatgagagacacttctatacaggttttgaaacttccttcattgttcttcaaccaattcccccatagtgatagagtgtcatgccnnnnnnnnnnnnnnnnnntactcaatcatagtgcggaagatgatggtaaccagacaagctcagatcttgatattaatttgcgatagaaaggaacaagggttagagatttgagcgaaagaactcataatattctgctgcaatcaatgtaagattttctaaactcttatnnnnttaatttcattattttagagatatt

SEQ ID NO: 105052 - DNA, 2520 bp, Cannabis sativa
ctctctcacacacacacacacaccaaactaacccattgaatacatcgaacacctcatgatgaactgatcattaaagaaaattaagaatgatcaaatgtcggtatacagagaacaatgggtgtggacctattttattagaacctcacttggtgatcatagtataaaagtagggtttatcatttggtttttccttttgtaatttgtatttttgtaattaatagacatatggccaaaacatcaacaactgtgtcgctaattatcatcatacatttttagattaaaaatccaaattttgctaatatatcgatacacgtcgatatctaaatcgtgttatgttgctatatattcatttgttgctaaatatgcatttaatacttattttatgtgatttatcaataacatagtcattaaatgtcgccaaatattgtgaaaacatatctgagcaataaaacaaccaaatgtcaacaacgtagacatcaagatgttgatagatgtcgttaaacaaggccaactagtagcaaatatataaaaaattggcattctaacttaatcatatcaataacgttgtcgacacacatcgctaaatgttgttacagcaggtccaaatagttaataactaatacaagcaacttaaaaattagttcataagactataatactaacaaaaataatgaaaatactaaaataatgctcaaactcaggccttcatgaagctctgttgtggccttcaccgccacaatttgaacaatggcaatattccacaactttatcactattagatggatatcggtactccgtcttcttcctgcattgctcttcctgggatgacctatgagtttcttctccactagtaccccgactctcatgttttacatgtgttttggaagcacctaattgttctcctcaccgacaacattaatttttgcaccgtacgtattctttcacgtctcttttgtgtaatagggggagctaagagcatacatgctcacattctaagtaattgctgcatcacatgcatgggcataaggaattttcaataattggaacatgccgcatgtgcatattttctcaactaagttcacatcaccacctctctgaccctcagaacctctacaaatgttaaacaaatgtgcaccattacgttggacacttttgaacctaccatccttgtgctgcgctaccaaattttcctcaaaagttattgccaaaagggtagcgcacttacttgcattttcaagacgatcagcgaaccaattttgtagtgtgaaccttatgaactcaactggagtacttattggataattctagaattcttttgtcacgttgttgaggcttttagtagcgttgcttgtcattatgttgtacctatcgtctggacaataaggacgagcctacttttccaatcctatactctcaacataagcagtaatggcagggtccattcgttgaagcacttgaaaatgtctgtcacattccctctttgaccatatgtaagcaaccaaccatatttgcatgtgacatacatcagtcttgaacttgtgggcaacattcatagtaatatgtttatatcatgcacattggcatgctttgaggaaaatgaccttgattgtatgttcaatgctttgatgcctatccgatacaaatactaagtttttgacctcccaaatcgcttcccttaaattctgcaagaaatacttccaagagtcgtgattctcactgtcaataattgcatagacaatctgaaataattgattgtttgcatcttatgctacaacaactaacattgtgttcccatactttgtcttcaagaatgttctgtcgatactcacaggaagacaaagcttaaatcccatcccacaagcatccagtgaccataaacaatacttgaacctatcatcctcaatgtctataataataccttaattcttttgttgcagcatgtataggtaaccaggtaacttcgtataagattgtgcaatttgtgctggcgtgtccctaacatatgtaagtgcattttccttacaccttcatcccttctcataattaattttgattctatattcatcaagcatatcgctctgtatgtattttaccttgtacttagttccatcttatgtgtactttcccttaataaggtgtccaataatccattatgctgcttaacggttatcagcatgtctagaatctaggttatatgtgtgtttgttgtggaacacagtaacctcaaatatgtcacaacatgccttcttcctctttctgtcaatctctatttgtaatttgaattcttccaagttaagtaaaatatattggtgctagacttcctcaccatgaactcaaaattcatttccgatgcaaatcttccaactgcatttttcaattcagtcttgtttgtgtacaacttttcaacgtgtattttccctgaaggtgtactactaagagaagttgtataaatattatttttctctatgtcttcccttgtccacacaagaggggtttaaattttgtacaaactttaaaatc

SEQ ID NO: 105053 - DNA, 774 bp, Cannabis sativa
  modified_base (238)..(247): a, c, t, g, unknown or other
aaactgtatagaactttccaaaagctgaataagtatctttcctgcaactttagcattcagtctcacaggtagagttagagacttcagataggtttttacacttctctaaaataactgcttcaaccctagagtaatgaccatctcattagtagactttctagcactaatgcaagtctagaaacctaatttggtgtagtctaagaatattaaaaaaccacccttatcaactaacatatannnnnnnnnnttgatcttaagattcacttgattattttccaatgttcctttcctggattaatctaataccaactcattactcccactcaacagtaggtatctggtctaatgcataactaagaccttttactgttgatcctaaggaattctttcattggcatttatcttttctggaatagttgaaacttttccttagatacataaaatctatatttagaattcgacaagcttctatagattgccattagaaaaagaaatgctccagcatcttacagaagtaagttgcttgcactagagtaagtaaattaccaggcataccataagccataggtttagataaactcagaacttttctaatactaggaaaaaagaagttttgttaaatccattgaatagacttactaacgaaatacttatagcagtcaagctcgaaggagatcatcgtttcacttctaaataattatagaagctatagattccatatctatgtttagctctcccactcaattgaactaccatgtccttaatctgtatgtc

SEQ ID NO: 105054 - DNA, 832 bp, Cannabis sativa
taattgtagaacaaaaaatctaagctcaaggaatcatcaacaattgacgatgagattattgagtgaggccgatatcgaaactgattttattttgtttgagtttgttttggacaatattcttaatagttttcagactttagatgatagatgactgtaatatttgatcttgaatgatttgtaatttttgatggatatgtttatgttagaacttttaatttatatatgattttgataaaattggaatcatattttttttaaaataatgggataagggttataacccaacccaacccaacccgcaaaagaaaaaatgggttgggttataaaaaatttaggatgtgaatgggttaaaaatttctaggccgatgtcattgggttaggtcattaaaatactctcaacccggccaacccaacctatgctcaaccctaattggtgcacattacaacaagtgttattttatgagttatttttaaattttgtttatcttaaatttcatgttagattaattataattttgttatttttaaatttagtgttaaatttttattttgtcaagaaatttaaattttatgttatgcttatttatatttatatatgatttttctttttaaaaaaagttagtgtaataatatttataattaaaacaaataatatataaaataataatgtgtgagatcataattatagtatttttaaaatgtgttataccattggagtgttttaaaaagtaagagtaccaaaaataatgtgaaagagaaatgtaataaaatattatatttttagataatgtggagatatttaacatatttaaggaatgctacctttggagat

SEQ ID NO: 105055 - DNA, 562 bp, Cannabis sativa
aaccacggtgggtgactctattttgacaggtgttttaattttttgtaatattttaataaaagtaatccattcaaatttttaatactctaaattatttataaattttcaaaaattcatataatattccaataataataatatacactatcatataacaaaagagaaattgatattcagaattttaaaagttatttacttaaatatggtacttttaagtttgactaatttatatggtatttttttttttatttttagatattttataatatttgatatgccatatatatataaattaaattttcaaagcccatatttaatatttttatttatttaggcaattttatttgttattggtaccgaaaaaattaccgaagtttgttaccggcgctggaaaaattgtcagagtagctgcaggtgtcagaaaagtcaccggagtggttgctggccctagaatagtcatcggaattggcacaccgaaaaaattactaagaaactggtttcttagaaaaattacgaatccagatgccaattcagtttcttgatgattttttcggtaattttt

SEQ ID NO: 105056 - DNA, 994 bp, Cannabis sativa
tgttgtatgcatcactttttcatttagagggatacattgttgtgattttagttaattaatatgatattaattttattaattttattaaaagaataatataataataagtaatatgtttttagtgtaatttttggtgttgtggttggagtggtaatactttttgacactaaatttggtgatggtgtaacaccaaatttagtgtgctccttggagatgctcttaccctttaaattttaacatgtaccaaattatgattcttgaattttttttttagccgttaaaaatttcctctaaactattgagattgttagatttaaggacttttgtttgatttcattcaattttactgtttcagtgattgtttatatattaaatcatgcttcccagactttaatatctaccaaatcatgtcccttgaactttgatatatataagtcatgccctctgaactttcatccatgttagattttttttttagggaaatttttaacgaccttaaaaattcgggggacataatttgatacatgtcaaaatttaagagataaaaatcttaattaactttttttattatttgctgaagagcaagtacttttggtgatgcctaataattttatgaagtgtaatattattatgagagtcttacttattttattttattaaaagttaaagaaaatagctaaaaggtgtcaccttgtaacaatctttaattatttttatttcaatgctcttaaaaaaaaaaaaaaagaatttttttttcaaggaatcacttaacttgaataaataattaaagattgttacaaggctgcgatcacaactatgatatatcttggttttttataattttttgttaaaacacttataaaaaaattttaactttttaaaaatataaaataggataatttaaatattcaccacaaaaaattttatttttagtcctaataaaatttatgattatataaaaataattataaattattaattattaatttttatt

SEQ ID NO: 105057 - DNA, 1217 bp, Cannabis sativa
tcctgcagctcctgcgatgccagctgagcagcacgttgctggtaaccgtatgaagcctttatatgagaggttcaagaagcaagcacctccagtgtttctgggaggtccttatgtactaaaggctgaacagtggctgactgttatcgaaagaatattgaatttcatgggagtggtcagaaatgatagagtggaatgtgccacatttcaattccaggaggatgccttggtgtgttgggagatggtatcccttaccaaggatgttgctagaatgacctgggaggaattccaggatttgtttaatgcaaaatactacaatgaggcggtccgtagtgcaaagcggaaggaatttgtggaattggtacaaggttagaatatgtcagtgactgaatatacaaccaagtttgatcgtttggctaaatttgcctatgggattgtaccaacggatttcagtaaaaaggagaattacttggcagggttgaatgccaagattaagcacgatttggttatcactacaaatgacactacaacctatgctgaaatggttgacaaggctcattgaggggaaggggcagtcaagttcttacaagaaactcgagagattataggtgctagtgggaccactactctccctatttttgtccctggaaaagagagtggagattccagttttgagcaaaagaagagaactttcccatcttcgggacttcagggcaaggtaaaaggtttcgaggaaaccagaataaagggggacgccagacttactcctatcattagtgcccgcgctgtaagaaacatcatcccgggacttgcaaccggagagcttgctttcagtgtggatcagtggggcacctcaagaaagactgtccccaattgaagaaagaggaaccaaagcttgaagcaaaacctgcacctacacgtgtattagctattactcaggctgatgctgctgccaacccttcagtggtcacaggtcagctacttattaatggttttgtctttactattttatttgattcgggtgctacacgatcttatgtatcatctagagttcttaatcaacttggtaggcctagtgatgtttttgagatgggatttggaaccctattgcctaatggggaattgattatctcaagaaaataggttagatcagtgttaattagaattgaagatagagaattgagcgctgatcttgtggagttaccattggctgagtttga

SEQ ID NO: 105058 - DNA, 561 bp, Cannabis sativa
tcctggaagtgatgggatgcctggacttttctaccgtctttattggccaaaaattggtgaggaagtcaccaaagtgtgtttgggaattcttaatgaaggtagaccacttaatgaaattaatgataccttgatctgccttattccaaagattgaaaagcctacccgaatggctaactttcgccccatcagtctatgcaacgtgatttacaaaattgtggccaaatgtcttgcggggaggatgaaacatagcctagctcaagctatttcggaagagcaaagtgcttttgtggggggaagattgattcaagacaatgccatcataggatttgaaagcctccattgcatgaagaaaaggagattcgggaatgggcagaaaatggctctaaaattggacatgtcaaaggcgtatgatcgggttgagtggggtttccttgtcacaatgatgagaggtatcggttatgaggaagattggatagagaagatcatgaggtgtgtgactagtgtgtccttctcggtactaattaatggtgaaaggatagggaaatttactcctacccgtgg

SEQ ID NO: 105059 - DNA, 1940 bp, Cannabis sativa
gatgaacagagtattaaaatcagaaacaattatagcggtaaacaataaaaataatatcaagatatataatagttcaagtcctatagatcgatatgatatatgactctactccagttctgaaaccccaccaaatcatttttattgattgagcaagaacatgacacaatactatcgagatcgattctctgttgaattctctcatagtgtttatctctcacactcttacccaagaatcttcttcacttatagaagattcttcatacaaaacccaaacataatctctctctcttttctctgtacttctttctgtctacctcttaatttttctctctcaagatcacctctctgtcgaatctccacgtcagcagcaaagtgcttatggacgagacatacgcttctggaacaaaaaatcgaagtgtatcctgaaagggcttcccggatagggataatcaatagctggagttgattcctttctcgaagaggactagctttcctaaaaacttcttctgagtggttaagatagacattcgggaacatccttccgaatgatatgtatcatttcacgagattttttcttctggatggataagttaattatctgagaatacttcagaaaagataaataattttttattactacaacaatcttataaagatcttttcaattagaaaaattataccacatttaatattgataaacttcatcaaaaataaaaaacttaattaggtttttctttatatataaatatatataattcttgagtagtagtagtagttataagtgagtggtcctcaacctattatagtagctagaataaattgtggggaaagaaagccaagtcaaactaaaatagctcactcactcactctctctctatatatatatgataaagtagagagaattaataatcaaacactaaatatgaagaaaaaattgtatacacatgccgttttttgtagaagggatgggttgataatatccatacattttgtattcctattgtttaggataaatattaaatagtgattatggtgtgatgataataatgaaggtgagtagtgtttcaaaacgtcagaatcacagacattattcacaaacactcgtgagtttaagaagcctttactttttaccaattgtcggggacctgaatatatcacacacacatacacatatatacatatttatatatatacaatatatatatatatataaaataaactgtctttttcacttgaactcaagtttttactttattatggggtgtttagaatggattaatgctaacaagagaatggtaatgtgaaacattactttgtttgttttgagtctttagccttggaatgttattcctttagtattataactatcattgaaaagggtaatgttgatactttaaaaaatggtaggattgaatcattatcttctattatttgttataacttatgaaaaaaaatatgatgcctacactatattcactttctactaaattttttattatttttatttagaattatcaaattaaattttatatatttaagtttatttgagtgtaattatattttgtttagtgggggttatagcccccataaaacaatattatattacctcaccttcacatttcaccatttttattaatatctttcaacattttattacctaattgcatttgcgtgtacctaccttttgtttattagcatgtattgaataaaattgtaggaaggatggtaaaaattgcattaatttataataaagtattgttgggccctattttcctaattaatttgtcggaccgttaattttgggacactactataaaaatagtgtttcttgatgtttttaaaccgtcgtttaaagtatttctattagtttctataaccgtcgcctatacgaccctcacaaaacgagcaaaatagatgacgcttaaaaaccatcgctaatg

SEQ ID NO: 105060 - DNA, 789 bp, Cannabis sativa
aagtggtattaaagccaaggttcagatcaacacataaaatttcaaagatggtgtcttccacaaagtttaaaatcgagctttttgatgggaagaataatttcagttcatggcagagcacggtgattaaggctcaaagttgtatatcttaagcctttaattgtggatataaaattaattaaattaattattttcatagttttcattgtaaaattattttaattggaaatatctcatttaatttaattatttgtgttatttttcagatttaaatggagtctcaagcccaatttaaaagtttaggaagcccaacaaaactattttacacgagtgttgtccatctcatcaaaagagtccaaaccatccatatattttgtcatggcctattactacacaatatgaaaccatctgtattgggccatgtcaataactgaagctaaagtaaattgggcaaatttaaatgtcaagagcaagagataaatgaaatgatagtcaacaaatcaaacatccactccgcaagtaatctttagctgccacgtagcctcctatttctctcctctcttcaacagttgatgaccgcatgtctcccacttctccactccgttttacacaaacagtcccctccatttgacgtgagtatctctccagctgccatgtgtctcagctgatgctttctctccaaccaaactggcgtaaatatacaagaagtggttcacttttctcagctttttgagccacttcccccactgaatagtacacgaattttaccagtttggagagcaagtgtgcact

SEQ ID NO: 105061 - DNA, 568 bp, Cannabis sativa
gccggagtcataccgtcaggccccagagatttatccggatgcatttggaaaagtgcatttcggacttcatcctccgtaataggcagcaagagttgggcattttgttcacttgaaacagtcggccgaacaccaattaagatatttcccaagtcaatgtttgatgaacgaaagagatcactaaagtaacgtgtgataactgcctctaaccccgatccccaagtcacccaagtgccactttcatctttaagttgcccaattccactattcctcttcctagcacttgcaacagagtggaaatattttgtatttctgtcgccagaatttagccaaaattgcttcgatctttgtttccaaaagacttcttgctgagccaacacctcagaaaaattgactttcgcttcattgtgttgatgaattgaactctgatctcttcccccatttggtgtttctaatctgtttcttgcatttgtcgatacgttttgtgaagtccccagtgatatcccttccccatcttcccaacacctccccacaacgatgtaatttctcttgaatgttactagaacccgaa

SEQ ID NO: 105062 - DNA, 577 bp, Cannabis sativa
  modified_base (535)..(536): a, c, t, g, unknown or other
aactagaagaacaagaaaataaaaggggccaaacaactataatttacaaagaaatatacttattttttttttacatatatacacacattttatgaaaacttgttttttggggccacggccacctcttagcagggggccggctataagcctgtgcatcctggtctattgcacagggccctatttacctaatttcttgcattctttttaggttggtttttttgttttttttttatgaaatgaaacattaaataaaataaaacagtatgaaaaaaaaataaaaaataattattacttttcacttttcaggtaaaaaagttgttctcaatcccacatttaatggtaatttataactattttatcaaattttttttattctattcatttattttttaaaaatacatattttattcattccaaagatattatttttttatcttatatataattctttgcaattagctaacaaaagttaaaaattaatagaaaaaaattatgaattttaagtagaaggttaatgttagcttaaagttgtaannggataaataataattttaataaaatagtttaaattttttgg

SEQ ID NO: 105063 - DNA, 3122 bp, Cannabis sativa
atcaaacacaaaaaggaagaagagggattacttgttgatgataatctcaagaacctggctcaatcttctctgtagcagtcgaaaccctagccgcccaacaggtacttgaaagccaaatgaagagttggatggtgcatcttcctttgaaagagaaaaatagaaaataaaaacaaaaaacaaaatattgttttctaaaaacaagttaggggtatttttataattttcgtttttattttttaactcagtttttaaaaatttgattttaaaatatttggccaaacatgtaccttgttttttaaaatagctttttgttttaaaacacaaaaaactgttttttagtatgcatgccaaacatgctcttagcctctttactgtcagttagttatttattttctttgtttaagttagttgttagtttacatatatagtgtaatatctattgcattaaattctacactcaatgaaatttatttcactttgctctgttttttcgcaatatggtattagagcaagaaatataagcttttttgtccgattcttctctctctgaccattgcacgtcttctccgacaaggttgtgtggatctcgatccctcatcctgatcctctgcttccactccattcttcttctcttaccctgttgttcatgtcctttcttgattcttgattctttcttgagattcaataatgtccacaaattatcaagctacacaacccgcgactcaaacagggaaacaaacgactacacaagccatcatcaatgatcctcaaattccaaatagtaatcggagcctccaggttgctcaatcaaagaatccacttgaagatctagcaaacccttattgcctccatcatggtgacaacccaagaaacactctactttcccaacagctcattaggcaagataattatgtgtcccggtgtagagcaatgtagcttgccatctcaatcaaaaacaagttgggattcctcgattgttctatttttaaaccctcttcttctgatttcatacattacaattcttggtgttaactcagaaactttttatggtgacgtgggcatcaatgtttgacacgtggcatgaaggatgatgtcatggagttaagtagacttgagtcatagcactcaacttgggaggggacccaagttgacttcaggatcttcgggatggaagttcgatcttcaataacttgaatccaactcactttctttcagtattctataccatgaagacatggagcaaattattccaagcctcgagagatgaaattatacaaacctgcgactcgaaaaacaacttgggcacctaggttttcacttggcccttaggttgacatcctcaatagggttttggtttttgggactgccttagtgcaaaatgttcaaaacttgcattgttacatcaactacacataccactaacatatttgaggcatcagaatcataatcagagtaagttcatttttgagcacctggggccccgagcacccaacacccaggttgataatctgacaattagaacaccttccaaggatctgattggagatttgatttttcatcttcatcaaaaattgggaaataggtcctttcgaagaaaaaacaacaatttctagatgagaaaaatagtgctgacgttgacattttctcaacctgggccattttagttggaatttttagagaatacttctaagcatcttctttgtttttagaaaatattgagattcaactatttttggggtccagacagaatttttggagggcctaaactaggacccaacgaccaggttgacaaaatttgggaaatctactcctgtgcacccttacctccaagccaggcctttctagaggatacctcatgggactaggttccctattcttctatttttggccttcctcaagctgagaaagctcttcctcaggcctctcctgcactgatgggaccgcagttgaatccacttgatgctcgtatttttaattaaccttttcatggcaatcaatatctcttgcattcatctcttgttttattccttctattctgccaactcagcctcatggtcaccatccttttgccttagttcaactaattctgtatagttatcttcatcgtagtcttcatattcttcttggtttaaatattctaattcattgctatctccttctccttcatccccccaccctagaaaattcttcttcctcttctggaccctctgggtcatctagctattgtggacatgaagtttttattgtcgttaccattatatcacgaggttatttacgactttctcttttggtaagcttcttacagctctttatgaaagcacaaaaattttgacctaggctttcgacaaccaatagttaaagctatgtgaagtaattaatgaatgttagaagagaaaatttttacgtggttagggcattaatgatctttagtccacgagtgactgtatttatgaggtatttattatagagagttttcctatcgatccccctttgctttacatcattggaggtatttatagactcataatggcgataataagccaccattatagtgtttgtttgcaccacactttgcaaaattttccgaatatgatttgaggacatgattgcttacttttatgatgaattttaggctttgtgatatgtgtttggtggaatatgacttatcccttatttatgacttgacaactcatttatgcagtcgtcgattgatgtatggggtctcgtaaaattagaaaatgatggtttaaacacttaagcatgtatgtcagcgtaagatgccagatgctctttcttatatcgcattaaataagtatacaatgttttaatcatcgagcaacatgttatacttcatcagtcctcccgtacccttcccgggtagacttcactcacagagaggaaatgacaaaagatactcgttgtctagctagcccctcacagagatgactaatctattattactcttttgaaataatagactctaaaagtaattaatgtgtcatgccttgtaacgtgggtcccatttgttagaatttattggggtcacaattgtatatataaaatgtgtgttgggtcatcaaataaataagtcaaatttatgtggtctattttggaataaagtt

SEQ ID NO: 105064 - DNA, 1341 bp, Cannabis sativa
gttttactggtgttttataaaaacacagtatttttgaaaaaatttccgtgtgacagtatttttgtaaaagttaaccaaaattccagtatttttgtaagtgtccctaaaataataataagagctaaatagggtcaataaggcaccttatttatttatttattttttaagaaagattgcatttcattaaaaaatagcatcaactacaaaatatgacttcaattaaaaaatatataagaatacttacagtaaaattcccttaattttttcaattagtacatatattactccaataaaaaaaatatgatagcaaaagtcttttctctgaccattttgttgtagaaaactttgttttggtgttaagtgctaattaaatatgttaactgccaactaaaaatcgtgtgaccacatgttaaaagatttaaatttttataagaaaaaatgaagtttaatgattaaatgagacaaaaaaattaaagcctctaaaatttaatttcaaagcaataacttaaatttagtaaactgttaaaattctaatttaattaaaaagataaccctataatttcgtatatatatatatttatatattttcactgtctaacgagattttcataaacaaattaataagagcttaaagaattacaaaatattaaataataatcaaatagattttttacgtggttcagacattaatgatccttagtccacgagtcagttatattagcttctttggcaagtttttgagtattacaagtgtttacaatgacaatctctgtattcctcttgtgtctctcaaagaagaaagctttttagaaattttagcaaaagttttgtaagtaaaaattgtttacccttttttcataaaaaatagaggtatttataagcacacatggggtaggggcacatcctttacccacctacgatttcgtactcttcactgcaagggctggtactaaaacaggatgatctaacaattggttgataagaagtttctccatcgtgtggcgtttagctacagtgggagatttcatacaaaccaggacacatgtcgtgcaaaggtttttcctttgaaaaatatctccaaccaggctattgggcaaaaggcatgtccagaggtgcgtacacgcactaccatggcctggcatgtggaacaagatttgatcttgtgccagaaaaaggtgtaactgcctatagagcaatttccatatgaaattgatgtggttattggccttgacactactgtcacgtcctgacaccattacaggggaggtctccacctggagaccatttacatcagccatcctccagggtccgaagatgttacctgtttgcagatggctcttc

SEQ ID NO: 105065 - DNA, 899 bp, Cannabis sativa
ttgaaccacatattaacaattcaaaattgcaaaccgcaccgcaccgcacgatttaagaaaaattcaaactgctaacgcaaaaaatttcaaatcgcatttttttgtagtgcgagcggtttgaacggtttgatgaacacccctagtccttagctctcaatcttgaaaaagtaaaaactaacaactaaaaaatctcattatacacactccattatgacaaactttgatagttatgtgtcaagaaaaggcgagaaattaagctctctcttcactctaacagtggtaaccttgtttttttcaatcttattttctgtttgtaatgactgcatttaattttttcataattactttagatttttttattattgcagaatgagacaaacagagaaagtagaaatgaacaagatttcattattgaagaaaaataaaaagatctcgttgatatgagatcagtacaatgaccatgtatatatacatatcaaacagaactaaccatagttagttagccaatcaagaaccaagatatgaaccaactagtgttagagtaactaacactttactgaaatagaaagaatctaactaacttgtaactgtataaacaatattcctaactaacaccaacatagacaacactgaacaatatacaaaatctgttacccccctcaaggtggaatgtatatgtcataaacagccatcttgttgatgtgtgaatgaagtgttgtagagggtagaggcttggtgaagacatctggcaattggaggttggtgctaacatgaatgaggcgaattgtagattgcttaatcttttcgcgaatgaagtggctgtcgagttcaatgtgcttggttctttcgtgaaatattagattgttggcgatgtgtattgcagattgattgtcgcaata

SEQ ID NO: 105066 - DNA, 2576 bp, Cannabis sativa
  modified_base (2087)..(2093): a, c, t, g, unknown or other
gccggacgcgccctcatgcgccggcgcgtgggatttcaggcagtggcaaacggcggcgcgtgtggcccacacacggtgaatctggacgctggaattttgggttttgctgtccggcggctgggcagtcctcctatgtgggcagtgagaaaaaattttcactccaaatagggtttccgaaaaacaaccctaaactcaaaccctaatttcttttttctttttttttttcctttttttaagaaccctaatttcgaatttcaaattttgaatcacaatgctctgatactatgtaaaaaatagtgaatcaaattatgtatatatttcatagaataatacatatttatatacaaagctaggagactaaaataggaaactactaaatatctaattcttttacagctaatatacaactaatactctaacaattgagaatgatgaaaatctctaaagaagaattgatcttccttgcatttttcttgggtgagccgagagagagagagagagggttctttcttaggtttatgttatctctatttctttctaaagagaacttaatattcaacataaaacctattttctagaatttcactaacaaacaaaacccaaagattaaacttaactaacataatgactaaaatatccccttacttaccacttaagtaacctcttgtattaggactaaaacggtcataaccaaatcttaaaatttctcgacataactaataccaactaaaacttcacaaattaatactgctgtgacattctggccaactaatcagtttttatagtcaattgacctagaaatattttatttcacaattaacatgtattttattcacatagtctaataaaatctccttaagccctaaacccaaaagagagatatctattgtaggatccttcaagtttaacacacattcttacaacatctcaaatatctagatgatttcgtcagattatttgttagtttgaggatgaaaagcagtgaaaacttcatcttagcacccgtagtccttgtgaaattctcaaaacatggaagtaaacttaaaatcacaatctgagataatcgattttaggacatcctgaagtcgaactatctccttagtatataagtctataaactaatcccttgtgcatgccatccacactgccaggaagtgtgctgacttggtatatctactcattatcacccaaatggaatcctcgtagtcaatgcaacccgaccacagtatccatggttatatcatcccatttccacacaagaatcttcaatggttgaagtaatccgctagcctttgaagctttaccttaacttcctatcaatttaacatttcgatacatagctattcacataacttttcattcttgaccaccaatatagtgcttttacatctgatacatctttgtcatttttggatgtaacgaaataatgtaatgtgagactcatctagaatctcttcctcaatcttatcatcatctggaatacaaactatatctttatattccagtaatccattcaacaacactaagaagtccttcggtgtatcaacctcgttttttttatttgcactagttcactttactgtactagcttaatttgttccaataaatctaatgtggggagaccttagcaaatcttctcactagaaattcaagtccagctctagtcatatttttcaccaacttcgaggataattgttccgaatcatagacttgacctagacccttctaacttagggcatctgttactacctttgcttttccaagaaggtagagaatctcatagtcacaatcctttactaactcttaaagttttaaagttttagttagatattactggccgttaaatactaactggattactactgtatcgacttcgaggttagactcttacatatacataggtgtatacagtggtcatctagttgatatttaacggtaatatttaactggcatatcaaatttgcaaagaaaaataaatataagggggttttgccacctaaaaaaagttaagggggttaagtgtataaaaattaaaatataaaggagttttgccacaaaaaaaaaaagataagagggttaagtgtatnnnnnnnaaaacataagggggttttgccacacaaaaaaaaagataagggggttaaatgtataaaaattaaagcataaggggatttcgactcaaattgctcaataataaatatattttggtacaaataattttattatagttttttaatcaataaaatttttttaaaagttggatggtaacttttagctagaactactccttaaatttttcaataacttgatttctaattgtctaccaaacacttttacaacacaactttttttagaaaacatcttttaattttttctaaaactgtgttgatcatgcccagagaattctatacccatgagatgaataatatttaccaataatatatatgttttttattattatatttatatatacgggtgcactgtgtattacccattaatggatattgttgcccctgatttcgcccaaaatacgtggaccagttaaacagggacacgtggatcagataacttgtaaatat

SEQ ID NO: 105067 - DNA, 557 bp, Cannabis sativa
  modified_base (32)..(40): a, c, t, g, unknown or other
agccaagctcaaaagaaatcaccatttcactnnnnnnnnnagatagaagctatagactctgtatctatgattagcgctcccactcaatttactaccatgttctcaagatctaagtgttgggaagatctactcagccaattttaacgaataagtcaaagaacacaaataatacagttgaaccataacctaaccatctcaggattgagattattggtctaagatcaactaagttatatttacttagaaagatattatgataagtttatgatatcttttctatgtgaatatcggtctagttcaatgtataacaatacattcaatacaagcttactttaccaataccttagaagagacataccattatccaagtgtaagtaaaccacattattgattatcatttcagtggaaatcttgtgtactaattaatcgtgggactaaagtttaatcacataatcttaattactttctactgtgtaacacaataatcataaataataatgtgataaggatttaaacgaatttataaatcaaaaaaataatcatgaagcaaacatgtg

SEQ ID NO: 105068 - DNA, 549 bp, Cannabis sativa
  modified_base (203)..(208): a, c, t, g, unknown or other
gcagccggagtcctcacattcgggcagatgaccttggaaaggttgaagtcatccaccgactgattctcagatatcagcttggccttccaactgttctccgtcgtgaccatgtccccaacgtcgagggccttctggtcataagtggagaaagtcttggcccgctggaggaatactcgggtaggcgcggtccgcatgtaaggtgnnnnnntgacccactctgtaagaagctccgggcggtccatggcctggaagctggaggaaaagaagaagcggtgatggtactccttcacgtgcttttggtggttgaaagggagtgggccctcattcaaaaggtgggtccgaaggccataaaatacgtctttaaatttgtcccccttcttggggatagaaacaagttcgtaaaaatacaaaatttcaaccggactgggcaaaccccaactccgggcggtatacaaaataaataagcctgaaagcaggcgctaagcttgagggattagttggtacggtgcaaggccaacaaaaacaagaaaatttacaaagtagtcttga

SEQ ID NO: 105069 - DNA, 519 bp, Cannabis sativa
tgaaaatggctatttgtagacaaattcttcttcactagatatttgcatcaaacataaggagaacatctaatttaaaaggtcatgtggtgttctcttctactttacctaatttatcatcttttttttttcttttgtatttaatttatactaataacaaaaattaattgataaaaaatagaaatctaattgacattttatattggattttttatacatagtgacagtaataataatatttattatcttatatttcacatactatatctatttaatttaataaaaaacccaacactaaattatttttaatatttaataataatatcatcatctttctattttgtggtgattttagattttttatttttatttgttatactaacactaaattaaaaccaactaataaaaagaaattaatcatcaatgacttatagtattctaaaacatggcttatagtattctaaaataaaaataaaaactatttatatatgataattataacattataacatatgtattaac

SEQ ID NO: 105070 - DNA, 586 bp, Cannabis sativa
  modified_base (30)..(52): a, c, t, g, unknown or other
ttttatttttaataataaactattttattnnnnnnnnnnnnnnnnnnnnnnncatgaatttctcataaaccaatataggcacactttatatagaatagatatctcaaaaaaatgagggatattatggaagcaagttattcgtcaaccagtaaagtatgcttacccaacccatgtacaactaaaatggcagactaacaaatatggattagggacacacttaaaaattggacaataagtttatgaggaatttttattttgatagtttttaaagtataagtttgcaaaattatatatattttttcaaaaatatttggatttttttttccagttttaataaaaaaaaagtaacaatattataaaaatactttcagctggccaaataaacaaatatacagcccaaataaaaaaaaattatacaaataccacttacacacacctttaacccaggatctatgctttctgggcaactatcacgcaaccatagtgcaactacgcaacaacccaacacaaccgaaacgaaaattcaaccagaaagagaaccaccattaattctggcgacttcacctgagaagatgaccagaatcaa

SEQ ID NO: 105071 - DNA, 625 bp, Cannabis sativa
  modified_base (130)..(153): a, c, t, g, unknown or other
  modified_base (247)..(250): a, c, t, g, unknown or other
ttctctccttaattctttcattttctaatattttattagagtataaatgtacaaattaatattttactattattttaataagttttccataaaaatatcttacataaactaattattattattattattnnnnnnnnnnnnnnnnnnnnnnnnattattattattattattatcaatcatcaatatatttatatatttatatgagacggtgacatcacgctttaaaatcatattattattattattnnnnttattattattattatatacaacaggtgatatacaatgatgagaataattttgaatgatcgaaatgtacggaagagtgttatatgaaccatgtcgggcttccattataaaaaagagatttcgtacttacatgttaaattatataaaaattagtaatattaaatttttttaaacttccgccgtgaagcgcggattgttaactagtatatatataaaggagaaaaataagacggtgacataacgctctataattatcccaaatacttttatctattctctccttaattctctcattattttaattttttattattcaactctacttttttctatttttttcacattaattaatctaaaaaaactaatctacttcata

SEQ ID NO: 105072 - DNA, 525 bp, Cannabis sativa
cccaggatgcgtgaattactcgccaaagaaagtattatctctactcgcatattgatggggcggtcagtattcgcaaggatgctgaccattctatcgagtgcgaatttatagtttaatgcgggtgggatcacttattttgcttttcacacatccatcacgctaaaaagatcttctatctttcagatgagcgacttgtcggatagccaacagctcggctttggaggccgtgcattcgatggtgaagttgaccaggaggaggacagctttctcccaacctcgctttccgaagaggaggccgctccaatagagctaggctcgatgtcttctgtggacatcgaaaggatggtgcaggatctcgccgaacctgggaccatcgatattcgagatagcgagtccacggtgtcggcccgcgactaccttatccactcgaggcatgctgccgatgtcgaggtcgaggagatggatgatgaatggacgaccccagttcgcgagtcaggtgaggacgaagaggaggcggaagggagt

SEQ ID NO: 105073 - DNA, 927 bp, Cannabis sativa
tgccagaaacccaccaccaaccccaaccctaaactagcaccaccataaccaccctctctctccttaagacccctttcgaccaccgtctgacccacagctcccaccaagcacaaggtgaagaatcgcactggctatggcggagcttcctatatcaacgtcgatctcaagatagttcgttcctctgtggtaattacagttcaatgccttacctaataaacaagcgctgtaattcccccaccattttcttcatgatccatagtcctttaacgattcgattcacgatcttgaacagttgatttctaaatgcatcgtcaccgttaacgaatcggtaaagaagtgaaccaggagagataggatcgtctgtggcgaagtaaaacacagcgccgacaattttcccctcacgatagctgccgcagctttcggattcaacctcttgaacggttacttgcaggctagatcggtatctcattacagcgattacgacggagatgagtggttctagtggacattcttggtgggagttgtgggtcagacaaaacttatagtaattggccatttccttaaagtatggattcaatggtagagttgaaccttgtttggcatgaggccttgaccacacataaaatccacccacagggttcgtcgccagctactcgggactaggcaagaatgcctcaaccttctcgaggataccttcctcaaaaagattttttaatctcttgaaagtgagtatggatggaggggagacccatcgaggacctttttcctttggtgctcatgggctgggcctccttgtattcctcttcaacatactcttggcccgcccccaagatatcgcctagcttggagacaggttctccgacctcgttgtagctgccaaaaggaagtacttaggttccatcttattcttcttatccttcaatgtca

SEQ ID NO: 105074 - DNA, 639 bp, Cannabis sativa
  modified_base (106)..(117): a, c, t, g, unknown or other
aaataaataaaacaaacaaaaaaaaaatcaaaaatttcaaaattaaccataagctagtttgtggaaaagttaaattttcaaattcaaaggctactaatatctaaannnnnnnnnnnntaattaaaaattaataaaaattaattttattttgataattagatttttattaaaaatttaaattctacacaaaattctaccaaaatttgaattttgtttcactgaaaaataatttttgaataaaaaattatcacaaaagggaaaaatggcacagatgcatactccctgcgcgcacgcaaggggagtctggtgcgtgggagaggctgcattgcagcctgttgggctgagtaagcttaacgtgagcagcgccttcggacaggatttgtccaagtgtcctcggtcacgaggttgtttgaacctcggtcatgactgaggtgcactcaacctctgcacgcgcacgtgtgcaccaattttgggatattttcactcaaattcaaaaaatcatagctaattcataaaaaattcaaattgagttctataaaaacttaaattatttattatagtaaaatcatcaaatatacatataaactaacatgaacacatacaaatcaacacaaacattgttttaaatccatatttcat

SEQ ID NO: 105075 - DNA, 1121 bp, Cannabis sativa
aagtaaatttcggaagtgctatatatgctatgtgttacatgtctttctttttgttgttttgagcaattattggcataagagctatcactttaattatttcatgttgtttatagtaccgataggctaattataaaataattaaaaggccttccataattgacttgtgtggattttttatttatttgttttattacattgtggcgtgtttggagttttacattttcattttttttttatgattttatgctttaacaagttttgctggtacttgacaagttttaattagttttattatctgtttgtaggtgcaaaatgctattgaatatttgaaagttattggagccttggacgagaatgaaaatttgaccgttttaggtagagaatgatattcgatttagcctgtttaggactgtattgtattgcaagataactttttcttagatcaagagattcattctgtttgagtttgttgacaggacggtatctaacaatgcttcccgtggagccaaaacttggaaagatgctcttgttgggtgccatattgaattgcctggacccaatattgactgttgtttctggcctcagtgtccgagatcctttcttaacaccatttgacaagaaggatgtaagtaagattccaattttcaaatttgacaagaacaatggattttgtttctccgagcagttaggatttcagttcaggggctgatttgtttacattaatgtgtttgagcttttagcttgcagaggctgcaaaatctcagttctcgagagactacagtgatcaccttgcccttatcagggcatacgagggatggaaaaacgctgaaagagaatatgctggttatgattactgctggaaaaactttctctcattacaatcgatgaaagcaattgattctcttaggatggagttctattctctgttgagagatactggtttggtcgactccaatagcaccagctacagtgcatggagctatgatgaacatctcgttcgagctgtcatatgctacggtctatatccaggggtttgctccgtggtggtaagcaatgtatttcttccttctgtgtgtgaatatacaagaatagccatttttaagtaaaaaatgaatagtttc

SEQ ID NO: 105076 - DNA, 640 bp, Cannabis sativa
tagtgttaaataaaatgagtgaggaaaaaaaagaggcaagtttaaggctaagtttggggtgtaccacccctaatcaaagaaaaaggttgttgttttttctctctttatctacttcatttggaaagaaaaaaatacatatatatagcaagagagtgggaacaagatggagtgaaccttttgggttgaaaataaaattttcggtgagcgcttgagagaaaaagaaaaagtccttgattaattgaggtagttaggtcatgagcctaaaaatgtcatcctttaccaaacccgaacctaaacctcacatttcaagccgattaaagtcattttgatcttagtcgtaaagctaagctacattagtggagaggattgcactagctcaacttatggaagcaaactttttaaacttaaggatcgaggggtagttgttatagaaattcaaggtgttagtgggaagtatttgcacactttattactcttggtaagtattaaggacatagataacatgcaaaattctatggaaacacacgagtcaatgcatattcactaccacaaattacacttccattccatctaattctgagagcatttttgtcgctaaaccaagtgtgaaagagcaatattttctctgctgcaagcatgt

SEQ ID NO: 105077 - DNA, 997 bp, Cannabis sativa
  modified_base (734)..(736): a, c, t, g, unknown or other
gtaattattaaaaagcactttttagcaattgttatactcgacatttcgctaccatctcactggaggacatgggtcaagataaagggaatatggatcgatgcaaatcgctttatatggaataactcattaattacgtgagtatcagagtatatttgtaacctacagactgtaaggtcttagtggaggaatcaacatacaaactggtgcttagtatattagcgagaaaccatatgttgctgaatgcgaataacaaggcatcaaggacagtacacataggaagacgaaatcgacatatatcaattgcgaaagcccttagtgtacaaactaagggtaacactcggatcggctcgagaccaagtaagcgaggtgcctgtctcgctatggaaaggctctctgtaacttcatccagttaacgtcagtgagactcacaatcctggcaagtcaagaagctaacatttaaatgagctttgaagaactctttgtaaataagagccgtgatcgacacaagacatgcatcatcgatctcagaaggaaaaatggccccagctcactattgagatcactggatccaagcttctttcaaggcatctctagatacaataattaaagacgtgtttaaatcacggtcattttgaccggataaaaacgggaaaatcacagctatatgattttcaaatcataaccgtatttacactacgtgatatgtattcaaatcccatgattttagggatgannnttgtaaacatattatagtcaactttgtaattaactgcccactatgaaattataaatagtggcaagtaatatcaaaagggggacgaaaaaaaataactcatacgggagaggccctgaaaaacaaacaaaaatctgaataagattgacttgtggactatgcttaattttaactgctaaaccaagtaaaaaaccctgtgctcatacttttatttttacagcttttattttttcagtgggaaatcactatcgtgaggctcaaatt

SEQ ID NO: 105078 - DNA, 710 bp, Cannabis sativa
tgcagctcctccaaggattttaacttggcggccatctcatccatagcctcactggcttcccacaactcacgcttagccttggccatagcctcgccctctgccttcagctcctcccagtgcttcgcctccccctgagcctccctctgctgggcctcctcctggaatgccctcctctcagctgacaagtcccacaaaatcttcacggcctcgtccatgcccccaaattcgagcatgacgaacccgtgatcaatcagggtctttgaaaggggtccggtctctgcagtaatctgaaaaaaggagcaagaatgaaatcagatgccttgacataagatataagtgaaaagaaagggatgaatcgcaagaactcaccgcagccagggcagcgctgatgtcctgaacctgaaaaacaaagttcactgaggcacaagcaccgtatctcttggctgggaattgagttagatgggagacaaacttgttggtcatctcagaggagaagggggcaaaagtaggaccgacaaagcggttgaaccagccagtcagggggtccatgtttaggtcccaaggattcctgaaggcgtcctcgcgcagggtgttctgttgctcctcccgtatgatcttctttagggcctccacctcagcatgtccccggctgaacttgtccagggcgtagttatgtttggcgatgtagagcatttgcctttcctcgtctg

SEQ ID NO: 105079 - DNA, 689 bp, Cannabis sativa
ctcatctcagcccgcctctctctcagcccgcctggattgatggtacgtgtatatttatcagttagtagtgcagtatcaaaaggttgcctggccgagatgaagattggttttgtatttacttcttaatgcataactcacgattgaggggactaagagtaaggcttttaaaaaattcataaacgtttataatttcattttaaataaagaaatctcccatttttagtttgaatccaaacaagaaaaaaaaatcattaatttagatattttttgttcttttttatatattgttttttggtgatcgaattggacatttattgattttcaaaaaaaaaaaagtggacatttatttgattaggtaactattgtttgagaatttataatatttggaagattgttgtattattaaaactgagagccaatctcagggatgtaattatctagagaatcatggttgaaattatttaattatatgttttttatcttgttctgttaatttaaattggactcttgtatttcttattttgaatgtttggactttggacttttgtgttttattatggtgatgtgaatttggatttggacaattaaatttagatttggaatattaccaaaccgtcggtcgggtacagattttttttttaaaaaattgggcagtttgcatgcagaattttacaacccgatctttatgt

SEQ ID NO: 105080 - DNA, 576 bp, Cannabis sativa
aaaccggtttcttagacttcaagaaaccggtttcttggtgatttttcagtgatttttccggcgacaatgccaattccaacgaatttttcgacgccaaaaaaacaactccgacgacttttccggcaccgaccgctacttcgacgactttttcggcaccagcagcaaactccggtgactttttcggcatcaatgacaaataaaacttcctaaacaaataaaaacattaaatatgggatttaaaaacataattacatatatatggcatatcaaataccataaaaaaacctaaaaacaaaaaaataccatataaattggctaaacttaaatgtgtcatatttatcataagaacttttaaaattccatactaagtgtaatttatatttgactaatttaatattatattttgaatgttgaccaactaatagtattattctttttaatattttactattttttaaatgatttttttttataattagctttatgtttcttttattttttttaggattattgatgtgttgattttaatttattcttattttttttatgttagatgtttgaatttgcatattaaag

SEQ ID NO: 105081 - DNA, 540 bp, Cannabis sativa
ttttcctaaaatacaattttacaaaatgaagattatagtgttcgttatgtgtccaaagttgcagatgtgaaaaatgacacggcgctcttattgaatattgcagcataaagctttgtctaatatttaacttaagattattgtcaccaaaaaataaatgacatcaatctttgatgtcatatggtatttgagtttgtgtggtaatttcaataatataatgtttatgtttatcatatttctatggtgcgatatttgtaagggaaaatttcaatttggttccatatatgtactttgttaaataataatttaaagattatattttgcaaagttgatcaaattgatataacaaattaaattttagttagttaaattgttttttgatatgagtaatttataagttataattttggcctatatccaaagttattattgcaatcaatttggacatcttaattttcaatctcttgatctattgctcaaagagcatgtggtgtaagagcaccctcaagacacaatcaaactaaaccaatcaaagaataaaaa

SEQ ID NO: 105082 - DNA, 636 bp, Cannabis sativa
ttctgggggaccattagaaccggtcgaccggttggtacccaggaaccgggcttccagttgggaaccggtctgccgattggggctttttcctgaacgttagttttccccgtttttgtgttgtttagggtattaacatcctatttatcgatagggttatctttaatttcaattttaaatccccgataagtgttttagcgtgtctcttatcgagttttgaatattatggtttagggccctgtaaagcgtcacgctctgtttccactcaggctgaccggcacacttgagcacgcaacgaggtaagatagcataataatgtatatatgaatgtattcttgttttaactatttagaatactaacactaattgtttatgtgattttaagggtgttagtatagtgtaggtttatagagtagttacactgttaccaacacgagtaccaaagggtacgtcgtgcatgtggtacaacacttagtaacttccgggagtacaataatggctctaccaacacgagtacatggtttgtactttggtgcatttggtacagtggtcgtacttcccttaagaacgttcttaatcatttggtgggttcagttatagagctcagagcggctcaaacataaagccgaaatcgcatgg

SEQ ID NO: 105083 - DNA, 859 bp, Cannabis sativa
  modified_base (240)..(240): a, c, t, g, unknown or other
  modified_base (465)..(476): a, c, t, g, unknown or other
  modified_base (797)..(802): a, c, t, g, unknown or other
ttagttaattttactactatttattaaataatttactaaatatatttttaaattaaaacaaattaattaagtctaataaaaaagtaatataataatttactatttaataaatatgtataattgtaagacctgcattataaataaaactgtatatattttcttaataataaaattatatttaaataagtaaatactaattttttagtactttcatacatgaaaaattatgtattaatatcnttttatatatgattatatatatatgtttcgtagtgcaaattttttaaaaattgagggggagccacagccccaataggggtgtatgtgtctccgcccctctatacaagttgaagatttctaagatcgatgttttatatcatttcaggatagaatttctggaatatagtcatttgtgccattaaacttcataagagaaagtagaatgacatcataagcagatgattnnnnnnnnnnnnatccaatgatatactacgaaatgaataagctaagaggagaacttaagataatttcgatgaaaataagaatctaataatatcccgctagtcgagagtcaaagttattcttattttacacgaaatttataagtaaaattaataacagaaaacaacatggcctaatataaattcacgcacaattaagaaattcttaagcatttagcaagtaacaaagacatgcgaaaatataaaactattatatcttatataatttctaaggtttcaaataaatttatacagtgtcccggtaggcgagagtcaaagtaatcattcattgaatannnnnntcagctcatctaaaatggacacaattctagcaactttttattcgatcaaaataagaa

SEQ ID NO: 105084 - DNA, 1159 bp, Cannabis sativa
  modified_base (208)..(210): a, c, t, g, unknown or other
attacaaaagtttaaattctgcgctattttggttagtaatcccgattaggggattagggtttcataagcatttttgggtagcgtgcctaactattttagggcgttacaagttcccatggacttctgtaaactcacccaaaatttcgaggtaaatttagggtctctatctgagacaatagactttggtaccccatgaaggcgaacaatnnntttcacatacaagtcagcatactgatctactgtatacgttacctttacatgccagaaatgagctgactttgtaaagcgatccactaggaccaaaactgagtcgtacattcctgtggtcctgggcaaaccaaacacaaaatccattgcaatgtcctcccacctccattctggaagtgataatggctgaaataatcttgctagtcgctgatgttctactttaatttgctggcaggttaggcacttggtcacataatccaccacatcccttttcattccgtaccaccagaaataaggctttagatcttgatacatcttggtggttcccggaggcaatgagtaaggggtagtgtgagcttcatccaaaatttctttcttaagctcagtattactgggaacacacactcgagatttaaacaacaacatcccactactagagatcaaaaattccttagctttgcctgctaagacatcttctcaagttttaagcagtttaaggtcttgtagttgtgccattctaatcctttccaacaagtctgactgaagtgtcacattatgcaatttcccaatcacaaactcaatattttccctagacatatccaaggctaactgaggagaaatcattaccatattgaaagtcgaatcaggtcctttccaactcaaggcatcttccacaacatttgcctttccagggtgatacaagatttcacaatagtctttcactaactctaaccaacgcctttgtctcatgttcagatctttttgagtgaaaaagtacttgaccattttgtggtcagtataaatctcacaacattcaccatataagcagtgtcgccaaatcttcagggcaaacaccactgctgcaagttccaggccatgagttggatagcgctgctcaaaatctttctgtaaagactggttatgattcacactttgggttaattaataacta

SEQ ID NO: 105085 - DNA, 736 bp, Cannabis sativa
aaataacacagaaatatattaaattaaagattttcaggcaatttagttaaaaagtgaaaggagaagaagaacagtatttgtagaatataagaaaagggtctagactattacttttttttttttatatataagtggagtttttattcgaaaacaaaacaaaaaactagtagccacaagagggggctacatctcttaaaagacccgaagtcttcacccacgactctctagcccaacgagctaaagaatcggccaaaccattctccaaccggggaatgaaaaaaacaacaacctcctcaaaggatttacacagttcaagacacaaagagaacaaaggataggtaccctaaccataaggaagagaaccagactcaaaagccaaaaccgccaccttagaatctgattctatcttgaccttgcgcactcgacgttcagttgcctccttcaaagctagctgaattcccagcaattccccttccaacatgcacgacaccatggagaagtcaacaacaatctaaggattggagagaatcccatcatacaagcacactaccgccacttctgcatcaagaccagacacagaggcatcaactttgcagcaccaataatcgtcccacatggagtttagtgtaatgtccttcaaagtaacccgagtctcttggcgatcttcccaataatggcaagaagaaaactcctgaaatctcaccatacaatcccgaaagacacgctccacatcaca

SEQ ID NO: 105086 - DNA, 1186 bp, Cannabis sativa
  modified_base (163)..(175): a, c, t, g, unknown or other
actttatatgttttacttactaaatatactgacacatattttatttttataacacaaatcgttcaaaataattatattattttaattattaattaaaataaaaaaaataaaatattaaataaaactaacactacgcggcttgacacgtaacaatcacctagtnnnnnnnnnnnnntatatatatatatataaaagggttaagttatagtgatatgaaaactaattgttggagagaaaataataacacttccatttagtatgttcctaattaggtgtattttttcaagggtttccctaatattaatcctaattaggtgtgatttggtgtagaagattaaagattaaggtaaatattatgtatttctttaatcttagtcaaagctaactaaatgatatattaagactatttttatgcaattttagagtttatttaatatatattttaaaataatttatcattttattggttggatttatgtttgatatttgtttttgtgtatttttcaagaaaaatatttggagatttccgtttttgtttattttagtgttcttcaagcctttttgagataaaaataattaattatgaggaaaaagaaacttcaagatttaaataatcttagttgggattctcattgtctaaaattggtcgaagttcatatttttaatttcaaaagtcatggtccatagtcaagagttgtcactttctaaaaataaaatgaagaattgaaaaattgagaaactgctcttgaatgtcgcgacattcacttggccgctggaaagagaaaaaaaatggaaaactaagaaaatggtgaaaaatagaaagtggaaacttcactcacaaagtcgcaatattgaaagtttttgagaaaccttcttaatttcgtatttaaagggggtaaggaattaagttctgaattcattcgaacttggagaccaattttgagcagaggacggttaggagtagaagacaccattggaagtagggatgcacacggagcagggaattggcagggagtgctcccccattcctcatccccgttaaggattttaatctccatccccgcttattctccatcaagatggggcgaagaatcccctaataggggtggggacggggcgaggaatctcctaatagaaaaataaagtttataataaaatttttaatatacaaaaatattaaactaca

SEQ ID NO: 105087 - DNA, 1108 bp, Cannabis sativa
ttcccactgatccaacaccacccgttgtcgcaactcaagctcctgcttcgacgaattggaatcccttctccaattccctgactgcttctctcaccgttcgccttgatcgcacgaattttcttacatggaaatcacaggtggttcccacagtcattggtcatgacctcgatgacattctcttcaccggagttcctccccctgaatttcttgtttctggcgctcaaaacccccaatttctcatctggaaaaaacgtgatctgcttcttctctcatggctccgttcatcaatgactgaaggagtccttgcctcagtcgccaactacaccagttcgtactctgtatggaaagcattggaacagaaattcaccagccaatctcgtgctcgccttcttcaactcaaaggccaattctccaacattcgcaaaggatctttatcaatcttggactatatcgataagattcaggtgctatctgactccatttctatagctggttctaatgttgaaactcaagatattatcctccaattgttaaatggattaggtcccgagtatgaccctgtggtttcaggaataacatcaagaagtgatgaattgactcttgaggaagtttaggctttgttaatggcccatgaaagtaggctagatcatcataacacagtctcgggtgttactctcaagatgcaagcaaatcttgctactggtgcatcaagaaatggctattacagaccccccatgactcatggacgcggtgttccttatgataatttgccaagaacacaaggaagaggatctggccgtggttaatcatcaaactcaaggctcatctgtcaagtttgcatgaaatccggccattcagcagcagtttgtcactataggtttgacaaaaattgggttacacccaaaccaactttcccaaatccaagagcctacctcactgaatgtgacactgaatccgaccctcataatcctactgttcttcccgattttggtgatgatttgtcttggtttgctgatacaggggcaacaaatcatatcaccaacacactcgacactcttgatgctgctgcagcctatgtaggaccagaaactttagcagttgcagatgg

SEQ ID NO: 105088 - DNA, 591 bp, Cannabis sativa
  modified_base (481)..(484): a, c, t, g, unknown or other
agatgagaatgtcactattgaaccccaaattatcactagtaccactgaaaagattagaagaatccaagaaagacgtaaggttgttcagagtcatcagaaaagctatgtcaatctccatcgacaggaagttgagtttgatgttggtgattatgtcttcttgaaagttactcctatgcgtggtgtaataagatttggagtgaagggtaagctagccccgaggtatgttggaccttttgaggttatccagttgggacatgttcataatgtgttccatgtgtctatgttgaggaagtatactccagaaccatcacatgtcattgagtatgaagttattcctcttcagaaaaatgtgacttatgaagaataacttgtcaaaatcttggcgagagaactaaaagtgttaaggaatagagagattctagtagtcaaggtcttatggaaaaatcacaaaaaagacgaggctacttgggagatagagtcnnnnatgtatatgaagtatcctcacttatttaatttttaacttgaggctgtactttgaaattcgagaccaaatttttttaaggaggagagaatgtaagaactcggttttga

SEQ ID NO: 105089 - DNA, 605 bp, Cannabis sativa
  modified_base (356)..(362): a, c, t, g, unknown or other
ccctaaattttcatccacgtcagatttttttttttagtaaaattagacaaatatttttaaatccaacgatcttaatagttcgaggagaatttttagcgacttaaaaagttcctaaaccatgatttagtacatatcaaagttagaggtcaataacctaaattaccctaatataattccttataaaatttcaaaaggaagaaaaaaaaattaagaaggattataatgaatttatgatatgttaatgtgtttcacttatcaattattattgaatattcattaatattatctgtaaaaaattcaaataaccgcttgcaaagtacggcacgtttcctagttcaatataatacaatacaatnnnnnnnaatacaatacgacctaatacaacgctccaaacgagccctgttctaatagtacaggtaaggtacagttcatatgaaaaatacaaaacactgttttgtcggttgattacagtaacaaaaaaatttaaaagatcaagactcaacacaaaagttgatgaaaggacagaaaaagaagaggacaataacaattacaaaaaatcccattggtctcaaatcaagcgacaaggatagagcttgcttcatacc

SEQ ID NO: 105090 - DNA, 630 bp, Cannabis sativa
  modified_base (178)..(180): a, c, t, g, unknown or other
attactttactaggatctagatttactaacatgtatgttgtttaacaccctaattatgaatatctaaaataatagaattaaacacatataaaattaaaaaatcttccattgattgcagcagaataatatgtctccttccactctgatctctaaccttgttcctttctgtcgcagagtnnnatcaagatctgagcctgattctccttcaggtgttggattcttcacagtcttacacactgtgattgagtacttgacttgctatgggtgggcatatactctttcactatagggctcgaaaatatgaagaagaagaggagattcgagttctattgaaggaggttctcaagttttctagttgtctaacaaagaatgaaaactaggtaaactaaggttggatgagagtgagagccatcttattccttatataggatttttcctagggtaagatttaaattatatggaattcaaaaagataaaaattagctaaaattctccttaagtggccgaccctaaggtgggccctactaaattagaatttcgttattttatgtaacaaattatcatttctttcacaaatgccatattttctaattttaatcctttaaatgtcaaaaatatttatttaataat

SEQ ID NO: 105091 - DNA, 3606 bp, Cannabis sativa
  modified_base (1111)..(1111): a, c, t, g, unknown or other
ttatcccaaaacactacttaatattcacataagaaaatctagggttttctaccaaactctgcggtataaatacagtaaaataaaacttattattgtctctaaaacatacaccatactatagagctcgttgcaagctttgaaacggtatatagaatgtccaaaatagacacccgagtcaaaagttatgacaaaaatacgatttgtaatctcttaggaatttctaaaaactataaaactcgaaaattccactttccgcactcaccaaaacactaccaatacttatccaaatcactccaaacttcacaaggcgtatatatactacaaatattaccatccttatgtaacagaaataaaaattgagcccttaaatgaaaaatgccattaacattcggactaagctttaaaaagttccacactcgaattctaactcaaaatcaccccaaattcaacaagaaaatatcgaaactagtcccatgcctacccgataaaattctataaggtcagaaccttcttaactattctattcacaaaaccctatacgaaaccaattatttttaagctcaaaacaaaattaaaccataccttaagctttctctcttcaaggatttgctatcctgctattatcggagcttagatcgctaagtttctgattgaaaatcgaagaaaatggatatatggggagaaatttttgacgaaggagggagaacgagggttcgttctccgttctttacattagttatatattaaacttaatataatatttatatataaagttagataagtttacgagttaatatattataataataataatattaataaaaataaaataataatacaatattattaataatattaataaaaactatattattcatagttattttattatttcttagccactaagaaatttatatttttagggtatttcatgaactccgagtaccttaaaatatctcattatttctaaaatcagcttataccaataattccgttaatatttctaactaaaagtgttgtgacatttttggcctccaaaggggtctctagagtcgctgaacctgaaaatatttttattttacagatagctcatattatatccacgtatttnaaataaatctctgtaattaacaaattacgcttatttatctactaatcgggccttcagcgtcaccgaacctgaaaatatttttattccacatatcgctcatattacattcacatatgctatataaatctctgtaatttataaattacgcttatttactcacttatagcaaaaatataaattttatgctaaaatatattagtagaatcaaaatccctcttattacctgattaacccataatataaatttaaaccctaattatttacgattaggcttatcgggatattacattctcttatccccatcttgattatttgtccaggtatatcccgttcctgtcttaaggagtctttccgtgtggctttgagctagccaattagtttcatcttatgattcaaagtaacctctttgccacccttcctattttccaattcaaaaagatagttgaaatcccctattactagccaaggtttagcagaaaaattgaaattgagtaatccatcccacatccctttcctttcctctatagtgttaaaaccatacacaaaagttatgctcatagcattcgaatggcaagccattttcacataacaatgaacaaactgagggtcctctctaacaataatcacccgagtaaagcttttcctccaaataatcaaaatacggttctaaataacagaacttgtataaaaattccaactagtgaatttcctatccatcatctctctaattctactactctttaacttggtctccaacaacccacgaacccctattttattcaaacaatagaaatcaaacactatgttctgcttctccaatttattcaacctcctcacattccaacaccctatattattgttatccattggccactaaagaagttacagaaccacaaagtttagtacctgagatgctaccccatcctccttttgtttctgcaacactgtgaaaaaattgctggagttttttgcactctcctttgacattccaagttgtgatgtttgactgaactatagttttctttggtatctcccacccctactgttgctgactattgcttgctgcattatcctttattcccttcttctccttctgcttatttttatcttgttgttgctgctgtttttctgtcctcattttcacaatttcatcatgtcagcaggtttctttagtgtggccatacttagaacagtgagcacacttagcgggggtaaccattcgtacttcacattctaatcttggagctacccaaactcattaaaataagaaattaatcggggtggagcgtctgtgacttccatttctactagaattctagcgtattgcagacgagttctatccttggtgtgttggtccagcataataggctttccaattgtgctaactagagcacttaaactttggtaccccaatattgaagccctaggtcatgtaatcttatccacaatggattagtgtgaaccagattcattgtgtttaaatccgcagaccacagacggactataactggttttcgatcgaattgaaccactcctgcctctactacctgatatcgagtagcttcatcattaaatcgcaccatgattaatcccatggaaaatttactaacctgaataactccaagatggccccagactcttttatcaaatcctttgaatatagtaatgggtggattagctcccaaaaccttgcaaataactgctgatttccagcaattttcctcttctctgacctcctccaaatctaattgagcaatttttattccatctctgatcagtggttctgtgaagagaagccgttgatctcgattattagttctttccttcgtaacctctcccagatcctccttgctgattttggtgactgttgaacacctgagttcatcatctgttcatcttccacctcctcagcccaactctacgattgacttttgacagatcggtttaactcctctatttcgattaaatcctgagctttgaccatctcagcaatcgaattcaaaccctcagtaaagtgagctttgtcgacttcttccatctccactgcgattccttcaagtgcatctttgattgggatcgagtgtctggattccgtcccacttttttcttcctcgccatggaaggagaaagcagagaagcacaaaaaaaaaatttctttcttatattaaataaatatacatttaattaaatagaaaattaaatatttaagtagattttatctagatacttaaataaaagttattttcaggatatttaattaggtagaaaattatatttaagttaaaaatttcaattttagaacaactaaaattagaataattttcaaaatatattttattaatcatttcccgctaaatttcgaaatgcatcgcttaatttagatactttttgaatttttttttaaaaaatagattaaaagttgaaaattaattattttaaattaattttggaccaacttaaatcaagtaaatatttcactaatgatttattaaaat

SEQ ID NO: 105092 - DNA, 735 bp, Cannabis sativa
taccaagtttactgcattttctattctgacagaagatatagaaagtgtgtacatggctactcagtcattagccccgtacaagaagcccgcacccatgaataaagatgtaagcaatagagacatgaccaagttttgtaattttcatggggattatggccacgacgccaatgaatccaacaatctaaagcgagaaattgaatttctgatcagaaaaaataatctgcatgtgcaaaaatatgtcaaggccaatcaaaatcaaaggggcgataacaaccaagatttactaccaccactagtagatggacatctgtaagtcattattggaggttcacacatagcaggagattcaggcaaaccccgggaaaggtatgctcgaaaagtatagcatgagcaacaagaagtagttctggccgttgaagaaaggaaactcaaaataccacgggcaggggagaaaactataacatttggtaatgaagatgctataaatatcagtttcccacaaaacgacccgttgatcgtggaagtccagatagctaagaagatggtggctcgaaccatgatagaaatggagcctcttccaacatcttattcaagacatcgtacgaaaagatggggccacaactcaaagatttaactccctttctctagcgcgtgtatggtttctccggccaaggtgtcgcacctctagggaaaattcgcctgccctcactattgggaaagctctgaagagcataa

SEQ ID NO: 105093 - DNA, 878 bp, Cannabis sativa
atcctctagtatctgaatagttctatctgatttcccatcagtctgagggtgaaaagatgtactgaacttcacctttgcgcccatagctctctgaagactcactcaaaattttgatgtaaactttggatccctgtttgaaataatggatttaggagctccatggagacgaactatctcctttacatacagttcagcgtactgatccactgtataagtaatctttactggcagaaaatgagctaactttgtgaatcgatccactatgacccacactgaatcaaacactctcgtggttctaggaaaaccaaccacgaaatccattacaatgtcttcccacttccactcaagaagggctaatggttgtaataaccatgccagcctctgatgttcaactttaatttgctggcaagttaaacacttggatacgtattctaccacatttttttttcatcccataccaccaaaagtagggttttaaatcctgatacattttggtggttcccgaatgcagcgaataaggtgtggtgtgggcttcatcgaggatttccttcttaagctcaccaatattaagaacacaaacttgagctttatgcagtaacatttcattattaatcgagattgaagagtttttaggctgaccagccatcacctcatctcgaatcttgattagctcaggatcttccaactgcgcccttctgattctctctaacaaatcagattgaagtgtcaagttgtgcaactttccaactacaaattaaatttcagctttaaccatttttgtggccagttgaagagctatcattatagtggtgaaaacctgcccgggacctctcctactcagtgcatcttccacaaacattggctttctcgaggtgata

SEQ ID NO: 105094 - DNA, 1011 bp, Cannabis sativa
ttgggtgtttccctgtttcctaggatattgtagtccctattagtaatagcagaaccttgagttgtaggttcgggtttcccgaattagggttttaacttgtgatttaccttgttatgttatgtgattagggcatccatccagcacgagattttctgttcaggtcggccaactcacttgaatctggaaaaggaggtaagaactgtctataatatgtaatatgaatatgcgaatgtatatatatgttaagtgtatatgcatgcttataagtttgttacactaccaacacttgtacggatatggtatatagtgcattggtatagtgtatattgttaaggagtacattacgatgttaccagcacaagtacggaaaagtacagggtgtgtatggtatatcactcagtggtactcaaggtacgaaacaaaccctaccaacactcgtgcaatgaggtacgtagtgtatgtggtacaatggttgtaccctaatatggaacgttctcactaatctgttaagccttgtaaataggtgtatgggcgcttagatacaagtcggtattatatgatatgttatatgttttttcttactgagtctgttgactcacagttctcttttcatgtgtaggtaaaggaaaggcaaaagctggcaggagtgagcctgagctggaatgaggttgtacatgtcatggctgcgtgacctggagtgttcggtctcggggcatctggggtttctattttgtagtcgttatgcgaactgacatatgtattttggaaaattgtataaaaagtatagaaacgggatcccggattttgtaaataattatataaagtttataaagtttcataattaaaataaaagttttaatttgacacaatttttaagaaagttctttgattagcaaagattgccctacaattaaaaaattattgtagcgtgccttagcattagggcgttacaagaaactggtccattattttgtacggccataagtagattcttgcccaatattttattct

SEQ ID NO: 105095 - DNA, 540 bp, Cannabis sativa
ctagttaaaggttattcgccacccacaataatcattcttaattcctattaattaatgtaattttaatttccaattaaactattaatcccacagataaaactgaatcaatcaattatctcaatctccctattacatgtaatcaaggcgaagtgctcaatataattaactcttttacctaagcagtaaatccacgaaccatgcaatttatttaacttaaataaagctttgagatgaaaccgagagccaccaccacctctttttcagatgcatcttttcccaacaggtgctgtctatgctctttaattggctggggtttgatggttggtcaagggactttgatagctggacggtttggttaggcaatgctaggtcaaacatcgtggataatgtgagaactcttttattggcagccgtggtttaccatttatggagcaaccgaaacacttgtttattctctttttactctaactctatcatttgtatagtgaacaaaattaaaaatgatgtgaagtataggctcttgttgatcaaagataggaa

SEQ ID NO: 105096 - DNA, 1035 bp, Cannabis sativa
agcaaataaagtttagttacaacagttgaaggcaattgaaaggaattaaaaataatcatcacgctgcatcatttccacattaaagatatacattaaactttggcaccaaattccatcatcaagtaacctaccccgttccataattaacaaaaagacgtgtactttaataactcacacagtcgtaatacagcgccaagactcggtcaaccatactttgacgactttatcatcaccagcagaaacaaggagcttcccatttgctccatagcgaatagctctgatggaatccttatggagagatcctgaggaggaattatcttctaaagaaacagcaccaccctgactgtcagagaggcataagaagagaaggtcaaacaaaagttgataagttttcttccttaagttctaaactcatggaatggaagttccaattctagtaaatgtagcgtctttcagaaaactatggcattattcgaaattttggctatttttcaaaattatggaaaatttccaaaatacagaaaaatagaaagatcaccggaggtcgaacacccgcaagtccgatcccacagcgacggccaccgaatcctgagaagggtgaaccgctatcaaggccggagctacctcactatctttgctgcattctccgaattccgccggagggtcttccatttttgctccgacacaagtgttaaatttagggttttacgatttggtttcgctgcttgcctgtggggttttacaattcaaaaaagacgaggaagaagacccaaagggctttatgattttgggcttaaagagcccaataatttttttttttttttttttgatcaagaaagaaaaaatcttcattaatcaacaagccaaaaagccaacttacaaactcaacacaactcaagcccacacctacaaagagatcattttaaaaataataacctttcctcatctttcaacttcttaaaaataaaattgctaaacctatactttgcatctttccttatcatctctacaatcttttgaacactataagaaaaa

SEQ ID NO: 105097 - DNA, 592 bp, Cannabis sativa
  modified_base (68)..(70): a, c, t, g, unknown or other
ttgattatcacaccacaattttgctggaatagaagtcttaaacccgaattcagtcaaaagctgataannncatattacctcacacacagactattccatagctctatattctgattcaacattggatctaggtacaacattttgtttcttactcttccaagagaccagatttcccccaacaaatacacaatatcctgaagtggatcgtctatctatcttggagcctgcccaatctgcatcagagaaacactcaatctgggtatgtccatgatctttgtaaattatacctcgtcctggtgctcctttaagtaacataaaatttgctctactgctgcccaatgatgaattgttggagaagacatgaactgactaatgacactaatcgggaatgcaatatctagatgaatcacagttagataattcaactttccaactaatttgtgatatttcctaggatcttcaaatagttacccatcacgtgtaattagatgcacagctggattgattggagcattacaaggttttgctcccaattttcttgtctcagttaacaaatcaagtacatactttctttgagacagaaaaatacctt

SEQ ID NO: 105098 - DNA, 563 bp, Cannabis sativa
tctttctctatctcttagtatctttcttcattacagacttaaccaccaccatcactcctcttcaaaaatatcatcaccaccaccaccatcatccaccacagatgcccaccacggcaccaccagcatccaccaccaccttaacctgttatttatatccaaacaaccacaactaccaccaactccaccccaactcaaacacaactccgcaactcatatccaaacaatcaaacgagattttacacacagatctgaaaaataaaaattatataatacccaaaaggaacatttatacacagatcgattaacaagattgcaaagaaaaattatggaaaaccctaaatgagagagagagagagaggggtatcgggcagacagagagagaaagagaatagggcttggtggtcctcggccaatggctcggtgtcctcgtcaacgtccaatggctcggtggtcctcgtcaacggcggacctggacctgcatcatcgagagtgagagagacagagaaagaaagagaagagggctgagagagagagaggtgatcgacttacctgggtcgggggag

SEQ ID NO: 105099 - DNA, 839 bp, Cannabis sativa
tggtatacgcacaacattttttttatatttaaatcattttaatcttttttttttatgctaatgtatgtacatataatagttatttaaggggtaaacactcattttgatatcctatgttttgctaaaatacatttttcatatcttatgttttgaataataataaattagtaccttttgtagtttttatcaagtatggattttgacaaaaatattaggagttttttttttattttaacactttaaaacaatttttttcgtacttgaaatttcatacagaaactcttatagcaaccaacggagcaacttaaatcgcaatcaaaatccatatagcaactcacatataaattatcggagaaacttacaccgtaaattttcaaattaaaattttaaaaagtaatatataaagtaatcttccaaaatattatatttagtatgtcaaagcaagattaattcaaacagttagcatgtttttttaatatttttttattccgtacctataactgtttgagcctaatttatggatattattataaattttttaaaatatactttatacatacttattttgtgccgtgtattttaaggaaatagagccacacttgtatactcaatcattatatacatatatactttgttatttaaaaatcaatagaacaccctattattcatgggaatatgcctaataatagtatgatcacctgatcagatccgatcatttaaattatttcaaattacagaggtgatttttattgaaaaccaatatatataaatatatatataaaatattccctataaatattaaaaataaaataatacgataatatggcttatagtatgta

SEQ ID NO: 105100 - DNA, 641 bp, Cannabis sativa
gagattttagaccgccacgacactccctcatacttctcttttatatatatatatatagattttttctataaaaaaatacttttcttatattctgcaaagaaaaaaaacaaacttcacacaaaaatatatttatgaatacatatgtataaataattaaataattatttaatttaatattattaatttagtttacctttattattatgtgttttttttttaaaaaaaaattattaatttaagattgatatttttatagaagatttattaaaataatagtaaaatattaatttgtaaatttatgctctaataaaatattaaaaaattgagagaattaaggagtaaaaagaaaaatagctttagaaagattttagactgctacgtcaccgcctcatacttctcctttatatatatatatagatgggtaaatggcgtcaaaacccccaatactttcgttttggtttcactaaactcccaaaacacaaattttgcgggtaaacccccaaaaccaggaaactgttagcaatttaacacttccgtccaaatttcactgttaactgccaagttggattgtccacgtagacacaataaacacgtggcacagttttattggtccacgtaaaaaattaattaaaaaaatttaa

SEQ ID NO: 105101 - DNA, 527 bp, Cannabis sativa
aaattatgatattaaaaaaaactacaaactaaaataaaattaacatacgtgacttgacacgtaacatctatctagtattaatgaaataggagaaactttcatggaaacaaaataggcactaactttaatattttgttttaaaaaggagcgaggctaaaaaaaggagaatttttaataatattattttttatgttttatttataattttaaggcttaaaatttttaattacaaaaatactcttgtaaagttttataattataaaaatatactttgttcatcaaaaagtaaaaaaaaaacgtaaaataaatcccacgacaattataaattacctataaaataataataaaaatatctgatgattactatgatacaataataaataaactataaaataactaaaaaatacttaattactttaattaaaaatatatttttgtaaataaaaaaatttaaagagtaaaaataaaatatttttcgatttttttttataatttgtgtaaaattttctttcttcacataaatcccg

SEQ ID NO: 105102 - DNA, 1144 bp, Cannabis sativa
gtcgtttttggttggctgaaacgacacgtcgtttggaaaaaacgacatgtcgttcgcaaattttggttcagtccccatccgagaaaatgacgggtcgtttggaccctacgttgtgtcgtttttcgccaaacgacatgtcgtttaccaaaaacgacacgtcgtacgacccagataaaaaaaaaaaaaaaaaaaaacagacgcacctaaggattggtgcttaattataaaaatccaaaaaacaatacaaattaactacaaaaagagtgatcaccctctcgtaatagtaaaacacaaaagtgtcatagagcatataaaaggagagtcttctagtttctcatcatgtaccttactttgaaaaagcaatcctcaatcttataccacatgtactcattgaagaaccaaaagtaagcacgtctccagaaaccacaagccaacaaaggaccaatgacacctacaaacccaactccgaatcccacagctatgcccaatcgaaaccaatacttttcttcttcattatcctcttcagtagtatcacttgcatctttaggagtcttctcttcatcttctctacacttttttgagagtggaagtccacaaagatattggtttccaataaaggaagaattttccatactttgtagttgggtgcctgttggaatttcatctgaaaagttgttgtatgacaaattcaagtgattcaagaaagttaaacttgacaaacctggaggaataaccccagagagtcggttcatagagagatcaaaagattccaacaccgtcatatcttttatttgattcggaatgcttccttcaagagagtttctcgatagatttaaagatcgtaatgcatgaagacttgtaagttgttttgggaactgtccagataaatcattatctgaaaggtccaagcttgtcaccaatgtcaggatggtgttgtattgatcttcccttcctttaatcaacacatgtgcattctccatgaaagtaccagcactagaggaataaaagatagggcttgttgaattgggcttaataatcatgccttttgtaggaattttacttggtgaaattccaagtttaacctacaccactcaagaaatttgtcaaaaaacgacagggacaaacttgtcccagaaaaattcaa

SEQ ID NO: 105103 - DNA, 883 bp, Cannabis sativa
  modified_base (43)..(46): a, c, t, g, unknown or other
  modified_base (249)..(249): a, c, t, g, unknown or other
  modified_base (841)..(856): a, c, t, g, unknown or other
tagatattatggtaagtttattatatcttatccaagttcaatnnnngtcccttccgatgcatactctatacatccaatataagcttactctatttaatgtactggaaaggatataacacttatccaaggtacaagtaaactacattgtagattatcctatcagttaaaccctgtatactgataaatcataggaatacattttatcacacaatcttgattatttttcactgtgttgacaacacaataaanaagaatatcaatgtgataatgatttagatatttataaatcaaataaataaataaatgatcacatgaaccaaataacacattaaatcaataatgaaaataaatctgttttttattgataaatgaatataaaagattacattgaaatacagttttattcatgacacaaaagccaacaggtactgcattgatggatatgatttacattgttaaaataataacgagtatcttcaataaaatgctaagtaggtagtgtattgttattttttagtattccttaataaaaacttctacgatgatgggctataaagttgtgacaaatttgacatatgttaaaaattgggtcaaatttgacacaaaatatctcattgtgtcaaatttagcacacaataaatatcacttttttaattacattgttaccattaattttaaatattttaatacaaacattttatttataatattgccattaataatgttttaaatatttaatttattatattttatttgtttagactaatttacctttcataatgttattacatatattgttaaatataaggctaattaggatttttgctccctgaactttgannnnnnnnnnnnnnnncccctgaacttttaaggccattgaaaa

SEQ ID NO: 105104 - DNA, 523 bp, Cannabis sativa
tacaccatacaatatatgaatccaacatacaatatatacaagtacaaacaaccataatctatatatcaattcacaaactcatattgtatccataccacacattctcagtaccatatacatattcataataacaaatcacaaatcatattccaatacataaagaatttagatttatgcagataaatacatacaaaactatctaatttccttacctcaaatcccgctgcttaagacttgttatctcgtcactattacctataataagacatgggtgaaggccctaacattaaaattcgcactcttacagtacatcagaaagaacactgtttttgaccaaaaactatacgaattcagtaaaagtttccttcatagaaattataggaaattcaattatttttgcaatgatataaagatcattagtaatggattaaaactgagggagttatgattattttactgaaactatttctgagaaagaatatggagtaacaaattacatgacttagccaaaatacaaactttt

SEQ ID NO: 105105 - DNA, 703 bp, Cannabis sativa
agagaattattacaagacggatgtcttggatttctggcagtggtattgaataccacacgacctgagtcaattcggccagaggacatcagggtggttcaggaatttctaaatatttttcctgatgaacttttgggtttaccaccacagagggaaattgattttgttatcgatttagcaccaagagcagaactagtttctaaggcacagtacagaatggctccggcgaagcttaaagaattgaagattcagctttagaggttgcttgacctaagattttcatgacccagtgtgtcaccctggggagctcccgttttatttgttaagaagaaagacaggtccctacgcatgtgcattaactatcgggaactaaataaactgactatcaagaacaaatatccgttacctatgatcgatgacttatttgatcagcttcaggggaagatggtcttctcaaagattgatctctaatcgggctatcatcagttgagaatctgagaggaagacattccaaagactgttttctgcactaggtatggacactatgaattcctagttatgtcttttggactaaccaacgctccaacagcttttatggatctaatggatagggttggtcagatcaggcattgagtttgtggtagacaaactccataaattgacaatctgatctattagacaaaattaaagccactcagttaactaa

SEQ ID NO: 105106 - DNA, 809 bp, Cannabis sativa
tatctctaaatatataattcttagataatagtatagtcttagcttagctgcttttcgacggatcctctgcccagtgaatatacatcactatttatagtgctaggcagcttgaggaggaagattttcctctctcgttacaatgcgcataaacagaaagatcgtgggatcaatgttgaatgcaaggatcgtgggattgaggctgaatacaatgatagtgggatcgtgtgtatgccatatccacgtaaattgatccttgagttataggaattaagctgataactcatgatgcgaaagctaaattcgctaagtgttgattgccctacgcggatcgctgaatatcttgctctaggcatgccagcgaggcatcctgcttggcctgtcttcccgagcatatgttccaagtggactccacatgtcaccattcttgtgacgccacgtcagagtgcaaaatttgggataacaatacaattatactatttagtttacaaaaatctaattcacttaataccaaatacaatgtcattaatatattagtataaaattattctcaacatactcaaaatatcattttattacataatatatttacacatatataatatcaagttcaatatagaattaaaaacaaactatttttttttttaaaaaaaaaaattacgatctattaataatttcatttactttattactcttcattttaaattttattttgatattcactaaaaaaaatagtatttttttacattcgggaaaaggaattcaaattttgaatctcctctttgtcaaaaaaaaaaaatatataaaaccat

SEQ ID NO: 105107 - DNA, 801 bp, Cannabis sativa
gggcggaccacgcccaaaggtttgaataaaattatcaagtacttaggtcagatgaccacctttgaaagtacgatttttattttctgcgattggttttatttatgctaaactaaagatcagattagatcaacataatagcttcgatgtaagttactacggtaacagacatattttcgaccaataaatgaataaagatgcttatttcaattcaaaatgagtcgagttcattagcatgttataaatttatcattaaatgtgtagaaaaggcttggtcgtacccaaaaccccgaacagacaaaaaccatacttgtgaaaacaagtgaccaagagtcaaaagtctgctcggtcacttgggggggcacctatacctgtacaaaacatgtgataaagaacaaaacaaataaagtttcacaatgattataaacaagggatgaaattcattaagaataacaaaagcattcaaacccgggattaaaggctacccggtaagccagttgttaacaaaatgaaaaatattccaagtttaaagaccgcttggcctgtcactttatctcaaaagaaggcctattggccaaacagacatataaaaaaaaggaatataaaaggaaagccattaaacagcaggagccctaggctctttgtatgggtcgactggaactaaaggagctggagggtcagctaggtttgaagaggccggaggatcattagtttgggtagcaggaacctcgacattctgctcagtcgaaaaggtggaagtagtcacctcaaaattttcattggatgcctgagccatgcagtagt

SEQ ID NO: 105108 - DNA, 913 bp, Cannabis sativa
tctattattcctgtctattttcctgtctaaccaattaaaaaggtccacgacatttaatgaattaacagcattacatagctcctaacttgccgttagcactatttataactttccgtttattattttaacaattatcttctttcaataattttttttttcattttgaaatacatatattaatttaagatagttcgacttgccatactttattaatttttttaattcttcgtttttctacttataaatatatgtacagactatagtatacataatgaacaataatattataattatataatctttcttataaaaaaaataaagtatatctgtaaagcagtttttgcagttttttttttgttatttttgtgtttttgtgaaattattccttaaaatataaagcggttcttttttattttacattttaaagcaactgttttatatttttacgaaaattcacgtagtaattcatataataatttacggagcaacttatatcgcaatgaaaatccacatatcaacccacataaaaactactgaagcaacccaaactaaaaattaaaaaaaaaatagtatatggagtagtttcttaaatatatatatatatatatacagtagaacctctatatagaatatttaagaataacctttaatttattataaaaaaattaagtctcgatacgggtaagtaataaataaaaataacctctaaattataattaattagggataattgcaccaaaagtcttcaaaattgatacagattagtccccaaccttaaaaatcgacagtgtaaacctgtaaaaatataaaaaaaaatcattaaatataaaaatataattttttttataagaaaaatagtaccttatgtaattatctttttaaaaattatataaaattaacttttttgatgaat

SEQ ID NO: 105109 - DNA, 539 bp, Cannabis sativa
tggttttgttagtttccctctttcattttttttctgttcagtttttcatttcatttcaaaagttttcaaacctgttgagcgaatataagggttagggtttcgtcttcaataatattgtttccttttagctgtaatggcgatccttcgatcgtctagttctccttctctgttgcctttatctgattgtggtgcaactgaaaaagatttgtcaatgtgtgtccctggtggttcgaagccctcgagttcaggaaagagtaagggttttgctgcaaagaaaaaacgagataaggagaagatagtcgagaaaggaaaggcatctgaagatgatcgtgttgtgaaaagagttaggaaatgtgctgctctggattctgattctaaagatgagttacatggatatcttcaatggagcaaaggttatttttctttcattttaacttttttttgtttttcattttttagttttttttttaactatatgttgcatgttttggagttgttctttatatcgtttttttttttcttttttgttgatttttttt

SEQ ID NO: 105110 - DNA, 673 bp, Cannabis sativa
cagtcaagttcggattcaaagcattcaacaacgaagctgagtacgaagctctaattgctgggctaagactagcccaggagatgaaggtcgaacacatcgatatgtgcattgattcacaactggtggtaaatcatgtatccggagaatacgaagctcggggagaaaatatgatagcatatctgagcaaaatacatgatctgctcggacaatttaaaagctatggtctcagacaaattccgagagaaaaaaatacaactggagacgcgttagctcgattggcaagcagcaatgtaagtgacaaggaaaatttggttcctatccagttcctcgaagagcctagcatcactagcacgaaagaaatcaaaatgattgatacatccccaaactggatgacaccaatagcggcctacctcgagtttgggaaactcccaaataaccgaaatgaagctcggaaaatgagaaggaaagttggacggtatatcatggtagagggagtcatgtaaagaagaggattctcgataccattaatcagatgtgtcaatcaaaaagaagttgaacgaatcctatccgaagtacacgacgaattctgtggaaatcatgccgccgaacaaagcttatccgagaaaattctaaggcaaggttacttctcgccgacaatgattgaagattcaaa

SEQ ID NO: 105111 - DNA, 1019 bp, Cannabis sativa
  modified_base (56)..(71): a, c, t, g, unknown or other
gctgcttcttggattgatgactgagcctacataccaacacgagtgtttccagcgtnnnnnnnnnnnnnnnncacgcttcctgggaaaacttccgaggaggtgacccattttgaaattgccccaggttaagtacgcttaattgtggagttctctcgtgatgggctaccgaaaaataagatgcaccttgttgatataggtagtaccaatcaatctatttaagccttcttcaactgtgtagtccaatacctacacagtctcagaatcatcacacttaaccttcctcaaacaattgtaacagtcagtagtcccgtgatccgtaagaggaaataccgggtaagctgtgaaatccctcacagcctgggggacccacttcgagtaagttttagcttaaattcgtaactcccttgaggacgaaatttggacttgatacctttagaattgcgattagggtatgagacatgacttgatagagcattaaaatagcttcaaaacgcaagttaaatcgcattaataaaatcaatattgagtgaattatgactgttttactaaatgttgctctaataccagggcccagattgacatcacctgacatatgatggcaacttggacgttgggccaagggaaaaacgtgttgaggatgtatttttttaaggcttaagtgatattttaacatcgcttagctagttttgtgttttggtgaagccattcaccagttctcaaagatgttactatttcatggaatcaagagactcgaaactacctgattcacgacagtcactctgctggaaaagtgaaaatatgaagttgtgaatttagcttgtctgagttcatagctctcgtttactatgaaaaactagatgaacgcttgagaaataattgtaatcggataagcaaaacccaatggcataggtcatacgtcaacttgggcgctcggtgctctttttggagcttccagtatgtccttttgatacgtctagggttcttgaaattgagggcgagatctcctaccctgtttttga

SEQ ID NO: 105112 - DNA, 1049 bp, Cannabis sativa
  modified_base (269)..(272): a, c, t, g, unknown or other
acatttaatgttctatttaaagggattcaatgggtttagagttaaaactaatggactgattagaaagatccaatggcttagaatggaccctcgtggctgaatcccttatgaaactcatgagttagaattttcctattattttgcttccttaatgaaacaaacttatctttcttcaataatgctatttttttggctcaagttatttaaatactaattctatctatttaataattataattaattatcaaataaaattactatttaaatannnntattaattagaccttctaatgtcttttaattaataaataattaaaccttgaattctctttcttctcaattgtatcattccttggtaaaattcacatataagacatagtctttatatagaatcctaatttattaattttaactaattaattgagactataaaataatattatcccagttatgcggggaccatgagcctatgtaaccaagctcccaataagtatatccaaaatttatcaagtaaattttctaacttattatttcctcctgactccactatagattcagaattgcacacttgattacatgaacactatataccaaaaatagatacactttgaagtacccactgtttcaatcaaagattctctatagatgatctacatcgagtagggataaatttacttttttaccattcaatgtactttatccttaaaacacttagctacctgtaaatgatattttagtaaactaatataattactgaaatgattgctcaatcatttatcgcattaagccaagctcaatgaaaatcatcatttcgcttctaatatttattgaagctatagattctatatctatgattagtgctccaactcaattgcactaccatgttcccaagatataagtattgggccaatccatttggtcggctttaacgaacaattcatagagcacaaataatacacttaagccaaaaccttaccatcttaggattgagatctattaacctaagattaactaagtaatattgacttagaaagatatagatcggaaga

SEQ ID NO: 105113 - DNA, 560 bp, Cannabis sativa
aacaaagaataacagagattgggatcctgttgtaatggttttgtgaacagttgggaagttgatccccttgtgatcaacatttgatatttgtgtttgtttatgaatcacaacaattggtatttttttattttttaattagttaaatgtagtcaattggaccggactcatctattagtgtgcttctattgacctaatactaaagatggtactaagcactaatagtactttttagcaattctcttttttttacttttgtggtcatttatactaattggtactcataatatttaacattattttaaaatataatattgttattagtataattaaatatcagtctaccaataaatatagtgcaatgtgataacactcttttgagggtacgtcacattttttttatttatgaaattcttttgtttttatttatttatataaaaaacagagtacaatataatctcttcaaatcttctatctctatttatttataattttctttttcaacttttaagaaaataaattcgaaaaaaacgtacattgttttttttattaaataaataaaa

SEQ ID NO: 105114 - DNA, 558 bp, Cannabis sativa
ccaactagtataataaatggccccaaaatatgttactattagagctatatcgaaatttttataaatcgttaaaattaataatccgctcaaatcaaatcgaaataactcaaaaaaaaaaaaaataaaccaaaaaattcaacgaaaatataacacgcttaatttttatattgggcgggttgaaaataatatcaactcgtccaatcaacccgagttaacccgatcaactcgattaagagaatttttacatatatatttatatgttttttttaaaacaatatatgtttttattatatatatttatatgaatatttaaaaaatagggatatttgcggtataaataccatacgttttcagttttatacacttaaatactacatgttttttttttttcgacggattaaataccttaagttacatttctgttacttctgtcactacttttctgttaaatcttattcaaacataggagtatttgtggtataaatacctgatattttagattttatacatttatataccacatgttttttttaccggattaaatacctaaagttacgt

SEQ ID NO: 105115 - DNA, 778 bp, Cannabis sativa
  modified_base (723)..(745): a, c, t, g, unknown or other
tagtacttttacaatataaactttgtactcccaaaatactttcaaaatagagcatcctgattactgggccgatacactgaggctgatatgtacattgctgctacgaactcgaactcatggctgcttaacatttgctttccccttacctgcaccataaagcacccgtgagtcacagagactcaacaagaaaagtgaacaaaacaataactgaaaaatgatcaacaatttaatctcatgtcatcatgtttacacattacataatatcataaacacacaatcatggtactttataaagtacccctttaccactagttaaccacgagctgtatatgtcactatcgttgcccgatgaagcaaatgataagtaagaaacctaaccgtggtttcaagagtaattactcgtaacggtattaacggtttccaaccctaggtcataacctaggctcaacaaatatctaatcaaagtcctgataataatcaaggccataaccatttaaccattaatatttaaccacatacggtggttaccacttttcttaccttagttttgaactcaagtgtacgggccgaattgagtggaaaacaagttaaacgatcccggtgctatgtcacaacaaccaaaactcaattaaaaccttaatcaaatttctaataatcgactctaattctcacaatcgaacacaccctatttttccccagatcaaactgttggaaattattttnnnnnnnnnnnnnnnnnnnnnnnaagtatgttgattaacacactaaatatgaactt

SEQ ID NO: 105116 - DNA, 569 bp, Cannabis sativa
tatttgtatgtggactgtataaatgtttactgggacggcccatagtatttttgtaatttttttttccttttttctatatttctgttttttccctagatatttttatagaaattttattaaaataatagtaaaatattaatttataaatttatgctttaataaaatattaaaaaattgagagaattaaagagaaaaaaaatagatttggagagattttagaccgtcacgtcaccacctcatacctctccttcatatataatgatgttaaattttataaaaatgaggacaacatttgttccctccaagttgaagaaattataattatagaagatgttttactaatttataaatgaaaaaaattaaataatttaaaatgtcaaaataaaatttaaatatttaataatacatgcttttattttctttcttatatgcatacaattaatttcaataaattttattctcaatattataattttttttttaaaacaaaaaaaaaaattattcaaaacagaacaaattacaaacaaactgaaactacaagcaactgctcaaagagccaacagcagcct

SEQ ID NO: 105117 - DNA, 921 bp, Cannabis sativa
  modified_base (528)..(529): a, c, t, g, unknown or other
agaaatctaataacatggattactgggaacatgatgtacaattatggaatactaactttcctaaatgatcaaatgttggttcctagctttaagtgttaattttggaactggaatgttgtgcacaaatttagatgagatcttgaattataattctactagtgaattattggaactaaaagtaaagaagtaattagaaagataaaacggtattttgagcaaaaataattatgaaccaacacatggagggctaatctcactggaattgattatatcaatggacatcgtagttaaactcagtaaatataattctataattactaagagtgtaattccatattcatagtggagttatcaagaaattaataaacaagagattatttggttgatgagactcaatatataatctagtttattgaagcttagaattataggttcatggtccctgaatcgccaccttaaaatactgtcaatggtaggaataaagagttgtataaagagttagagaaaaaaaatctattttgaattggnnaaatagtaattatttatttttaaaataaataaataattttatcaaattaattaaataaggaaaaaacaaaaattattaaaataaaatttatcaagacaagatttgtcaggacaaatgttttcaggataagacaccaaccttgtcctaaatgcacagtggtaggtgcctagctaatgttcatgttcctattggattcgtcctcttggattcattaattcaattaggtaaatatctaatgtaaaaagtagttatagatatttcaaggttgttgagatattctttcataaatatcaataatcgaattcggttatagatatttatttatttaagtaattaaataataatttaattaaagaaattcaactaccataaataggagtctgatttgagaa

SEQ ID NO: 105118 - DNA, 559 bp, Cannabis sativa
tatagtatagatgagtggaaatccagtactttctcacacattctattacaaaccgcctcataatattgctctagctgctttgggagctttctagatggatccggttgcttcccatgggccttctctaatgggctgagattttaaagacttattgggcttaaactaaagccttttactcaaactttactaccatggcccaatacataaaagttcttgtgaaaattatatcaaatatgggtttttaaaattttattacttaaatatggcagttttaagtttgagtaatttgtatggtagtttgagtaatcatattttagtaaatgattctttaaaatctcatatttaaggtaaaagaattagatttttctcttcttcaacctcaaatgctactttctctctctccaatcaactctacgcagactaaaatcgaagttcttcgccgaatctttccctttcttctctttcttcggcgatcgatcgttgcttgctccggcgaccaaatcaatattgcctgcttcggtgactgatcaaatctccacaagcaaccgttactagatcc

SEQ ID NO: 105119 - DNA, 1870 bp, Cannabis sativa
gaatcatcaatgaagccatccgaatccatatcatcataggaaacattttgacttgagttttcacccacaagaaaggaggaagcattttggttacgacatcttttaagaaattgcctcatagagagagtgtcattttgtctcttggtcacgggtgtagatgggtaattttctttattggaagcagttgtaacaatagaagaggtggatactgacggtggagttgcaatgtgaacagcagaggaggaggcagatttaaatggtgatggtgttaaagttggtggataagtggcaatgggaaggaaaggcctagaagcagatccaatatcaggagtaaatattccaggcaaattggtgacagagaggctgtagtcggtttgcatatcagagtgtgttggtgatgttggtggaggaataaatggtgaagaagtaacagtgtgttggtgatgttgcatagcaggtgcaggtcgatgttgggaagtgattgggattggtgggggcttgttagaatgtaggatagtggaaggtggatgcagtgtggagtttagtgtagacagagggatagttgaatgagagtagttggtagtagggtgactaagtggtgtttgggaaatgattggggcagagagcgattctgcagcagtcagatatgggggctgaggggggccaatggtgtgcaaacgggggattgtagatgtgagagtggtacgggcaagacgggttaataatggccaggcatttccctttgaaaaatcggtgcgatacttatcataacccgtggaaggaagtttcgatcccttcatccaaggaccataaggaagatcatcgtcattgccattatccatacgttccatgaatttaatacacttctcaaaaggatgtccgagaatgccacactcaaaacaaaattctagcaagcgctcatatcgaaagtctatccaaaactcatctcgcactttcgggaggcttatcattctgccacgaggaagaggcttgttgatcataagtttcacccgaattcgaagaaaaggtccccaaccttcatcaagagagtcctcatggacatctacatattcaccaattaaatttcctaaagctttggcaagggccttggacttacttaaaaagggaaggcgatatacttgcacccagaatggcgtagacaacaaatcagtgattgagacattttgcagagcacttggagtgtgcatcactatgagatgattttgaaagtgccaaggttctttattcataacccgaaacttatcccctgcacaaccaaaagaaaccttgaacatatcttcaccataggcaaaaatcacagcagggaaccggcctttccaaagtccagacatttgatcaatgaaagatcggttatgatcatatgaatcagtgagaacccgagaaatgagcatgtggctagagtgagaagtatgagacgcagcaacctcttcagggaggtgaaaactgatccttcctcttcagttaaagataaagtattgtgagtttcattcatgagtggatccattgtacaactaagatacaaagggagaagcagggatcacgaaaatagggacaagaactggggagtgaggtgtagtatgaggaggaaagcaatgaacatgaacccaggaggcagttagattgatcagggaacgagggagggaaaaagaatttgaaaaataggtagttaaaaaccaaaaagttagttaaaatgcataactgctacagacccctaaatgggcactttattttcatcacccccttatattatctattacacacctaaggtcaaattacttaaaatagaatattttataataaatttaatatctgaccttagatttaaaattaagataaaataatcaaattt

SEQ ID NO: 105120 - DNA, 1048 bp, Cannabis sativa
agttgcagtagcttcaacccatttcgaaacataatccacaaccaataaaatgtacaaattcctaaacgaagatggaaaaggacccattaaatctattccctagacatcaaacaacaccacctccaagatacctgtcaaaggcatttcgtttcttctagaattgttccttgttctctgacaacgatcgcatgccttcacaaagtcattagcatctttgaaaagagtcggccaaaagaatccactttgaagaaccttcgcagcagttcttgtgccactgaatgccgcccacattgtaaggcatgacattgattcaagatagaatacatctcttcttcaggcacacatgtccttattatctgatcggcgcagtgcttgtaaagaattggctcttcccagtagtaatgtttttcctctgaaaagaactttttcaattgttgacgagacatctacgaagaagttacatttgcagccaagaaattgacataatcagcaaaccagggtaccatcaagctttcccttaaactaaagagttgttcattaggaaactcatcatttattttcacttcttttgcattttggctgtcttctatctcgagtcttgaaagatgataaacaactagattcttggtccccttcttatcctttatttcaatgtcaaattcttgaagcagaagcacccaccgaatcaacctttattttgcatccttcttggtcataaggtacttgattgctgagtgatccgtataaactatcaccttattcccaatcagatatggccgaaatttatcacaagcaaacacaatggccaacatctctttctgcatggtggcattgttcagttgagcatcatttaaggctttactagcatagtagatggtgtgaaacaccctgtcaactcgttggcccaagactgctccaatgtgtagtcacttgcatcacacatcaactcgaatggtactcccaatttggtgaagtgactataggcgctgatatcaatttctctttaagaacttggaaagattttaaacatgcttccccaaactcaaaa

SEQ ID NO: 105121 - DNA, 925 bp, Cannabis sativa
aaatatcattatactaaagcatatatttttttttcactatttccatattaaagaaaccattaaattacttatgatactaattatatactaattagttactgtcatgagcaatttagatatttataaattttactaataagttatttgaatttttttttactttattataacttatgggtttcttaaatagatttgaaggaaacataaatattattacaaaaaaaattatgtaatataattaaaaaaataaatacatagttttcaaaataacaaaaagatatgcaaaataataaatataaagaaatggtatttgttatattaaataacaacttattagttttgaaaatatattttaagattactcaaatttattttaaatgatattttaatataactttaaaacaactaaacgattattaatcattaagatgtatattttggaagtagctaaaaatgtattttaattatttgatataaaaataaaaatttgagtaaaagtaactatgatttcttatcaatatcatatataattaaaaagttattttttgaaaacagagaacttttaaaaaaaaaatgaaaaatttgagattaattttatttcaagtatattagtatggaataaaaatatttttaataatgtgataagacattattataattaatatttattaaagtatttttgtaattattttatattttaagtatattattaaagaaattcctactttttttattgaaaatgttgttgccaggaatatggggttcgagtaattagaacacgtgtaaagcaacaattggtgagatttgtaggtgaaagatttgtcaatatttggcaaatgattgaatcttattcaattgatttttatttgtcttttttaaaatatatttagtaatacatttaacaaagtaaaattctcaactcaaa

SEQ ID NO: 105122 - DNA, 697 bp, Cannabis sativa
  modified_base (363)..(372): a, c, t, g, unknown or other
ccctcctcaagggtagttataatactaagggaataacattccaaggctaaagactcaaaacaaacaaggtaatgtttcacattaccattcccttgttagcaataacccattccaaacacccccattttatacccgtatataataatgatgaggatgtttcagaaaatataatacttgtgaaatttggtattattttggagtttccattccttataattttggtcatgaatccatcaaagagaacaggaatcattgtatgacttttcttcctcctttttgttggaattattttaccaggatttaaatttactaccgattgtttaatatcctaatatgagtttctaaaacaatgtaaataaacannnnnnnnnnttaagaaatcttacattgattgcagtagaatataatgaattattccgttcagatttttagccgttaattcttttctataacaaagcattatcaagatctgaaccagaatctcttttttttttttttttgttaattggattcttcagagtcttacatactatgattaaggaccaacttgatgtgtgtaaacacttactcactatattaaaattttatgcatatggcttttatacatattaaataaggcaaattatgtaattcctcaattactttttgagggatgaaacacttcaaataagacaaaataataataggttccttttat

SEQ ID NO: 105123 - DNA, 1396 bp, Cannabis sativa
  modified_base (1323)..(1323): a, c, t, g, unknown or other
agagccatttggccatgtcagtgctcacaattggtataagtcagcatatactgccttcagtaaaacagtcataactctctcaatttttatccaaattacatggttcaacttgcattagaaagataattttaagatggatctaagtgaatctcacagacatggctcaattatgaagttataaggtccaaaattggctcactatatagattgatacattttactcaagaatcggataatgtggttaagtgagggttgttggaggacactgtcacagcccatgtggcattgtatgcgagcattgacactccaaaacacatgttttcagtacttatcaccaatatcatgcatctctagctgagaggttatatcccatcattctatttcaaattggtgcatcataaaccgaaaataacaactttcccaatgtttgtgagatttttgcctaaaaataatgagatttttatagatatttattttcttgtaatatttttattcaataacaagagtggtatacaggatttgttagtgagataccccgacatgtgggggatcactaacaaactctacaaccaatataaggataagtcaaaggttgagatgaggacttttagactcttcttcttcttttttggatcttcttcttcgaaaccttctctttgaaacttacttgacggcagccaagaacatcacacttattctatcatcttttctattgagtccaccatactcagtcgacaccagacctcaaaacaccattgatacacacctttctttatactttattggtttattgttcccaagaactttacaaccactaatttagatcagatttatgaatatcaagtctcccctgagtcttatattcatgaatcttaattatgatttcacctagaaatcctttgttgtatttttatccacacactattgagaatataactctggtatgtcggatctaatcaataaaactaaaagtagacgtagcctcattaccatcgcgacacgggagtgaactactataaatccctagtgtctatttaatttattgcgattttattagtcaaattaattcaccgtggtcctcttttattttacggtcttcttaaataagctgacaaaaaatcgcattaacagtgtaatttgtaaaaatatttttaaatattatcatgcggttatatatcttacaaaacataaaaaaaaactcaaactattttattaaaattattattgattccaataaaacttaaaaaaaatgataggaaaaaaggatacgaagatttaaaaaaaaaataacaataatgaatttcttcttcttcttcttcttcntcttcttcttcttcttctttttggaattattacatagaaaatataaattgacattttatttacaaaaatacct

SEQ ID NO: 105124 - DNA, 581 bp, Cannabis sativa
gagccaaaagataacattcaaatgagcctcgaagaactctttaagaaccgtggtcgttacaagacatgcatcaacgaccccagaagaaaaatgggcccaactcactattgaaattactagaaccaagcttctgtcgagacatctccagaaacaataattaaagacatgatttaagacctgatcattttgacctagtaaaagcgggaaaatcacatctatacaattttcaaatcataaaccacatttacactgcgtgatatgtaattaaatcccatgattttagggatatgattgttgtaaacatattacagtcaactttgtaatttattgaccactatgtaattataaaaagtggcagacaagatcaaaaaagggatgaaaaaactcatacaagataggccctaaaaaacaatcagaaatctgaataagattgacttgtggactacacagaattataactacaaaaccacgtcaaaaaaactttgtgttcatattttcatttttatagcttttattttttctgtgtgaaaccactactgtgaggctcaaatttagtcaacgaaaatctgcgttaacagttt

SEQ ID NO: 105125 - DNA, 672 bp, Cannabis sativa
atctcaaccagtaagtatgaatgacttacgtccgattgctttatgtaatgttatctacaagattgtttctaaagtgttggcgaatagactcaaaggggttctttcaaatgttatttcagagacccaaagtacttttttaccggggcgtctaatcacggataacatattcgtttcgtatgagataatgcattatcttaaacggaagcaaaaaggaaaaaagggcttcatggctattaaattagatatgagaagcgtatgacagagtggaatggggctttttagaagctgtgttgagaaagttggggttccaggagcaggtgattcggttgattatgaaatgtgttggcacagttagttataactttatggtagggggcaagaagttgggccgattgttcctagtagaggattaagacaaggtgatcctctatcaccttatctttttattctttgcactgaaggattttctgctctgttaagagactttgggaagagaggtaggcttcatggttgtaaggttgcgagaggggctcctatggtttcccacatgcttttcgcggatgatagttatatctattgtcaggcttcagaggaaggcattttgagtatgatggaattgttggattgtttccaaattgcttcgggtcaacaagtgaatcttcagaagtcttc

SEQ ID NO: 105126 - DNA, 2391 bp, Cannabis sativa
aattatatagtgttgtaagttcaagagacaaaatattaattatttcttaaaatagttatacttaaatagttttaggagccactcacgtgcgaagcacgtgctatctcactagtaaatttaaaaagttggttgccttgcttggcctattgtggaaatttattttaataagatttgtattagaagagagaaagtagagaaaaaggaagatgattctattattaaatgtaaattgaatgaattacaattgagggaagagtagtgctttataggcaattgaaataaagaattaagaaaagagaactagttctaagctaactgaaatacctaacaaaactaacaactaatttagtaatctaatagactcttaaatacaatatcattaaagtgtagaagttttgatggaatgtagaaatttttaacacccatcttaaatacaatatcattaaagtgattggagaaaagacgttttgttaggatgtctgcaaggttggtttttaaaagaacatggttcattttgatgttgctattgttgacattctcttgaacaatgtgacaatttaattttacatgtttggttcgttcatattagataggattttcagttatgtgtattgttgctatgttgtcacagaataaaagtgaagacatgttgatgtgaatgttgaaatcattgaagattgagtggggccatgatagttcacatgttgcgtttgtcatggccatatattctacttcagttgaagattgagaaaaaaataagtcgtttcttagacttccataagatgagagaacttactcactgttcgacttgaaggttgaagaaggaatccccaaaggaacaatccatacaacgcttgatcgaagaagaaaaatcaagaacttggaaattctctctctttttgagctctgaaatttcaaagatgaaaaagttccaaataatttttcttttgatgaagtatttataggaaagatgggggtgtgggaaaaatttttggggactaaattttaaatggttagttttttctcccaaaaaatccaaaagtctcattttgcattaaaaaccacttgggaaaatgtgtaactatcagacacgatctctaaaagtgcagttttcaagggaagtaatcatagaaaaatatttgaaaagataaggagaaaatttactttgggtaggtaagatgcccagtctaggcgaaccatctgagtaaagccatgcgttacctaatcgtgcaaaaagagaagccaaaaagtcccttcacggacttgggggtaaaagttattccaataatgatgtgacacatggcaagtatagaagaggttggacggacgtgagacctttgaaaagattccccaaaagatgttggtcgacagtatagactagataaagtcgtccaacattaggcatgtactggacagagtatatcaaccagtactccgagcaatcaaaaaggctcaccatataaaggacatccgaccaacgagttcgtggaaggtaatttccatcttcatctcaataatttatttccttaagaataggtcaatcaacataccaacaattgagggattgtgagaataaggggaattagaggattttgtggtattgactcattcaaatattaaatgctttattatgtaattaaatgtaaagatactacattatttttcctatagatagtggatcatattcattatttagggatcgaaatttgtattctcaagaaagctattatgctgccaaattacttgtaatattcatagatagtaagaaactcacttgaccaggttcatgtgatcttgatgtttccaaaagaaatacaactaaaagtggagtaggtccttaccgatttaggggctgaacctctataatcctcatgtgttgtttatagttcttgttatattttgtatttaaacacgtacaatcgccattttttgactccgcttcattaaccaaaaataaggtcaacaatgcttatggaagatttgaatggcacactagaagaccatgagagcatcaactactcttgtcagggtaactcgacgagatactcctttgacctcagaagagtggtaaaccatacaggagttattgaccttggatgccagggaagaaagtttacatagttccaaaaatcaagctatttggtatgaattcactcaaaagagcaaggcttgacagggcattggaaaccattgagtggagacttttgtttcccagtgcgatcatccatcactagacatcagttgtcttggatcaaacaccaatattgtttgacacaaaaggggacactaattgtaaaatggctcaattcaagtatgagttaaagtggggtcaggacccaaaatgtttttgggttgtacgtcaggcttggttgacaaatctccactccaatc

SEQ ID NO: 105127 - DNA, 557 bp, Cannabis sativa
ttttgggtttccaagaaaagtaggagtccctactatcaaagaagacaatacttaattgtaatagtaggcacggtctcgaagctctcctctctaatatagtgtattagagcatttccaatgagacattaaatttggtattacactatcacaaaatttggtgtcaaaaaatatttccactccaaccacaacacttaaaatttacaccaaaaaatatattttattattatattaataaaatataagatattataatattaaacaatatatataaataaaaattagctattaaatattattaataataaaaaaaaaatgcagttgctactactgcatatatgcagtgcactgtagcaaagacagcataaatcaccttaaaatagtgctaccttggagaagataaacctctatatcctcaaatttgagggctccttggagttgctcttagtgtggagttttttttttcttggaaaaagacattaataaagtaaacctttttatatacaaaattaattaattaattaattttctttagtataaatgcatacggatagagactc

SEQ ID NO: 105128 - DNA, 1032 bp, Cannabis sativa
actcatcaaaataggggtgcttaagagttaagtgtatcaccattttgatctttcaagttagattgaattcgaattcgaatatgaatgttattatgttatgttgttgatgttgtttcactttggaatagctcagacatgaatcatgaatactttacttgaaaaagagtttgcctttaattatggtttaatgaactttttcaagtgttttggaatatgattattatagtgcaatttattgggtttcatttctattttgttgtttgtatagagttatacttgaatatgtatgtctctacttttattgaggaaaaaaaggaaaaaataggactagattttttaaaattctgttgttcaaacaagtctcataataacaatgctgatattttagtaaaaataagaactgtacttggttcgaattcaattgagtctactctgcgagggaacaagcactaatgggtcttttttctttattgtttttgagaatgtggttacaaataactaagattatacaagaatttcttaagattcagttcataacagtatatcaaaacctctcaactctctgagaaaacccgaaactcacatggagaaacatgcaaactctcgaagacaaactcacatggagaaacactagactttttttgagaggctcacatagagaaacactcaactcatatggtgatcacaaagtattgaaaacacttaaaatattgctttttctctcatttattcacactatctcattccctcatctcatattcttttctttgtcttaagttaaaatgacttgagttggcctatatataaaagtttcttctcaactaactttaactaaacattttttttatatatatattttgatagccactaatataagtagcttcaatcacacccaacatttagtttggcaaaaattaatttaaagatttttcattaatatcaacaaactttgataatttctacaaatattttatattagacaaaatagtggtgggagttgaaaacttaccatttatctaaactatatataat

SEQ ID NO: 105129 - DNA, 883 bp, Cannabis sativa
tttttttttttaggattttcctatactgttaagattttgttcttgtggttgtgcatggtggccgaattttggtcggtattgggggccggatttcggtaataagataaaaatttaaactttaatagtatatatatgtatgtattttatattttattgaatgtgtattatatgtatacatattttgtaattatatatattgtatgtatatgtatgtatacaaatattgtaattatattgtatattttttatgtatagtatatgtgtatattgaatattttgaacaaatattttgttaaatattgtgaatgagaataacataagagagtattaaaataaaaagtttagaaattaatttctaaaaattagtttagcaattaattctattttttttattatttttttttcgatttttaattttattcatgtgttttttttagtagctagtaaatagttagttacaactacttaacaagttaccaattttcattcttattaatgtatttttattactaactagttagtaatgaattaattacttagtaactagttactcattaattatataactaataagtagttaaaataaagaatattttaattttgtagtactttttacattgtaggttgtgaggtcaatttgtaaggatccggtttatttggtattgattagtttctagctagctcaaggtacacatttactaggaaagattcttcagtggagttgctttcgataattccatttcgaaataaataatgcaacaaactaattgatggagttgtccaaaataaattaaactattttttttatatatatatatatatataacacttcttaatagtattctattaacgaataataaaaaaaattaaatttttatgttta

SEQ ID NO: 105130 - DNA, 558 bp, Cannabis sativa
taagtgatgggcacccaaattttgtttctccataagaggtcaaatttttatggggacatattttatgaatgtgtgtaggcgtttttattttattttttcaaatatctatgactaaaaagaatgtgttgatgcactttttatttattttggtattttaaaaaaaaattaatttttttttttatcatattcatgtttgttataattatttaaaatattcaataaaattttaaaaatttcagaataatttacaatatagaaagcagtgtttaaaaaatttatttcacatgcgtataaaataaaatagtcacacgtgcaacacactgtttgaattctatttcaatatgttaaatttttctaaattttttaaaattttgcaagatgtgttaaataactataacatacatgatcatgagaaataatttgattaaaattatttcgaataccaaattagataagattaaatcagtacatatttttttaagtgactacattgtagaattttttaaatataataaataaataaataaaataaagcaaagggtggtgatggtggaccct

SEQ ID NO: 105131 - DNA, 1107 bp, Cannabis sativa
ttctgaacacaaaccctagtcttaaacagcaacatcccactatctgacactgtaaatctttgatttgaccagctgaaaccttttcactgatcttcactaattctggatcagttaactgagcagctttaattcgttctaacagatcagattgtagcgtcaagttatttacctacaacaaactcgatgcttgatctgaccatgtcctccgctaactcaggtgaaatcttaatcatactagttacctacccgggacctttcctgctcagggcatcaaccactacattggcctttccaggatggtaaaggatttcacagccataatccttaaccaactctaaccaacgcctctgtctcatattcaaatatttatgagtaaggaaatatatggggctcttatggtcagtataaatttcacatctctctccgtagagataatgctgccaaatcttcaattcaaacactactgcggcaagttctacatcatgagttgggtatcgctgttcatattctttcaactgacaggaggcataagcgatgacccgatcaacctacatcagtacacaccccagatcaacaataaactacaaacttttctttattagaaggtagggctaacactagagctgtgattaatccctattttagctcctaaaaacttgcttcacacttatccgtccacgcaaaacgctgattctttttagtaagctcagttaagggtgttgaaattttagagaacttttctacgaaccgatggtactaaccagtcagacccaagaaacttctaacctctacaactgtttttggtctcagccaatccctgacggattctatcttccctggatccattttaatcccctctttacagacaatgtgtccaagaaaagacatctaagattgctaaaactcgcacttttaaatttggcatacaacttgtgttctcgaagtcactgtagaaccatccaaagatgttactcatgctcctcttctgattgagagtacacatggatgttgtcgataaatagtataacacacatatcgaggaaatccttgaataccctattcataagatccataaaagatgcaagagcattggttagtccaaaagac

SEQ ID NO: 105132 - DNA, 769 bp, Cannabis sativa
ttgcgctcatcaattcaacatctctccaagcttgagggcgtcgatgacaaagacccatttgtgggcatatgccactctctatgggtggaagctgctctttgacgagtacttttcaaaaagtcaagccgacgactttaaatcaagcgcttcttggggggaacccaagctttctaaattttgtctttattttgttttaaattcaataaatatgcaatgttaaatggttttgacaattgcattgtagttttttttctctcactttcttttttttttctctcttgtaggtgcaagcataaagtcaaatggaattggacgcacttatggaggttgacactagcaagtttgcacatcattgactaggggagttcttaaactcttctttatttatttttaaagttgctcacacatatttgagaattttgtgcttaaacatgttttgggaaactaaatatattctttttcttttactttgcttgtttgaaaaaaaaaaaattaggcatatgtgctttggtttggtgatttttcacattcttacacatgattgatattgtgcatagcttgttgaaaaatgtaaatattatttgagcttgtgactaattcttgtgctagtttcattttgattgagatatgtccaattttgagcatgaatgccttgatcatttaattgtgtgtgatttggtgaaaatttgtgtaaatatgtgatttttctgatctcacaagtcttaaaatttgtttgattctctcttgaggcgaaatcctagactacact

SEQ ID NO: 105133 - DNA, 550 bp, Cannabis sativa
tatatatataaaataaagtatacttagtattttttggttagcagtgattgaaagctatttaatttgatctttacgtgtaattaaccagaactcatcatttcaaaaaaaaaaattggttaaaattgacaattttttttttttaaatttttaatttgaatacttatttttttattaattaagggtacatttagtaacacttttttaatcagattttttatttttaaaattagaaaaataaaaatattttccaaaataatattctataaaactgtttttactttttaattttttagttgagaattaaaattttgaaaattttaaaaacaaaaagtcactttcaaaattttattaaacaattttttttttctaaattatatatatatatatcaatattttagactcccaccccaacctagaccttgaaacttgtatttggaccccaacccgacccggacccgacttaaataaaatcaataaatgaaaatgaaatttacaaaacacacttttgttttttatttttaaaattgaaaaataaaagtggttataaaac

SEQ ID NO: 105134 - DNA, 641 bp, Cannabis sativa
cactatattaaattttttaaaaaaaataatatttaatttgatttaatacaaatttttattaaaaatttaaataggtataatttttatttaagttacaaatatattaataatgttatattattattattagttataaatattaaatttagctagtaaaataatagttattaatgtatttttgataatataacaataataacaagatataaagattgttaattttatatattcatttatttttctaaaacttaatttgtaataaaaaattttacagagaagcatttacaaaacccaaaaaatacattaagaaaaattgaactaaaacattcaatttaatcacataataaactactgaacaattaatacaatcatcaaatcagaatagttcaaacttataaaaaaattcagataaatgtttcacatttcctatgcccgtcgaacactaaaccccatcccacttaaatcacgaactcagcatcccgtcagccaccaagacttcgaacacagacgggcaagatctgctcgagcttcaagcctttgaacacagccacctgcataagagagagagagagacagagaaacacaaataaagaaaagggaaaaataaaaagccatacactagcacccacgactaggggagg

SEQ ID NO: 105135 - DNA, 680 bp, Cannabis sativa
ttatcaataggttctcgataagagtgagaattttagacaggttattgttgttgttatgttggttattgttgcttgattatcgacatattgtagacaggttctcgataggagtgaaaattagttttttagttatcatgtttggtgattgtctactgattatcgatgggttctcaacaggttctcgataggattaagtattgcattttttgtttcacatttgcattttatttctattattattgtattgtttaacttttgttgatatcattgataagttgtgttttttttccctttgttgtgttatgtctatttgttgataggtttttgattggttatcaatatgtttttgataggattctaacatttttttttctttcttcaacactaattgattgttatgagagggttatttccttgcctagatgaagaagcgtatgtctaacaatctcatacaatgatgttgagatagtaattgagatgggtgtcaatgagacgcatcatgaatatgacgcccatgaccctactatttttgaaagccagccttaaaagtagtagaacaaattaaaataacagcgtccttgtattagaaaatattttgtataattttacacaattagagacaattagtgcaacttttccttgttatcaaagttaaattttaaaaattgtaataacaaaat

SEQ ID NO: 105136 - DNA, 1079 bp, Cannabis sativa
acaaaattatggaaaccactaaaaggtctacagatattttttcctggactcacggagacatgaccggcataagtccacacataattacccatgttttgaatgtcaacaaagatatgccagttgtgcagcaaaaaagacgtcctctcgaccccgtcaaatatgaagctttgagaggtggacaaaatgttgtccaacatttaaattgtagatatccattacccggagttgttggctaatctcgtactggtacctaagccaaataggacgtggcaagtgtggatagatttcaaagatctaaacaaagcttgccccaaggactacttgtcgctcccaagagtcgatcaaatggtagacgctacgtctagctatgagttattgtctttcatggatgcctactcaggctacaaccaaataaagatgcatgtagctgataaggaatgcactagcttccagaccgacaaaggagtatactgttacctagtcatgccctttaggctcaaaaatgcgagagctacctaccaacgattattcaattggatgtttaagaacttgctgggaaggaacatggaagtttacgtggatgatatgttggtcaaatccaaaataagtaagaaccatccagatgatctttgaaagtgttttggggtaataagagagtacgagatgaagttcaaccccaagaagtgtacttttacagtaaagaggaaaattcttgggattcatattaagccaacaagggatagagcctaaccctgaaaaaatacaagccttgctcgaaatgccatatctaaagaaacacaaggatgtgcaaatcttgatagggaagatagcagccctaagtcacttcatctctcgttccactgacaaatgtatcacattcttcaacatattacagaaaagtcaaaaatttgagtggaacgatgaatgagcatatggccaagctgccagttctatccaaactgatccacagagaggatctttacctatacttggtcatctctgaaaatgcagtcagtgcagccttggtctgagaagaaggaaaagtatagcaccatgtctatgttggaatttattttacc

SEQ ID NO: 105137 - DNA, 927 bp, Cannabis sativa
  modified_base (40)..(43): a, c, t, g, unknown or other
gatcgacctcactcctggtgagtttactacttataacgannnntacacttgcgtgtgcaaaatatcgcaacaagagttaagtagagtaagcaaccaatgagttgtctgtaattggaaggattgtctaagatgtctccttcggtatcatctaatctttgtcttggatccataggagccttggcaggcttgctactagtataaccggtgtcatgaaggagttgtaaggtgtatttcctttgggaaaaaaatagaccagccttggctcaggcaatctcaaagccaagaaaatatttgaggggacccaaagtttttagtctaaatctggcttgtagagaatcttgtaaagcatgaagaatgtcaatgttgggtccggctatgataatatcgtctacatagactaagagagcaataaaggtgttatgtgatccctttgtgaagagcgtgtagtcagcttgggattgagtgaaaccttcttgtaagagggcatcagtgagctttttataccattgccgcgaggattggcgaagaccataaatcaatttgtgtagcttgcagacaaggttgttccctgtgacagaagatggaagtgtgagtccgggtggaatttgcatataaacttcctcttctaaatcaccatttagaaacgcgttgttgatgtcgagttgtaatgtgtgccattgtttgatggtgacaatggccaagagcatcttgaaggtaaccattttggctacgggggagaaggtgtcgaagaagtctaatccttcttgttgtgtgtaaccttgagcgactaatcgagctttgagacgctccacactaccatcactgttgtattttattttatagacccatcggcacccgattgctcgtttaccaggaggaagtggtactactgtccaagtattgttggtaattagtgctaagagttca

SEQ ID NO: 105138 - DNA, 700 bp, Cannabis sativa
aaggctaggacatgtcagttatcataaactcaaggtgatgatgaagaagtctatgttgaagggtctttcttaacttgaggtcagaacaaagaaattatgtgttggttgtcaatacggtaaggtgcatcaattaccgtatgaagattcaaagttcaaagccaaagcaccatcggaacttgtccattctgacgtgtttgggcgagtcaaacaaccatcaatcagcggcatgcggtacatggttacattcattgacaaattctcaaggtacgtacagattttctttatgaaagaaaaatcttgaaattatttcaaaattcaaagaaatagtagaaggagaagttggcaagaaaatccaatgcctccaaacagacaactattgcgaatatacctcagatgaattttcagagtatcctcgagaatgccgcatacgccatcaattcatatatgccaatatgccacaatagatggagtagttgagaggaagaatcaccatcttgcagaaacatgtcgaagcacgctgcatgcgaagaatgttccagggagattttgggcagaaggaatgaagacaacagctcatgtgttcaatagacttcctcaagaaaagttagggttcatttcactctttgagaaattgtggggctataaacctgcagtaagccatttccgagtatttggctgtctgtgctacttattcgtgcca

SEQ ID NO: 105139 - DNA, 530 bp, Cannabis sativa
ccctgaagttgtatttttagctccttgagttctgctggagccattctatatggtgctttcgaaacagggtcaactccaggtgctaagtcaattacaaaatatatttctcgttgtggcggtaatcccgacaactcctcgggaaatatgtcgagaaattctttaacaaccctgactacttcaggcctaaatgtttcaggtctgttggagtcaatcacaaccgctaaaaatcctacacatccattgtgtagtaaatctctagcccttaagactaaaataatcaggtttcgagacccctgaacaaatctaacataaacaaatggatcttcaccctccggttgaaaggttaccattttccacttacaatcaatgctggtcgaatacttggaggaaatccattccaagtatgttatcaaatttcgctaattctagctctactaggtctgcactcaactccttatcttcaagcctaactggcatagacctaattcgcctactggagataaccaactccccgctaggcaatagggttc

SEQ ID NO: 105140 - DNA, 807 bp, Cannabis sativa
tatcatgtttacttttttttttttaatcattctaccaattttacttctatcacttcacgatattttttatttttctctaatcaaaattttgtgccaacttttcaacaaacctacacacctatctacaaagatacaaatctattatgtttgaaattatgtcttaattatatgagtgtgtgaagataatttagttacaatacttttaaaaaaagtatatttaaattaaattttatttaaaaataaatttagttaatatatatataaaaaaaagagatattcgtcattttttattctttttcaaataaaaatagaggtttccatattaattggcaaattaatcagtcttatagctttattttgttatctcataaatccatatagctataagctatctaacataactgttttttttttttttgaaaagaaaaataaaaaaagtatttttttattattattaattgcaagttaaatccacaaaaccaaattaataaacgaacaatttatttgacaaatattatggatctcaaaaccaattatgaggagtggagtttatgtcgtattgtaaatgatccaattagttatttttgttcaccaatcttgagtaatcagattacaagtggctcctaattactagcttatttgtttttgttcaacaattttaaattattggatcacaaagtgactctttatcactcgcttatttggatgtgttgatcaaatacctattaaggatagggaaacttacaaaaatactggaatatgggttaatttttacaaaaatactgtcacacggaaatcttttcaaaa

SEQ ID NO: 105141 - DNA, 679 bp, Cannabis sativa
ttttcaaaaatatatcttttttcaagttttatttttaattttactatttaaaatttttatttatataaatacacttttaaaattttaaaatttcaaaaatatatttttctcaacaaaaaataagaaaattgttaacacacaacgagaaaatcaacctaacgacaattataaattaaatataaaacaaccaaaaacaattgaaaaaacgacaactataatacaactataaaaaaattttaaaatacccaaaaaataatttattatttttataaataaaaaatttcaaaacgtaaaaataaaaaaaaaaaattatattaacatatttttctaattgttttcaaaatttgaatcaatatgcactacaagaaatgtcacttttgccagcacttttttgtgctggcaaaagttggtattgcgctggtaaaatagaatttacttgcgatgtgttggcaaaagggcgttggcaaatcaatgttggtattaaaacttttgccagcataaaatgaaaagtgctggcaaaaatgacttttcccatcgcgtaaatgcgttggtatgacttttcccatttcgcaaactgcgctggtaaaagtgacagttcttgtagtgatgtaaaaatttcaataattaattcacatgactatatttgaaatggtcggtaattaatcaacattttatatat

SEQ ID NO: 105142 - DNA, 767 bp, Cannabis sativa
cgatacttagttggactaatagtgatattgacacataggagggtgctaggcactactggtgccctttagcatttctcttaatatatgtcctaattttttactacaataactttttagctttaattttttattaaaaaataatgaatagtatcaatgctacaacatagcatctatgcaaatttctagaataacatcttcttttctctaatggtatagtatctcaatgttttgccatataatatgtttacctcaccaagcatcttttaaagtgtttcataggggtcgagatgctcttagtagtgtccaacactttttataggtgtcaccttataattagtcagtgatattctctaaaacttatattcttaaattatatagaattcgctatttaattacactaataataatatgacactaaaaaaagtactatttaataattctctttccttaatgtataactaactaaataatgaattattataattgagagttttcttttttttttttttgaaaattataaaaactaataaaaggaacaacctaaccttgtaataaatggaagaaagaaaaaaaatggcatggtgggcccctattagactagtagactagtactcatatttttttcttacatttataagtttgcactctttcttcctaacttttgttttgagcattgctattaggtattagtggtgcctagcactttttcgatatgtcgcgttgcgattggctagcgatactcctttaaagttattatattaaattat

SEQ ID NO: 105143 - DNA, 745 bp, Cannabis sativa
atttagggcataaaccccaacagaatcactaccatccctaccataggcaggagtaggaaaagtgggggttccaccaaagctttttctaccatttccgcataggtggttgcttctttggtagtaatcactagatcatgtctaatattcacattcaaatcggccaggtatttttctttcttactgaagtcagttggcacgatacccacgacgagcttggccaatcgatcaaactttgtgctatactcggtaactgacacacccttagtttgcactaactcagtgaactctttccgcttagcactgcggacggcttcattataatacttggagttgaataactctcggaactcttcctaggtcataacagtgacgtcccgggtgagggacaccaactcctaccacacgagagcgtcctctaggaactgaaatgtgctgtaggtcactcgatcattaccaaccacacccataaaattcaagattcattcaatcacaatgagccactacttagccttcatcacatcaggacctcccagaaacattggaggtgcttgcttatggaatctttcgtataacgcctccatgcagttgcaagcaacaggctattctactggcaccattagagctgcaacgacctgatcatcttgttgaggaggcatggcaggaagaccctgccgtcttaaccttagaatttcttcatcttgttggcggattcgatcttgcatttctgcaaacctctgctcccaat

SEQ ID NO: 105144 - DNA, 1792 bp, Cannabis sativa
attgatgagaagaaaaggacagaggaccttgcctgcgaggcagaacaagttgcattgactgctgttatcaagactcatggggaactaatgatcgagtactaggacggaaataatgaagattgggatgtggctggtgaaattgaaacttaccgtgcccacatgggtttggatgttgatggtgagaggattgaacaacttgaatatgcttttattgaggaagcaactgctgagatacttgaccttggtactacgaatgaatgtgaagaaccccaggcaaatgcttagtttcattttacattacgcttagtggttcatgtgtcttaaccttttaactttttttttttttttgttttgaatatcgacattaactcgaacatgtctccttttgtgatttatagttgtttgtggtgcctagcaaggttgatgatttttggaggaagcatttaccacttatgttctaaatgagagcttatgtttcttttttattttatgctggaattgagtaactgatcaacatagaaattttaaaaatttttgtattaaacaagttaaatttagaattgagtgtaccgtgtagcatcataaaccattgtcaacaagttgaaggtgattgagactctaaatatcttgcgcaagatttgttgattgctttcactttgataacatctcttacttattcccttgtttgagtgtgggtgacgaagcatgtcatagtcaaactctcacacagtaactaggaaccattgggaggtgtagcctcatgatcgtcaaattgttgacttgataagttgtacctgggaaggtagtcgatggtagagccgtcgactctccgatgcttaagtcagttgagtgattaagataaaagaaattgaaaaagcgtaaagtgtcgaatacattacagattctttttcgtgacctagcttcctcatgatttgatttgagtctgatagtatactgaaaccatggattgattagtgctcacgacttgtgcgtttatgattaggaatgaccgctagtttgtcaatatagattttgaagaatttcttcatctgtatgattgaggtgtagtcgacggcatagctatcgactctccgatgcttaagtcagtatattattcatagaaaatataatacaaaaagaaaaggtcgagttagaaatgatactgtttaagatgagtggcattccagctgttgccatttctcgaccatcctctgctcgaagtcgatatgccccttgttttattactttagtaatcttataggggccttcccagttggggcccaacttaccagctgttgtctctttggtgttttgaaatactcgacggagcacccaatgaatctccttgaatgttcgtgctcgaatgttcttgttgaaatgtcgagcaaccttctgttggtatgctctaactctgatcaaggcttgctctcttttttcatcaagtgagtcgagctcgagggtcatactttgccagttctgatcatcagtcaaatgttcatacctggaagtgggaattcctgtctctgttgggatgactacttctgttctgaaggtgagtgaaaaggggtctcacaagtagaggtttttgcagtagtgcgataagaccacaaaacaccaggcaattcagctacccacattccttttgctttctctaacctctttttcaatgtgttgacaacaatcttgtttgttgattccgcttgactgttggcttgtgggtatcttggggtcgagaatgagagttggattccccattctttgcaaaagttttggaactctaaacttacaaatt

SEQ ID NO: 105145 - DNA, 721 bp, Cannabis sativa
  modified_base (645)..(651): a, c, t, g, unknown or other
tcatgagggatttcttgttcatcagttttcggttgtctcctttctggctgttcatcctgattcttagggggtgtctcattttcccgaggttgttcttcccaggcctttcctgtctcctggtttgtgagccacgaggtctgcctcgtggtcttctcactccaagttcaggttgatttctacgccgccctagtcgagactgcctctcgttctaactcagcgtttcgacgctgcgcctcttctagacggcgtctcaggcgacaactttccatttcataagttctttctcccacagattgggcacctccatggttgagctcttcatccctcgtcttgggattctgaccattcccacactgagttttcctcaagcgcattatctacgtactaggaccaacgtcgggttgagttctccgaggacgtgtgatccgagcactaggaccatccttatgttaggccctcctggaacaggtggttcttctggactgcagattagtagatcttctagagcccatgggctcttttccagaatgatggttagtttcctcatgtggggtgttaatgttctctggaatttcagccataaaggagaaggtttttctttaaaagaagggaaggctttttctaagctttttcacagaggctctnnnnnnnagcaccaaactgttaacgcagatttttgttaaccaaatttaggcctcacaattgttggaaattattttac

SEQ ID NO: 105146 - DNA, 706 bp, Cannabis sativa
cctggaaactacatgttgatgggtcggctacagatcaactatctggcgcagggattgccctcgtcacgcctagggggcaacacctacacattgcggtgaagttcagattcaaggcatctaacaacgaagctgaatatgaagccctaatcgctggactaaaactagcccaagaaatgaaggcctaacacattgaaatctgtagtgattcatagctggtggtaaatcatgtatccggcgaatacgaggctcgagtagaaaaaatgatagcatatctgagcaaaatacacgacctgctcacacaattcaaaagctacggtctcagatgtgtcacacaagacgaagctgcacgactcctatctgaagtttacgacggattctatggaaatcacgccgccggacagagcttatccaagaaaattctaaggcaaggttactcgtggccaacgatgattgaagattcgagagcctatgttaagaagtgcaacaaatgccagagattttcaaagataccaagagctccgcccaacaagctgacacatatgcaaagtccgtggccctttgccatttagggaattgacttgatcgggcacttacctaaaggtaaaggcggagtgcagtaggcagtggtaacagtcgaatactttactaagtggactgaagccgaaccactggcaaccattacatcaaagaatgttcaagactttat

SEQ ID NO: 105147 - DNA, 1165 bp, Cannabis sativa
gattgattgaaataaggcttaaatattaagaaaatataattactatttgcttatagcctggaatatattttatgaggatttatcagcatcacataaatacataaatgttgcaacaaaaagttatttatttagagctcctaatatattgagaatttaaaatatacccctacgtcttcctacaccctttagggaataatacaagtcgtatccagaccttccgaaatgataacctataagtccccggttgctcctgcggagtgtagttgtatgaggggatcactctcatatgaacttaggcaaacggtccaactctcgtcatgcgagcaatcatttgggtggggaccggtaagtaatctttgcttggggtttatatactccaagacggcgacatctgtacccggattgaaaaaaaaatcatcacatgaaacataacatgaaacatagaaatactgaaagtagtatagccaggtcccaaacttttcctagtattggtactgttgagagaatggttaatgatttagagtcgtctaggtttaagcaagtacattatccttcctcggctccatctggtataacgcctggtattgttgaacaacttgttagatcctttgatagaattaagcatcgtgttagcacgcctgtgaaaactaatgatagatttagacttcctcctgttagatctaataagcatccacctagcacgccggtgtgggctggtaaagtattttcttattgtaagagattagttacacccactactttcttgccgggaagtgctagagatcttgtacatagtcgtgagcacttccgcgcggggaggcgtatggtgcgtctatcactagagaaggatgcaggtttgttgagcgtattaaattcatcctcgttgcgaataaaaagttttacattttcagagtttcttaactatagttatttggttgataactgctatctcgtgctttattgtatgacgataggttacacgatatggttgtataatataactgcggatttctcatctgcggaaatgattgatatgatggatgttaattccattgaaataactaactttcaaaatgagagatggtttactcatttagcaactgaggacttaataccccatattttaaaaaacactaattatagtctcgaaccgaagaactttgtt

SEQ ID NO: 105148 - DNA, 772 bp, Cannabis sativa
acgtaactctatctacatgtgaatttactattatattcatgatttaatatgagcaaattcacaattgaaaatctggaaaataacgaaaatgcattgagataaacatttaactataatattgatataattttttttggattatacctgagtttgattgtttgtgaactccagttcaactttttgagatttgcatttcatggatttgaaaattgaagtcagcacattagttttatgcgaattaaactgaatttctggttgaattttagttttatagtagtttttctacacttttttttatgaattcaaaacagccccttttgtgattgattccggtcgtctgtgaagtcgccaaaattaatggtggttctctttctggttgagtttcgtttcgattgtgttgggttgctgggttggttgctggaagttgtcgttcttgaagaaggtggttagtgaggctaaatggataaagtaagaattatttttgtaaatttttgttatcggactatataaatgtgtatagggtctacccaatgtattagtgcaatatttttgtcattttagtatatacataatacataataaaaaaaagcccataaataataataataataacataactataattatttatatacaatactaaaaaattaatacaaatgtatcaatatttttttgtgttaaatatagcacaatttttgcaggtctaaagttttagtgtgattagatacaagccttaaaaaaaaaaaaaaaaaaaaaaaaaaaaaaaaaaaaa

SEQ ID NO: 105149 - DNA, 552 bp, Cannabis sativa
ctctatcccttaaagagaaaggaaagagtcgtagtcttatggcatcatcagtaacaccattcatcttcacagtagcacatacctccaaaaatatggctagataaatattgggatctttagtagccaagccaccaaattgattctgttgtaccatattgactaaagcaggcttcaattcaaaattattagcagcaatgattggattagcaataccagtcagattttcattcaccacaaataagcaataatcacgaacagcctgtggttgtacatcaactgtagtgggtgttggttggttgttattaaggccattgttgttattggctaccatatctagtattttcttcgcttttaactgctttagagttctttcaatctcaagattcagcggtgtgagtggtgtagcacttcgatttcttcgcataaattgaaccacaaagcaacaaataaaataagaaacaaaaaaaaaatctaatttaaagcgaaaaattttagtaataatattagcaataatttaagaatttgcaatccccggcaacagtgccaaaaact

SEQ ID NO: 105150 - DNA, 584 bp, Cannabis sativa
tggcatttgatttacttcaaccaggtcttctagatgctagggaagttgacggaggaggaaaactgtaaagaccgcttagctttaatttctaaaattagcagataattagggctttattatgaaaatcatttattagtattgaattaattatttatgatgatttatttgaattcagaatgcatttttatatcacatatagaaatttcataattttgcatattattgtgcccgacaacattggaacgcggtgtatggctattagaatcgcatcttattaattttagtatagcgggataatagtttagacattgggaatgtcgggaatagtcgggatgttagagtttcccaaaatacccctaagtacccttttatgttgtgttgtgggggaagggcaaaattgtcattttgccatttatgtttttgtctttagtggttttaaatttaagcttttgatttgatttatttagtatattttggctgaaagtaaattaaacaagacccttttatttttattcattttttcataaaaaagattaaattagacaaagaaagcttctttcctcaagttctctctctctctctct

SEQ ID NO: 105151 - DNA, 546 bp, Cannabis sativa
  modified_base (220)..(223): a, c, t, g, unknown or other
tctacacaagttatagaaaaaaggaaataattggtactaccactatcaagtaacccccactctcaagtaagcaatataaataaaaaaattaggatttatcttaaatataatatattattacttttaataattataataaataatgtcacatataatacattcaaatggtaaaaaataatgtcacatataattaatttattattttagttaatttattttnnnntataatatattattatttttaataattataataaataatgtcacatatagtaaaaaaaaatagtattgtaaaagtagaagccaaataatatattatatttgaaaataaattaactaaaataatggtaagaaaataataatatattcaatgtcattactataatatattcaaatggtttgatttggtgcgcgacacctctgcgataagcgactttcttacactaatgtaagcaggggagcctcgactcctttgatccttcgtaggagtgtaaatgaatcaaaacggatctgattggtagcgtactttgtttccaaattaacatt

SEQ ID NO: 105152 - DNA, 556 bp, Cannabis sativa
gttgataaccctcactcaggacatcacagttatgacctgggaagaattcagcgagttgtttaactccaaatattataatgaagccgtccgcagtgctaagcggaaagagttcactgaattgatgcaaaccgagaggacgtcggttactgagtatactacaaagtttgaccgtctggccaagctcgtcgtgggtatcgtgccaactgactttagcaagaaagagatgtatttggccggtttgaatgtgaagattaggcatgatctggtgatcactactaatgaagcaaccacatatgctgaaatggttgagaaagccccgcgggctgagggtgctgtgaaattccttcagcagccccgagtgaccccgaatgttggtggaacccccactgttcctacttctgtttatggtaggaattgtggtgactccaccactgatcagaaaaggaagtttacctcggcatctaatggttcggggcaaagcaagcagttccgtaggaaccaaggtagaggtggacgtcagggttactcttaccctgagtgcccacgttgcaagaaa

SEQ ID NO: 105153 - DNA, 541 bp, Cannabis sativa
acagagaagattaacacccgctctagctacagaaatagacttaactgacaaatcaggaatttctcctaaagaaagttgggaactaatgacaaagagagctggaggacatgaaagtcttagaattactcacgttgattgtaagaattatttatgaaccaaacaaacaattcaaatgaagttaggggatacaagtggtattcttgagtatcttcacgggaaacaattagaagatccttacttattctatgctattcaagttgatatagatgagttaataacaaatatctttagggctgatgcaaaaatgattatggcatattcttatttcggtgatgttgtttcatttgacactatttataagaaaaataaaaaatggtcgaccttttgctatgtttcttggagtaaatcatcataagcaaactactatttttggggctccattgctttatgatgagaccgctgaataatttatgtggttgtttgatacctttgctaaaacaatgtctgagaaaaaattaaaaactattcttacggatcaaga

SEQ ID NO: 105154 - DNA, 505 bp, Cannabis sativa
acaacgtgttcattgattaagaaagtcgatgggaatcacagggggattaccctccccttgatacaaaatagctaaatcgctagcaactctagcattcttagcaataccatccgctaaagtattaaaactacgattgataaaagaaaatcgaacaaccggcagtactttcaatacattaacaatagaaaagaaaatacttgataccttccagtcaggtggtcctttccttgtagttagagactggactacaacttttgcatcagataaaacatgcacttcatgccaccctagctccactgcccaagttagagcaaggtgaatcgccatgaactcagcttccaaagctgaactcgattcgctcttgtgggctttgacaaaccaggcaccagtagtatattcatagttcaagagaattttttatgactataataaatatcagcttaaagtggataaaaaggcgtagatattcatagttcaagagaattttttatgactataataaata

SEQ ID NO: 105155 - DNA, 570 bp, Cannabis sativa
ccttcgcaggatgatataggatctcacaatcatagtctttcactaattctaaccactacctttgtctcatatttagatctttctgagtgaaaaagtacttaagacttttgtggtcagtgtagatctcacaccgttcaccatataagtagtgtcgccaaatctttaaggcaaacaccactactgcaagttccaggtcatggattggatagcgctgctcataatccttcagttgttgtgaagcataagctatgactttatctgcttgcattagcacacaacccaaaccttgtctggatgcatcgcagtacactacaaacttttcttgatcagacggtagagctaaaactggagatgtaatcaatcgttgtttcaactcttgaaaactttcctcacatttatctgaccatacaaaccgttgattctttttagttaactcagatagcggcattgcaatcttggaaaatccttctacaaaacatcaatagtagcctcctaaaccaaggaaacttcgtacttcggtaactattttcggtctaggccaattcttcactgcctcaattttccttgggt

SEQ ID NO: 105156 - DNA, 574 bp, Cannabis sativa
gaaccaccaaaatgtgtcaggatttaaaatcctatttttggtggtatgagatgaaaagaaaagtggtggattatgtgttcaagtgtttaacctgccagcaactaaagttgaacacctgaggccagcagggttattgcaatctttagtccttcctgagtggaagtgggaggacattgcaatggattttataattggaatatctagaactacgggaatgtatgattcagtaaggggcatagtggacggatttgcagaatcagctcactttctaccagtgaaagttacatattcagtggattagtaggctgagttgtatgcaaggggatcgtttgtctccatagagcccctaaatttattgtgtcagacaagaatccaaagttcacatcaaagttttgggtgagtcttcagaaggctatgggtatcaagttaaagtttagtacagtctttcaccctcaaactgatggttaatcgaaaagaacaatttagatattggaaaatttattgtgagtctgtgtcatgaactttgaaggttcatggagtaagcacttgcctttaattgagttctcctacaata

SEQ ID NO: 105157 - DNA, 823 bp, Cannabis sativa
aatagtcaaacttagaatctaaacttattgcttagggttttaagtgttggtttgtttgttgttgttgatgatggttcttcccaatataaattttggatccggtaatggagccgatttaggcctgtcgacaaataagttcaccgtggattgctttaaaaaacactttggattgctgtttgagtgcttaattcgatagtttatcaaacatcatattaaattaaaaataattctgtctactattgtcctttgcaatctacccaattctgcttgcaaaacagattcctagggtattttcagcatggacacaaataattggagacctatccagggtgaggaacctacgatggacaccacagattggagaactcaattgcagcacgattcgagacaacgcattgtcaacaagaggtaagtgtctttttttcattttttatttttaaaaatagcttaaacatgtatataaagaaacatgtatataaagaaacatgtatattttttgttttacaaatttttttgttaaaatgaagactttagaatggttttcatgtattttcttttatcagaacttatctttagagtatgaaatacatgaaatgttcattttcactgacttgtataacttaatgtctttactggaagaatggatacattgaagaagcatctcccttactctggctaagaggaattgcttgaactgaaaaaattgctgaaaggtttgaagaaaagatttacagtgccgccacaagccaggtacttttgtatttatgacccttttctttttttttttttcttttcacttagtcacctatatgtattacttaca

SEQ ID NO: 105158 - DNA, 567 bp, Cannabis sativa
gcacctagtctcggggtacccccccgacttccaaggaggccaagtcaaggtgccaccccgacctccaagaaggttagcttggggtaccaccccgacccccaaaagcgtatctcggggtgcggctaaaaaaaaatatccaagatcaatgtttcaccaccacaaacacattttaatcaatttgatgaaaatcaaagttgggaaaatggagggaaattgaaactttttatgttcatagtgttcttcaacattcaagaacaccaccaacctaaaagtttcaaatctccttatttttttcatcaaattaaaccaaatcaaagccaaagacacattgcccatcacctatactacaaaatccaagcatcaaacactcacattatatcaagaaatccaagaatcccaatcaacatgatttcaatgtaaaaaatgactatggaggtgttagaaatttacccatagtgaagaaatgttccatcgagtgtccaagaatcacttcaaagcttcaaaatctcctccaatggtggtaagatgtccaacccaaaaatgaagagcaaagtggagaagatgaat

SEQ ID NO: 105159 - DNA, 510 bp, Cannabis sativa
cgggactactgactgtcacaaattataataattataattactttttatatgattgtgtgtaactattattgaaaaaaagatataagaataattaaaacaattataaaatacacatatattttagtatttagttcatcaattgtaataaaaatgcaaaaaaattgagtacaaatttgagccggtataaaaaataagttggtctatttgaaaaaaatgggtcgaactgaataaagcacgacacgaatccgagcacagtacgaaattaccggacttgcaggcccatgctggatctataaaattattacacgatacgatccatatttttttaggcctgacacacacgacccgtatttaaacagtctaaaaaatataggccaaactaacacgacacacacgcatttaccactatactttataagtagttagacaagaccgatcttgggctaagcgggctaggccaaagcttaggcccatataaatttattaactaatagagaaatgtaagtaaat

SEQ ID NO: 105160 - DNA, 979 bp, Cannabis sativa
  modified_base (144)..(153): a, c, t, g, unknown or other
  modified_base (717)..(719): a, c, t, g, unknown or other
ttggatcacaaagtaggttttaaacaacaagtataaattaagtgtaaaataagttttaaccaagtatggagatagtgatgattgcaaggaagcaatggtagcatatatacaagggagtgaaaccttagtggtaatgatggaaannnnnnnnnngagtctcagatgttgatgaatcatcatccttaatgggagactcactataagttggtatggtaatttttaccaaggggttatcaataaaacaaagaatatacttgaggtatgtatatttcaggatgtgtttgaatagattatcaagatttctaccaaacacaaaaaggaaacttcaggatcaaggaataatctttaattaattgttatttgttgagaatttagaaaatgggtatttccagtttagttgtgggtacttggtatgagcaatgttgcctctaccgtataggttacattaatttactttataatgatagttaactgtaagtgattgggaaattttaaagttgtgttagctcaagagaaattgatgaaagtttaaattagtagaaatgaacaagattcaagttgtcaataagataggaattcctcaagtttaagtgaagaaaaaatcgatgaagaattgcaagaggttaatgaagggagtgatggcaattgaattttactaatgaaataatgaaagcaagaaatataattaggaacgacaaagaagcatctactttctgnnncccaccatgagcttactttagagttaaacatacttaacttggagtaatctcaagatggaaaatcttttggggagtcatctcagaaagcgtatcagtgacaacaaagtacgctagaaagattcatattaggatgcagaattagcagtcgttctagagattatcaagaggactggatgtattaataagtagatattgacaaggtattgagaggagtatatagtagtggatgggaaaataaactgcttctgatttagagatct

SEQ ID NO: 105161 - DNA, 588 bp, Cannabis sativa
  modified_base (33)..(43): a, c, t, g, unknown or other
atgttgaataaaatggattacattgaaatggannnnnnnnnnnggcataaaacccaacattaccttcatcatctttttcagtagttcaagaccaacccacaagtataattgtaatgatcgcatgattagaatatggattagtagggcgattagctttaattacttttattttatgattatacataaatatatatgttgtgggtcctattttcaaaaaatgggcattagagttataatttctcaattccagaaattttattaaattctaggtgtaatttatatgctaaatgtgaaatttattatttttgtgatttttgcttggtaacgacagaaatgcgacgaatgactaatagagtcacatggatgagtttagaaccttttatttgatgggacaatcatatgtggcattcgacttatcaggattaggcagggttatggtatttgaccattttacctctaagccttaagttttctcatgggagaagcaagggcaaaaatggaatttttcccaacggttttaaaatttgtctttagtggacttagtggtttcttccaaggggtaattctttttctttcaaccaaggtttt

SEQ ID NO: 105162 - DNA, 1719 bp, Cannabis sativa
  modified_base (1661)..(1665): a, c, t, g, unknown or other
acaacgaggctaaacatgaagctccaaatgttggcctcaggctagcacacaaaatgcgggctgaccacctagacatacaacatgactctcaactagtcgtaagttataccctacgtgaatatataactcaacacaagaagatgatgacctacctgagttgttaagtcaactcaaaggctgtactaaaaggcaagcccccaaagacaacacaacagccgatgcactcgatcgactacctagttatgccttgacaatcaaggcaaacttggtatccattcagtacttcaaagaactaagcctccttatttcaaaagaaatagacttgcttaacaatcaacatgttacacctacagcaacatacctccaaaaaaaaatcttgccagaaagtagggattaagggatggatgcaaggtgtctaatcctgcacggcataacacacagaagtggtatcccaacactacctctaaggagcgttaccaagaaagaagttggatagctattattgaaaaaagtgcacaaaaaaggctctatgataattacgtcaggggcaaagccaaccgagtgtaaacaggatcaaactgtagcattggcctggcctatagaaggttggtcgaccatgaccttaataggttggccggccatataatccataatctggtcagccactacctccacatgttgtccatccatagcctcattcaactggtcaggtaatgctacctcaatgtgactagccacctagtcttaccctggccagtccgatcctctagcagtctgctctcatactttttctacagggaccaagaggtaaacaacatcttgctagcaggatcccttgacaaaatgaaaagaagaagagaccaagccaactcaaagcagcatggctgcccacaaagatttaccaggcccttcgataaacagatctaggaaaaaaattcttcgtaagagatttactcctaaaagaatattcttttacagcaaaaatcctgcagcaagcatgtttagaccaaactaaggaggtccaaaccatgttaaaagataacagtaaaggtgcatacaagtctggcgagtacaacgaaaacttggagttagtacttctatccaaacactgaaatagggaacatctcaataagtactctcactagcaaacttgtcaatcagttcctctagtgtttcactgtacagtgacccataaaagagctagtacccattgcttttcagcatggcctcccatcactcttcaatgatggttgttgcgcagtaagtcgcacaagggtagccactacgtgattttaaaagtagacacaaaattgtaagcttttgttacacgtaagactaattgtgtctaaacaacttgctaataaagttaacttcttaaagttattctttgccagctccacacgtgtacaccagggagcaccccaagaaaattcccaaacaatgaaactttgtgaattgtaagtaaccaagagactgtaagtcagtgcgttcacttggggagcacctacaccgtacaatgcattgaactagcacgtagaccttatgcaaagaaatttttacgcttagaataagctactaaccctgtctctaagtcaagtgcaggtatactttgtgtaaagaccgtttagctttaatctggaaattagcagataattagggtnnnnntatgaaaattatttattgatattaaaataattatttatgatgatatatttgaat

SEQ ID NO: 105163 - DNA, 565 bp, Cannabis sativa
  modified_base (59)..(68): a, c, t, g, unknown or other
ttcccgagtgtgggtctaggtcttagtatgtgttcgggtcttagtttgagttcgagttnnnnnnnnnnttctggtctatgtccttgatctagacactgagtagttgtcgggtccaagcatctatcccggatcccagatcccgagtgggtcctatgtccagggttgggtctagggttgggtcctcgatcccgatcaaagttctgagaccaatttcttgtcctagtttaggggcccaattcccaggtctgtgtcccccatctatgttcaggtcctaggtcccgttctgggtccaagttcgtgttcgggttcggtccgagtttaggtcgtggttttggttagggtccgagttcgcatcccaatcctagtcttggtctgggctttgggtcccaggtctgagtctggttcttgggtcttgggttcggccccggtgtccaggttcgggtcggagtgccgtgttccgattattgtctgggtttggtttttaggtctgattcttggtctgagtctgggtccaggtccggatcttggtctaggtctgggtttaggtccaggttcgagttcgggt

SEQ ID NO: 105164 - DNA, 3110 bp, Cannabis sativa
agagagagagagagagaaacaagagtttttaccttctcacttaaaagatttgcaccaagatcattttcattaaactctcttttatccgtctcagtctcaacctcagcttcagtagcagcttcgccatcacttgaagtggtaagaggaataattgatgcaccaaacatggcctcatcatgagcaactctgatttgctcttccctttttgacttcaatatgatacggaagaaataacattagatacaaaaacattacatatccacaaacaaacagttgctagatcagaaatgcatgaagccatagccaggaacagaatcatcaactgcaactgagaatacagatataccttgactgcagagaatcgaaagctttggccaatgtgcttcactaatgctgtatcatcttcggcagctgttgacaaatgaagatgtcatgcacaagcaaaatactaccttatgctaacagggttaagacaaacattttaattcagccaatgtctacgacaatctgattcattcacgatctatgcattggttaggatctctatgcatttgttaggatctaccccgtaccaaatatgggatcggttggctatttataaccacttgggcaccctactttcataagctagtcttttggagtgagattatgtaacaaaatcatgtgttgggtatggaataaagaagcagttatcacttcttagaggtacagcaaaacaattaaagtttcagcgccaaggagaaaggaaatttacagtaacaggtaaataactctaaatagtggcaataaactgccaaaaaaaatcacgcaagggaaacataaaacaagaaaataaatgaataacataattaattgatacttcaccagatgtatcaaacacagttttgtaaaaatatttaaccttcaacttcttcctcatcatcaaggggtgcatctttgttgaactcaaacctttcccaacctgatcccatgcctttcgttgcatccttttcagctgcagtcaaggtttacatctataatacattatacacgacagcaaataaagcaaaacactaaatgaagaaacccataatttagaaaatgtactagataggtatccggtaagactttagcataatttctttctgccaagatcttcgatatatttgacttaactttaccatgtgatcagtcatagaatagttaacttctaaaaatacaacacaatcaactatactaattacttgataataagagataattgttcaaaagtttgagacgagtttctaggatagagttgtcaggattaacagcttgcacacataaaactgattataatactacatataatttacatggaggagattagaaaacattcagattgacatcaacaaccacattaacttcttaattgaaacgattgctgtgcaacaacatttgtccaagttcaactactacatatagttcaatgatacaaagaatgcaaaataaggtacacaatcagttgttgttctattcactttaccacttttccagtcaaatcctatccttctaggttctcattttaaaaacaaccccttaaaaacttgtgatggaaactattagaataatctatacaggagttctacgaacccagcataaccataccaaatagtccactactgtctttaaaacttaccagtctcagctagttgaagcttcatcttcgctttgactctttcagctggtgactgatcgcacaaacagagaacttatgtaagattaactccaccacattaagattccataccaatccaaaatattcaagcttgaatcataacaaaatccaaaatttgaatcacaaatctatgcaaagtggaagctagacaagcttaccatcaaatcatagccttcaatcaacttcgaatagttcacatttttttcctttcgggcattactaagttgtccccctactcttccatcgcgaccctgttccttcttcgatctacgctctcttggtgaagggctccgattccttctctcaactctccggctccgaggcgagaagctccgactccgactccgactcctactcctactcctactccttttcctcctcctatgtcgatctctatccccatccctatacctatctctgctcgtactccgccgcctcgaatgacgatcccgctcccgatcacggctcctactccgcctcctggaactcctttcgtctctctgagaaaccctagaatggtgtcgttgttgtcctgattctcgggtcggactaagtttattcttcttcgtgagcttgttctgtatggattccaattgagcttgtttctgatgctcagtagtcttggttgggctagaagccttgacgaaactgctgaggaaagaaaccgaggaagaagaagggagagccgagcctcttgatgggacatcagcggtactcgacggtgtggctgagaagcccaggccttgtttgaatctggcggctccttcgcctcgccgagtcaactcgtcgtagtacgccgcggctttctcttcctccatttttgcagtcttgttgagctcgacgatttctctctctcttttgggctttctgtttatttgggctgttgagttgcatgttttgatgggcctattaggcctaagaaagtacaccaacaatttacaattttgaaaagttattttttttaaccaaaaaattaacttttattcaaataaatcagctaccaagatagcttccaaaccagcaaagacataactcccgtgggaaacacagccaagaaaagaactagaaaaacgagctaaaaaattagccgcctggttcccagaccgtttaataaaattaattgaaataggaaacaaaagagaggaggattgcataagagcaacacaattaatttgaaattaaaagccccaccggagacaacaaccgcttcttctgttgcacagcttgcaccagcagcagtgagtccgactccataaccacaccagcaggcacacccccctcaacccaccttcccttcacccaactgagcacatccctcaacgccatagcttcagccaaaaacgggtcgggcatgaccatacgttttaaccgccaacgcatcaatgaataaaccattatgatcccgagcaattca

SEQ ID NO: 105165 - DNA, 634 bp, Cannabis sativa
atgatattgtgatttatagcaattcgttagaggaacacttgcatcatctacggaaggtgttgacaaggctgagagaggaaaagttgtacattaaaaaggagaaatgcgagtttttttgggaggaggtgaaattccttggtcattgggttggtcaagggaaattgagaatggatgaaggcaaagttaaggcaatcatggattggcctatccccactaaagtagcagagttgcgatcatttttggggttggctaattactatcggaagttcataaaagggtactcaaagagggtgagcgctcttactgatctccttaaaaaggatcagaaatggtgttggtccgaggaatgcaatgaggcatttgagaagctgaaagtagtagtgtcttcggaaccgatattgaagttgcctaattttgatctaccattcgaagtacaaactaatgcatcggatcgtgccttagggggagtactggtgcaagatggtcatccaatagcttttgaaagtcagaagttaaaggatgcggagaaaaggtattcagcccatgagaaggaaatggctgcggtggtgcattgtttagatgtgtggaggcagtatcttttgggaacaaagtttacagtggtgacggataatgt

SEQ ID NO: 105166 - DNA, 858 bp, Cannabis sativa
actggttagcaaatcccgtacttgtgcccaagcctaacggctcatggcgcacatgcgtcgatttcactaatttgaataaagcttgtcctaaggacagttttccacttcctagcattgaccaacttgtcgatgccactgcaggtcatgagcttctcaatttcatggatgcatactcgggatataatcagatcccgatgtatgaaccagatcaggaacatacctcgttcattacagatcgaggtctgtattgttacaaggtaatgccttttggtttgataaacgcaggtgcgacgtattagaggctagtgaatatgatgttcgcagatttgattggggacaccatggaagtgtatgttgacgatatgctcgtaaaatctcaacatgcaaaagaccatgtcaaccatttacaagcaatgttcgaaatactgcgacgatacaaatgcggctaaatcctcttaagtgtgtctttcgggtcggctcaagaaaattcctcgggtttatggtgaatcagcaaggaattgaggcaaaccctgtgaagattaaagcattagtagaaatgcgatctccgactaagccaaaagaagtccaaagtctgataggtaaagtcgccgctctaaatcgtttcatatcacgattctctgacaaatgcaaagaattttttcatatctttaaaggcaacaagaagttctaatggaccgaaaaatgtgaagaagttttccaagcactaaaaacgcatttgggacagcccccaatcctgtcaaaaccaatgcctggagaagtcttatccatttacctggcggtgtccgaatatgcgattagcttagtactaatccgcgaagaccaaggtcggcaataccc

SEQ ID NO: 105167 - DNA, 919 bp, Cannabis sativa
  modified_base (656)..(680): a, c, t, g, unknown or other
ttagtaaatctagatccttgtaaacaattcccaacaactggccttagagccatggtaatgatttactttcatgtaatatggatttaaagcgaccaatattgtttgtgtgttgatttggatgtgttcatgttggtttatgtgttaattgatgattgaatgtgttttacgaaatttttccatgaaaataattttattttcaatctgaaaatattttatttagattccttgtgaaaaattaagcaattttggtctttacggaactcgcttctgataaaaattgagagagttatggtggtttgaagtttcgggtgcatggagtgtcattgcacgacaccatgtgtgcacaagtgctcggacaagatgaacccgtgtgcgtgtctgaaggggttctgtccgaggcagcacccccatgtctgaaggtgcaccttgcaagcagggtctttcgcgtgcgcctgaagctgaagatgtcgaggtttctcagcgtcaagaggctgcatgttcctccctttcgcgcgcgccacggctgtttgcagcctactttggctgcacgtgcagccctcctcggcagcacaccaaaaaatccgaattttttgggatttttacccaatttcagatttcccccaatttcaaacccaaaaatcaaaataaaatattannnnnnnnnnnnnnnnnnnnnnnnntcaattttaaattaataatatttattttttaattgattagtattaattttattatattttgaagtttaaatttaaaaatcgattattttattttttaattatggtcaaattttaaaaattagttatttttttaatatttatatattatttaattataagatcacatattttaatattagccatattttaaattaaaagataactttatcttatacgataaattaaataattaataaatt

SEQ ID NO: 105168 - DNA, 983 bp, Cannabis sativa
aatttttaatatttttaaattatgagaacgttaatggtaattgaaaattatttatgcagaatatttaatttcattaactaatatatttgaagtaaataacaaaattattttattaagaaaattgattcatttaaaaatatatatatataacacaattaaaacaactttaattatattttctattttagagaaataattagtatttttttttcattagcggttgtttgttttcgttataaaaattatcatttataaaaaaaaaacattagtattattattcttataattattttattatatattaataaactatgaagaaaaagtgattgcccatttattaataaagtaataattttactgttgaatattaatatgatttaaattttgtgatgaattgaatgatattttgtttttcattccagattgttgctgggctatatgcgcagctgatgtagttgcttcgacctttaatgccctaggaagagaggcaaatttaaatctctctccacaacaccttgtggactttattaactggaaatgtaagcgtatgggaaaagggtttccagtttggcgtgcgcttgattacatcagagatcagggaatcacaactgaagaattatatccattccaaggtagaagaacaaatctagatgataataagaaagcacctgaggtatttttttttactaattaataatattcttttactctgtaaaactgtaaaactagtgtaagaaatgcagggactatagaaagtttagttaagactgaaaaaagttaagatacactacctcacacaaagagtctattaataaaaaataatttaataataacaaatttatttttcaaaagcaagtattgaagtaactcctttaattttttatttttgttataattttaatttatttttaacagtaatacatatatatatatattgtattttcagtttcagaagttgtacactatccaccagtactcaaatg

SEQ ID NO: 105169 - DNA, 2114 bp, Cannabis sativa
taatactagtaagctttcttcaacaaaacaaacctcaaccaatcactactctccaactaagctttcttcaacccatagaatcaaaatccattctctctgcaactgaattgtttaattaactatatgtggtacgtagagatatgttatctccatttatagaaaaaaatgtacatagatgatgttctccatttgttcaattgatgtgaacattagtgggaatagatcaaatgcttgactattatttaataatgtctctatctccattattcatgcatgtattattcaatttgacgtgtacgttggtgtgaaagctcaaatatttgagtattattaaatagtagaaattacgacgaaattataagagtgacttttttatgacatcaataaataatattatagggttatggatatttttattcttttatatttatgtgagattttttatgttatacttttgtaaaaaaaaaaaaaaaaaatagaaatcctatatttctaatataataataagtgttgccgaaaatatcaccgaaaaaattctcagtatcaaaaaagttagtatcgtcggaaagtcaccaaaaaagtcattgtcgttggaaaagtctccgaaaaagtcactggaaaagtcaccagaagtaatgtctcagatataaacaaaaaaataaccggttctataaaataatgaataaaaataaataacacaaaataacttaaatcagttataattgaaatataatcggttctataacataatgaacaaaaataaataacacaaaataattcaaaccaattataattaaaatagaaccagttcaatgacagtgttataatgaataaaaataaataacacgaaataactcaaaccgattataactaaaatagaactgattatataacataatgagtgagtatttttggggtaaatatggtatgtatgtaattatttagtaggttggagcatgttgaatggatgtttttgtttgagttattttatttaactagttttgtgtgtgtgagtttttatcttagttattttacgtaactagtttttcttgtctcaagctttttactagttgataaatataattggtttctttatattatatttgagttattgtgtgttattatttgtgtttatttattttattatagaaccagttcttttcatatttatacctcaatattttttggaattgatctctattttttttaaaaaaaaattataatcaattttatgaggtattatgtgctctgaggtattttattgtggaactagttttgtttttaatttatatttcagtgttttaggaactgatttctctttatttttttaattataatcaatttgagttattgtgtgttacttgcttgtattcattatgttatataatcggttctattttagttataaccggtttaagttatttctagttatatgtttttattctttataacattgctatagaaccggttcttttttttttttttttgatcaagaaagaacaatcttcattaatcacaaacaaatacaatccaaactaaccaaaagctaggtagcaaacccgtttttttacataaacattctctctatgtatctcttctcatgagcttttaggcttcttttttagctatttgtaatctatagtacactattttcttaatttcctgtgtaacctttgttgctgtacttgagtaattgttgaagaggtagttgtttctattgctccaaatgctgtaattcatggcagccattatcgaaatatgaatctgttgtttcttatcactactggtttgcagcagccactactgccaacactggaaaccagtcagtcatctcctaatttccagccaaatgctcacctgctccaccacctgctgtgaaaaacagcagtcaaaaaatagatgggaatttctctcagctgctgcatcacacactgggcagctggtgctatcaagggtgatctgaaattgcacaaacctgtctcgagttagaagctgagagtcgatagcttgccaaaaaaatgaatctgtgcttcggcatgtttagggagctccaaatacatttgctgaactcagactgagtttgaggtaagcaactgttatataacagagaagat

SEQ ID NO: 105170 - DNA, 855 bp, Cannabis sativa
tgtcgatccaaactacctagcaaaaggcagaaaaggagacccttggatttcaagaggtaaggggcactaaaacaggaagtggacaagttattggtcaatgactttattcacgaggtgttttatccctcgtggatagtcaatcttattctcgtctcaaaacctaatggaacttggagaacttgtattgatttttctgatctgaataaggcgtgcccaaaagactgtttcccactacccaagatcgaccagctggtggatgcaactgctgggcatgagcttgtatcatttatggatgcatactctagatataaccagataaaaatgtatgtcccagatcaggaacatacgagctttgtaaccaacatgggactctacttctacaaagtcacgtcgtttgggctgaagaatgctggggcaacatatcaatgattggtgaacgagatgtttgcaaatcagatcgaacagaacatggaggtttatgtcgatgatatgttagtaaagtcagtaaaaaatgggagtcataccacagacctcgcgaaatgcttcaaaatattaaagaagtgtaatatgaagttaaactcgaaaaaatgctcatttggggtattctcagggaaattattgggattcatagtcaacgcgaggggtatcgaagcaaaccctgcaaaaattaaggcattgatagacatgtcatcaccaacaaagcctaaagaggtacaagccttaacgggaaggatggctgcactcaacaaattcatttcgaagtcaactgataatttccattcttcaatatatgcgaggcaacaagaaattcgagtggacagaagagtgtgaagaggccttttagaacataaaaag

SEQ ID NO: 105171 - DNA, 691 bp, Cannabis sativa
agttaagctttggacttctttggtaattgtaggcgatttcatatcaaggatggcttggatttttctggattggcttcaataactcgggcattaacaataaaaccaagaaacttacacgagctgactccgaaggagaactttaagggattgagtttcatgttgaattttctgaggactttgaaacattcgtccaggtcatctatatgccaccagcctttttcagatttaacgagcatgtcatccacgtatgcttccatatttcgtccgatctcatctttgaacatttttttaccaatctttggtatgtagctccagcgttgtttagaacaaatggcatgactttataatagtatagacccatatctgtttggaaacttgtatgttcttgttgtggtggatgcattttgatttgattataccccaaataggtgtccataaagcttaggatctcgtgcccagctattgcatccacgagctgatctattcttggaagtggaaaacagtctttggggcacgcgttgttgaggtcggtgaagtcaatacacactcgccatttttttgttaggcttgggtacaagtacggggtttgatacctaggccgggtagaaagctgttggaatatgttttaccaggatctagatttactacaatgtatgttatttaacatcctaaatatgaatctctaaaacaa

SEQ ID NO: 105172 - DNA, 592 bp, Cannabis sativa
tataatttaaattgataattatacacatttaaattcttaatacaaagctgtattaaattaaattaaatattatttttcttagaaaaatatttgatatagtggcactttttgtgtgtcactatatctctaaaattattaattaaaaagaaaaaaaaatatatactgacacttcatgtgtgtggctgttaactttttagtctgatgaaatctgattctatacgcctatagtgacatgcaaaaggtttcagtgacacgtgtgaagtgtcactgaaaattatctttccagtcaccctcattagtgacgcgcattgaagtgtcactatacactttagagttactcaatgtgtgtcactaaaacccgatttactagtagtgttattaatatattagggaattaagtcgtgtgccaattttactctttttttgtattttgtaataattaagtgatataatttaaaatataatattttaatatgtgtattattaataaagtaatttttttaaaattagaaacataatgtactctttttaaatctataggaatataataaaattatgaaattaaataaaattacatgtctttataatcaaa

SEQ ID NO: 105173 - DNA, 2559 bp, Cannabis sativa
  modified_base (2531)..(2533): a, c, t, g, unknown or other
taagcaagctaaatcgagggttcaaccaaatggtctttacacacccctacctattcctagttcaccatgggttgatatttcgtttgattttgtgttgggtttacctaggagtatacatgggaggaattcaatctttgtcgtggtagacagattttctaagatggctcattttatcccttgtcataaaacggatgatgcttataatgttgcagatttattttttagggagattgtgagattacatggtatgcctaggaccattgtatcagatagggatgctaagttcttaagttacttttggaaaatattgtggggaaaacttgggacaaaagtattgttttctactacttaggtcaaacagaagtagttaatagaactttatccactttattgagggctatcataagtaaaaatattaaggcttgggaagattgtttaccacatgttgagtttccttataatcgttccatgcattttgccactaaattttaaccttttgaaattgtttatggttttaatcatttgactcctttggacttatcaccttttaactgtttctgagcatttgaatttagatggaaaaaagaaagcagaatttgtgaagcaaatccatgagagggcacgactcaacatagagagaggaccaagcaatacattaagcaagctaacaagggtcatcacaagcaggtttttgagcttggtgattgggtatggttacacacgaggaaagaatggttcttggcccaaagacattccaaattgcttcctcgaggagatggactgtttcaagtgcttgaaaggatcaatgacaatgcgtaccgacttgatttacctggtgttacaatgttaatgctacttttaatgtttctgatttgagcccttttgatgcaagtgatgatttgaggaaaaatccttcgtaagaagaggggaatgatgaggacactaaggctaaagatacaaatcaagttccagttggtctggtgacaaggacgcgagccaagagattcaaagtggaacttagcatcctagtccacaaaattctaaaacaagaggagaccgtggtcaacactgaaagagaacataaatttgtgcttctcttcattcatagtgaccaggcaggccgttccattatcaggcttaaaccatagtgtttgaggctcaagagacattttttaggaccgctttttaactttcacacgaacaatgtgaaacatgtaaaagtagactcaatttagactcaacttaggagtgatctaaggctgatcacgtttttgatagctattggcaactttcctttttaattttttacctttattctatctttgttttatttggaaattgtctttattttggtttccctttttcctagttgtaagttggctatataaagttttgtaaacactttggaaaatcaaattgttatgaagattaattgaggggttttcttcttgagttcttgaaagaactattcaaactcatcaaggagtattccttctggtgttcaacctgacttatcaaatgaatttccatcaccgtatgtggcgtcttccttcatactaaggttcatgcttaactaagcatcgtgttgcaatttcacatcccaaaattcatgaattcttggatgctaccataattggtgtcgggtttcttcgcaactattggtgtggttcatatatatgtgtgtgtatgattaactgaaattcatctagaaatacatgacatattgcaaaccaactacactgctttaaaatttttaaatttttaaaatttttcattaaagaacctttctgtaagaaaagaaattcaaaggtagcagttgtaaatgagatataactcataaaaacaacattaagctacatgcaaagctgaatactaacgactcgcattttgcaggaaagtattaagcgagacaccaagatgccttgaaaaaatacttaaacctaaaatatgaatagaaggcctaattattcatataagcaatcaaaaatattcaaagtgatgaatcattaaaagtatatttaatttttcttaaaacagattataactgtttatgtgaagcagaatttgcaattgctcgcaaatcgaaagcatagtagataataactgctcgcgcacatagtagattactaactacttaaacaagattgagggaaaatacgagcaatggaaaggcttaaagtattttaaatttgatcaaaatattatagtttaaattgtgaatgaaaatacaaacaaacaaatatatcaagttcaaatataaaagtacgtggcattaaataaaagataaaataaaagcaaagttggccgccaaccttacaaatttttctttacaaaagtgccacaaagggcaaaccattgtctcgaccttatggccattttcctaaaaataaaaaaaggtgaattattaaaaaccaagcctacatagtaggagacttggatggtccttctttgataacttctcctgatacctcgacttcctcttttgcctttttcgcttgctcgcagtaagcaagtgttgggttttatgcccnnnataaaactctttacaatctgattagt

SEQ ID NO: 105174 - DNA, 798 bp, Cannabis sativa
agtccacgtgtcaccattctcgtgatgccacgtcagagtgccaattttgggataacacataggataagtatttttattataatttttaaattattaattatgtgtaatttataatctaagatgaagatttaacaatttttttttgttttgcttcttcaatagagtatacattaaaattcttgtatctttgagtctctatcctctcttgatcagcagaagtttgtattatctaacactttgttaacaattcattaaaaatacttttaatatatttagtcttttcttgagaaataaattacaaaatttagtatttttgtcatttatttgagtatatattcttgtactaaatatagatgcatctcaattgtgaatgtattttttctatttaacatttgatataataatataaatattatttataagttttattgtatatatttacataaaatattatattacatattacgtaagtttaagttctatttctttagataaaatgtttaattattaaaaaatattacataaggttgttattctaattcttaaactataataatattatttaatttattttaatagaaatcgaaattcggtttaactaagtttttttttacctcttattaatcagatatatttcttgaattccttttattccacatatgttgttgttacatcttttggtgacttgacttgtatttcgaccgcttatatatctgcttttcgaatgtcaaaatattttaaattaattaggactttgcatagaaggaaaatattattagtatattaaattaccaattt

SEQ ID NO: 105175 - DNA, 681 bp, Cannabis sativa
aacaataacgtttttatctgaattctgaatgcttctaactttaagacatggaaacgagatgtgaaaattactttaggcataatagatttggacttatgtacttttttttttttactaatatcagcattgtcgcctaaaaaattcttcatgcacaatggaaaaattcaaatcatcttagtctcattgctatgaaagttcaattccaaaacattcatttaatggtttgccaaacaccttaaatgctaatgactttttcaatgctgtagaaaaattatatgacactagtgaaaacactgcagttgaatattttatggatgaaatgagaaccattcagtatgataaatcaaaggagtcatctaaaagaatttttattcctatgtctttttcaagagatgataatagtagtcttaatcctgctccagttggtaatgctctcattgttgatgaatatattgctcctaatatctaagatgacgagagtcctattattaatgaggaacttattattgaagaaggttttgttgctgatgaggattctgttatcgaagaaatctaattgtggaatatgtcatttaaaataatggtcaacaaataaaggttattccagaagtacctcctatatggagatctcaaagacaaaagatgtcaataaggtgtgatgataattttgtttaccttgga

SEQ ID NO: 105176 - DNA, 775 bp, Cannabis sativa
tcaagaagtagcacttgatcacgaacaacattgtaggactcattgagacctttgagaaactgtagtacctgatcatgattgtggtattcttgttgtttaacagcagccacacatgtacagggaatttttgggcgaagttgagtaatttcatcccaaagagctgttagtttagtgaaatatgtactaacagaatcttcaccttgagaaaggaaggtgagattttcatttagttcaaaaattcgtggaccatttccttgattgaacctattattgagttcagtccacatgtctgcagcagtatcaagatacatgatactgcttttgatctcgggtgaaaccgagtgtaagatccaagattggaccatttgattacaacgaatccaagaaccatataaagaatcagtaggagaaggtttgggaagtgtaccatcaagaaaaggggttttgttgcgagctccaatcgagagtttaaaatctcgagtccatggctggaagttcctatctgtcaaaaccggggtgacaagagcgagtccgggatgatctgcggtgctgaggtagtaagggctgcgtacatcctcataagccggtcgatctccattgacatgatgggatgatgcagctggaattggaacacgaggtggaggatttgcagaattctgggaggctggagtaacatgattcggaagtgcatcgtccacgggaggatcagtggaagtagcagacgaatttgctctcgtacgcaccattgttgaaggcagaggaagctgtgtttgtt

SEQ ID NO: 105177 - DNA, 509 bp, Cannabis sativa
caatttgcatcatttgagttgctgctagtaacaatgttggtctgtggtttctgagtttgatgcaagccactgctactggtgtttggacctgtctgtgaacttaaaaaattcttgtcaaaccgataaaagcaatcagtagcagtatgaccatacctcaaacaaatttggcattgaactttgttatccagattggaaccaggtctgcctccacgattgggaaaaaaagtgcctctaccagacgcttgaccgcgatttgaaaatgaattgtcaaactggttgttaaagttcatgtttccattttgagattggaaatttccacagccaaattgctgtctaaaccttctctaggccagattggcttccatagttgagtcttgatcgtcagtaacaagattagcattgagatctagttcttttccagcttattcaatccttgactcagatgcaagaagtagagcctcaatttcccctacagtgtattcttcaacccgagtatttgttgagatgac

SEQ ID NO: 105178 - DNA, 602 bp, Cannabis sativa
aatatgtgaaattcttccacaaaatcctattataataggaacacgcctgaaagttgtttcacacaacggttagatttatttcacctaattatttagtattattaaaagacaacttataatatattttcttaacaattcaataggtatatctttatcatccaagcaacaaagttcatttatcattaatcttacaaatattccacaaataaatgagcttcgtcaatggtaaactaatttatacttattttttataaattattctttattacacctatccataaataattcttatatatctaataattttatcctataaattaataggagcattaacaatgaagaatacctatctgccattattaatgagaagagactctttccaagccaaactgctctaagaactcttcaatataataatatcattactattaatggcattcaaaatcttccacaagaggtatgtaaaatatgtttatttaacttttaattaattaatgagtttcttttctcagtatttatagtgtttataattatttttggctttacataatattatatactttatttcaataactatattatgctttattagcaaactactt

SEQ ID NO: 105179 - DNA, 1025 bp, Cannabis sativa
aggaagttgcgaatatgtgattagtagtttgtcataatctgtgatttctgcctctctatctgggttgttttaaagttgctcaaccatttcctttgccacaagttttgcatggtccatgaagtcgaacattgtttcaccatcttccagcattgtgccttgcattgtatgttcttgagttgttgattcttctattggtggtgcattgtcttccattgtttctattgcatttgtttttgcaactaatgagttgctcatttccaagaatgatggattattagttattgttgtgttgctgatcacgttcacacacaatggatatgttgtgaagtcaggttccttcagtttttgttgtatgtagaagtataggctttgattgtcctttatcttcaacggttggtatccttctttcacttggtatttcagttgcaggacagtgttttcttggttgcattctaggacttctttcaacttgtgtattagttcatcatatttacaatcgattgagatgtattgcccactagcttcataatttgcataattcattcgatcatcaaattatccattacaaaagactaggaatagaatttcgtctttttcttgagattatgaaattgttattattgcaagttaactttttttgaaactataataaatctgttaatgtttttgttatatatgattcccaacatttttgataaaaactcaaaaaacaaaaattaaaatactttgtatgaagtaaaaaaaaaaaaacttacttctatcgacttttttctgttcaagtcatgtattgtcaattctgaaccctgtattttacattattttttacttatatcacaactgttatgcaactacaataaaactaaaatgcaactaaatatcaaccagttgaataaattcatataactaaccatgttgtagaagttaatttgaagtgatttctcttttcgctatcaaatgaaatacctgcaaatttgataaacactattatgaaatgataatgcaactataaaacaacctaaaaaaat

SEQ ID NO: 105180 - DNA, 626 bp, Cannabis sativa
agtttagtacccatagcccgttgcaaactctgccaaaacttagaggtaaattttggatctctatcctaaactatggactttggtacaccatgcaatctcactatttctttgatgtacaaatcatcgtactgatccactgaaaaggttgttttaattggtctaccacaacccaaatagaatcaaataaacccatggttctaggtaatccaaccacaaagtccatcgtgatatcttcccacttccactacaagaaatgtcacttttaccagcacagttcgctactacaatggtaaaaattagcatttcgcaaactgcgttagcaaagaggtcaaagttttaccagcgtacatttgcagtggctaaactctaacttttaccagcgcatttacgtgctgggaaaagtcatctttgttagtgcttttcattttatgctggcaaaagttctaataccaacattgatttgccaacccctttttaccaacacatcacaagtaaattctattttacaagcgcatttatatactaacttttggcaggacaaaaatgtgttggcaaaagtgacatttcttgtagtgttccattcaggtagggttaaaggctggaacaaccctgccggtctttgatgt

SEQ ID NO: 105181 - DNA, 612 bp, Cannabis sativa
tgagatggtggcaccagctatacaggcaatattttctagtagtcataagctagagcaaatggagttttcccaatggccatcttctcggtagtcctgtgtgaccataggtccccagggagcgattcgggccaattgccctttgtttcctcaaggtgcttctttagggtgtccttaagggtatggttgacagcttctacctgcccattttcttgaggatgggccacaacagagaagcttttgatgatgtcatgtctgttgcagaatttagtgaacatgtcactataaaactgctttccattgtttgacataatcttctgtggaaatctgaatcaacatatgatgttcttgaaaataaagtcatggacttttttggaggtgattattgtcaggtgttcagattctgtcaacttggtgaggtagactactacaactacagaaattgtacccctccttttccctttaggaaatgaccaatcaggtctatcccccacactgttaagggccaaggagattgcatcattatgagctcattatgtgtagctcttggaatttttaagaatctccggcacttgtcacatcttttgacgtagtccattgagtcgtcaatcattg

SEQ ID NO: 105182 - DNA, 4738 bp, Cannabis sativa
tttattaattccgaagatataaatttttagggcgaataataattttttttaattactattataaagtataatagtaattatgcttttaaattttaatagttatcactacattgaatattattaattttaaaattatgatattaaaaaaatactaaaaactaaaataaaattaagatagagcttacttggcacctaacatatctatctagtaaacatgcaagcacccaataaaacttgccttgtcaaagtcaaaaacaaaaacattacatagtacgcaacaaataaaccgaaatccaaaacaataccaacttctgctaacataggtgcagaaagaacaaacttaagacgcatgagcttgacgatgttgaagatgaggctttcaagttcaacctcatccatgcccaccaccatccacaaaaacaatctttttctctttctcacttcatcatcaactcttcgccaaacccaacttctttccttccccagatcatccttcaccgtccattgcatgtcaacccagaaacgaaacatctcacccgtcgcttctactccccaaaatgtgtccggcaagtcctctttccaggttgggttttttttttttcaaaatatattggctgttccataatgaaattccacttttaggtttcgctgaaaaaatcaaattgcttgattttgtagtgtgatgtcgatttgtttagagttaacgtagatttttttttatatatatctcaaagagttagcgtagttagcttttgggttttactcgtacgtagctgactggaacaccttttaggtctagaaagtgttccatttccctacacaattttgtttttgaaactttgactccatagtgattatgaaattctgataataatgtacattgagtgattgaaagtgtgtttctttttcgctgcgtgtgtctgtctaaactatctatagttgaattggctgtattttttattattatgattgacattttttttttcaattaccctgttgcagggtagtgaatcatttttcagaagcgtcttggcaagtatggagacagtttacttaaataggaaccccactgcaaaagccatcctggaacttgttcattctgctgatgaagaacgaatttgctatgatcactttgcttttaggacctttggggtagttatacttcaacacttacatcattcgtctgcctcctattataccgtgatatataatttgttctcctgatacaaaatgtgaagaaaaattcttttgtgattttgtttttgtaggcctttgtgcttagattatatttatttttctattgttgggaagagtgtcaggaataatgaaagttgaagttttagtttttgtcatttggaacactaggtggatggttatgggattgactccttggcaagctttttcttggattttggctataccccaagggatgagttaaggtttcctgccaaaaaattgagagcactatggttttctcctccggaaaatgtcattggtgagggtggtagccgcattggtggacctttgccaagaatttttatatcagagcttcttgtagatcaaatgagtccacaaactcaggtacattatctgttactgctaacagtagaatcacatcaactacatgtttatcaaataactcaaagtaacttccaactgtggcaagaactaaggagtgaagcaaacagagaattgaaacagtagagaaaatgatataagaaatgcttgtgtattatatggaaactctgggttccaaccccttcttgcaaagaagactctttctctttttatagggtgtgttttacaaatgaatttacataaaatgttcctgtgaataactataaaaagagaactattacgcttgtctagtgcccattacctacttgttaagtagtggtggtggcagcactaattatcagggcagagtcaggtgtgtagttaaggtacatgcacatggttctatctcaaaaccaattggtaatgagaggagtacaccatgaatcttatatatgttatttagtttctacacattagcaatgtaagactctctctaacatctcctcaagatagtggctattttttactaactaatcttggacagcttaatcacaagctgctctttttggttcattatctctgaatcacaagtggcttttttagctctatttttttggatcggttttcagatttttggtggctctttttgggccctacttttcttttcgatcaacttttttattttggattggatactcgttagagtgtagttttggttctaatagcatgttagaattgtaaaatgttgtgtaacttttaatttgtactgtaaagtttactggtttttttttttttttttgataagtagtaaagtttactggttgaaactttatttttttgcttgaaactattactgtgaatattcaggaaataatcaggaagtacattgaagtatctgttagtggaaatagacatgctgcccttgctagtgcactaggctctttaacatgggagaagccactcaattcagaatttcaacagttggtcaggtgatattgatatcattttaagtttggatacaattagaatttattgatcttatcagttgcccacgtattatatttgtgaccaacaatccaagacattgtaggaattttgtctaaagtataaaaaaaagtttgtgtttgctttatgggacagggaaagtgaatatgctgcatggactcttgttaatggctatgcactaaaccatgtcacaatttcaactcatcaactgaaatctaacttgagaagcataaaaaatcttaatcagttcatcaaagaaaatgggttcaagctgaattctgaaggcggtgtactgaaaggttgttttgtaaaacttctaaaggtataggtgtaggtggattcttaattatgagcatggcactgaacattgaaaaaaattcatttaacagttagccctgatggtcttctgctacaaagttcaactgttgccgattcaacttctttcacattctcggatggcgcaactgaatctgtcccatgctcctatatcgaatttgcggagcgcttgatactgcctcagtataataatttacctgaagaggaggtaactgctgttaattttgctcgtatatattttgaaaaattggttgaagtgtaaattcggattagtaaataatggttctggttaatagtttattgctgaactcaatgtacatagcttgtcaatgggaaacttctgttttgatcgtgtttaaccaccgtcaattttgttccaaaccttattaatcactttttttcattacaacctgatcaggtcaaagagtaccataggcgagatggatttgaggttggaaatgctgacaagatctttgagagcacatacaaagagcagcttaccagagaagttgcatgaacaatgctcgagcacaaacgagtcatcaccttgttccaaaaaataaatagacaaataaataaaaaggcttggaaagtagaaagaatgtagatacgtaatctctacaaaattggagtaagtatttaggcagaaacgcaaatcgctatcgaataaagtgggtgtttttctggaatggaatggttgcttaattacttatgattaaatttatgctaattaattatgatggtctgctcttatcatgtttctgcaaattactataagattaagctccaaataaaataaattataaataaccaatttaagttttgatctatgttcaaccaaaattcaattatattttggtctaatcttgaggtcaactggaccagcatagtttgactgtgatatcattttgaccttgttatggtatagaaagatacatgttttcataatatgattactttttaatggggaataatatctttgagagcacataacaaagagaggctatcagtaaaagttggctaaacaatctactatacaatagcacaaagaacaaaaggaggaaagaatgtggtaggagtgaaagcaaagtagtagagtagtagagttgataatgataggttgatagtggtctttatggtttaattaataatgagtttgcatttttggaaaagattaaagcagtagcagagagcagaggacatttggcaggtgagggcgtgtgatgatgatgatgagcatactgtttcacactgcatagaatagaagctgagttgtataagtgatgtggatgaagttttgaattaaacaagttattttaagattgaattgaagtctgcttttttgttttagtatattgctaggtgagtgtgatccaaccaacattgatctctgttattttccctaggatagaactaagtgaagagtacaagtgtactactatctttctttacccaatatataaatgaataaaacatcactaacaagcaaacacctttattatctctctgttttttattatatatttgtacacatttataattctattgcagagcactttttgctagacttgaataattaaatagtaatactaactcgtcagacagtgcacacgttttattttactattgtctctctctctctctctctctctcgtctcttgactcttgagcgtttcgctttctattgtcacgtcttgtttatttgtttccatatgatctttttgtcttttcccacaagccaactacgcatattttaatttcattttttgggtctaccacttcgcattggtctgagagcgtttcttggtttttccaccactttcttttttggaagaagata

SEQ ID NO: 105183 - DNA, 589 bp, Cannabis sativa
tcctggatatgaactcgccaacaacaaccaaagaagttcaaagtttacctggttggatcgtcgcgctcagcagatttgtttcaaaatcaacagacaagtgtgtcccattcttcaacatcctgcgatgaaacaagcagtttgagtggacaaaggagtgtgaaaaagctttctaagggctaaaggcacaacttgaaaaacctcctgtactctcaaaacctctggacatcgaggtactgggaatataattggttgttacagaacatgccgtgaacgccgtgctaatcagagaagagaaggatatacagcacctagtctattacatcaataaaagactcattgaggccgcgggtcgatatccgttaatagaacaactcgcctactgcctgatttcaccaacaaggaagttgaggccttatttccaagctcatcctgttcgggtgtgttgacttcgcttttagcaacaacaatgagtccttttaataagcgataaacgatacgtcgtaatgagtatatatataagaaagcaataataaaacacaggaattttatagaggttcagccccgagcaattcggtaatagcctaatcct

SEQ ID NO: 105184 - DNA, 958 bp, Cannabis sativa
  modified_base (365)..(378): a, c, t, g, unknown or other
tttcatggtaaacgacacattaattaaagaagtttattgcatatcagtccagtcatgcataattaaattatacacaacacatttactacatgtctatccacatatgtgaaccgaatcaaaatcacacaaactagaagtatagtgtatagtaaactgtacttattaattccatattaaagaatctcattactttaatacactaccgacttattttattcatgtcgtataatcttaattctcttgtacgtcctcacaaaattatactttctccatatgaataaggaatttttagatatttaataattatactattataattaatgtattgtttatcttataattatatttcatatattctctaatannnnnnnnnnnnnntacttgcttttagggcataaatctcaacaatcggttcaatataatgaccagcaacactgacgaaagcttcagcagtgtgaatgaagaatttaggaaatattcaataactacattcattgaatttattaggttcacattacaatcttagttcacagagtgcctcaaaaaggcagaaaaatgtacaacccctttagggactctttttgaaaataacttggcaaaaaatataaggatggaaggtttaggcgcatccagcaaaatagagccaatttgtacaacattagtaggaggtcaaatagtgaaagaagtggtgatgtgaacctagttgaaaagacatgaacatgtgacgtgtttagattgctaaaactcccttgcactcatgcatatgtgtcgcggcgtcgaaaacgaatacaagtgtgtacacgttgtgctctccttattatttgaaagatacatggaggaagacttacaatgataccatcaatcttgcgggtgacaagggtgattgagttttcccaaaatacatcaagaacatgaaggttcgggtacctgtagagaagaaactaataggtcatcaaat

SEQ ID NO: 105185 - DNA, 1451 bp, Cannabis sativa
  modified_base (1369)..(1386): a, c, t, g, unknown or other
aggattaggctattaccgaactgcccagggctgaaactctataaaattctttcgtcttattattgctttcttatatatatattcccattacgacatgtcgtttatcgcttattaaaaagactcattgtcgttggctaaaagcgaagtcaacaagatattttatagttttttatagttatttttcctgttatttttgtgtttttttaatatagttgttgtttagtttatgtacgtcttttatcgtatatatttttccgtttattccaaaaaatatttttattgtatgtatgtgcattttattttgctatttttatatattttttaattattttaggtggtttccataattattttttgttgaatagttatttttcaattttttttattcttgtgtattgtttataatgtatatttttaatttacttttgataatttttttttgtttatgtgtgttgctttgtaaatatagatataaattcatatatttagttttataaaattttattatttttataataataaaaaggtaaataccattttggatcttgtgttttgtaaaagttacagattggtccctctgttttgttaaatgataaaatggacactgtattttctaaatagtaaaaataggaccttgaacttaattttagacaattttttttaacataaccagcttgaagacaattcctaacacgaacatatacagaaaatgtaaacagttttgtcataacacatttagatcaaatttttattaaattttattttgacaaaaaatcagttcagagtcttatttgtaccattttagaaaatacatgatccattttgtcatttaacaaaacagaggatccaattggtaacttttgtaaaacacattgtgcaaaatggtatttacccttaatataactatttaaaaaaatttaaaaaaataaattatcattttaactatcactaactcaaaaagaaaaaaaataatataatagtacaaaaaaaaaaaaattgttcaaaggtaagtaaaaaaaatcgtattgaaaaattgatatcgttttacttattgcaattaggttaatatttgattattttttttttttgttgatttgtagttatctttgaattgttttcatgtttttttgttaaattgttctaggactgttttggagttgttttttaatttactaaaataaagtattttgtaaacttggtactgtaagaatgtaaaaatctctgtatcccaatatatatatatatatatatatatttttttgtaaatattttccctatttttgtaagtttcccacaattaaataagtcaatagtcgactagttattaaggttcaacccattattaaaaagagaaatttacatggtatannnnnnnnnnnnnnnnnnttacaaaaatactgtcaggcgatattttttacttttttacggtgtttttttataagtttcatact

SEQ ID NO: 105186 - DNA, 643 bp, Cannabis sativa
  modified_base (44)..(62): a, c, t, g, unknown or other
  modified_base (165)..(174): a, c, t, g, unknown or other
  modified_base (266)..(274): a, c, t, g, unknown or other
  modified_base (379)..(379): a, c, t, g, unknown or other
aaaaaaaaaaattaatatatgaccataaatttaaaaataagatnnnnnnnnnnnnnnnnnnnaaataagataaaaaatcaagcaaaaagatagatacttacttgttttcaaattcatattacactaatatctaagattaattttaaaaaaaattcaaattaattnnnnnnnnnnattagatttgaaaattgaaaagtaaaaatctaactacaaaactacacagaaaatcagaagttaaatccaagaaatagcatgaaaaatcgaannnnnnnnnaaaaaatgcgagctgtacggagaaggggttgcactgccgagaaaactcggcgcaggggagaagctgcagcatttctgcgcacggagaaggggtttcagacacccntgggcgtgttgctcggacaaaaccttgtccgaacacgcatctgaccgtggatcactcggttccgcgctcgtgggtgagtgcatcatcccgatatttttttgaaacttcaaaaaatcataactaattcaaattaaatcgcaattgagttctgtaaaaaagtaaattgcttaatcttttccatactatccaacaaaaataattacgaatacagaatttcaattatttttcacgaaaattcacaaacattaatcaatcatcatataa

SEQ ID NO: 105187 - DNA, 645 bp, Cannabis sativa
gcagaatttaatgttgaccgtaaatacagaaggatgccaagctacaattattctccctttatccatccatggattattattagtgaaacaccacccttaaaagagactacaatacaacttccccatattcttattttgcaccttagtttctaagagactaactaacccaactttctttgaataaatcaattgcttgatttcattatgtttttgttggttgttaatccccctcacgttccaacataggagtctatccattagaagtagagggatctccccccccccctcctatgttacactcttcaccaaccatctcacctgttacatcttccaaagacccaaatctattattaatctcagtatccacttctactctctccattaatactttctttccctttgtgaccttttgaaatccctctgtatccatttggttctgcatcatttctttcgattttttaggaagccatatttgtttcacagattcctccttactctctttcttcctacacgattgggtattatgacctatgcccgagcaattgtaacaaaccaaaggaatccactcatatttaacatccagcactatctcatgatcaaattcatcaataaatgaaatctgtttaggaaattcttgagatagac

SEQ ID NO: 105188 - DNA, 739 bp, Cannabis sativa
tcaaaatgacctttttttttttttaattttccttttcaggttggggttatcttcccaagaaccttcttgagttggttttatagaaacttagatacattgaaagatgctgtgacatttggtgctatttgtttcttgaattggtatgtcgtagctaaaaataatcaaaataaggtcatcaaattgaagcctctacccaaacttttgatgcccaactataaaaaagaaagaggcaataatatatggaaagtttatagtacaacaaactcatcatcacaacacacgaaaaaatagattaaaaaatcattattgttattgcttccttcctataaataaaccttttgctggctcatccttaggtttttttttttctttcttttttttttttttgatgagaggaggctcaattgagccaccagaaacaagaacaaagaaacagaaaaaaagtcaacttccagcccatacaaaggctgaacctgtctaacgaaaataaccgactaaacaaagtgcaactaaaactacaataactaaagacaaactaaagggcgacatagccatctacctagttaataggcaggaaactatcaaaattggccatgtcgatgttcccaaactgggatgaccgaatagaccattgagccacatcatgggccacacaattgaggttactgggaatccaactaacttcccaaagttccagctgatccacactgtagagagagagagagaagctaaacagcaa

SEQ ID NO: 105189 - DNA, 619 bp, Cannabis sativa
ctttaacatacaactctgcgaactgatccactgaataggttgttttaactggtagaaaatgagcagacttcatgaatcgatctaccacaacccaaatagaatcaaacatacctttggttctaggtaacccagccacaaaatccatcgtgatgtcctcccacttccactcaggtagggttaaaggctgtaacaaccttgccggtctctgatgttcagccttgatctactgacaggttaggcatctcgatacgaattctaccacactcttcttcattccgctccaccaaaagtaaggtttaagatcctgatacatcttggtggtgtcggggtgtagggaatatggagtggtatgagcctcctcgagaatttcgtttctaagttccgcactatttggaacacaaattctggctttaaataataacattccactgtctgacatggcaaaatctctggcttaaccagctgaaacctcttctctgatttttactaactctggatcagtcatctgagcgacttccgttcgttctaacaaatcagattgcagcgtcaagttgtgaagcttccatacaacaaactcaatgctagatctgaccatgtcctctgctaactgaggtgaaat

SEQ ID NO: 105190 - DNA, 519 bp, Cannabis sativa
caactccattaacatcttttttgggttcttggacagttcttgatttttcttgaattgttgctgtaacatttcttggagagattcttgcatctgttgatgaagttgttttactatctctcgtattgaatcatgaagagattccttaattccagaggtgtcaacttccaaagcttcacgatcttcttccaaaaccatggaggaatcacttttctccgactgctttcgaggttccatgtctgcaactcactgcaccaatttgatagaataatcctagagtagaaatattctatctgctatttcctaaaataaatactagtatgaatttctcaaataatctttattttgaaaaacaatcacgaagttacaatatcgagctttcgagaggctcgtctctctaaattcccaatctttcgagaagattggtctctccacaaagagtttactcttttctcattccaagctaatctaaatgaggttgctccctctctgtttataaacatagcaaaaagacttaggcca

SEQ ID NO: 105191 - DNA, 582 bp, Cannabis sativa
ggaaatgataaacaataaatacatatctcgtgtatttaaataacattagccatgttcattgttattcttattatactttgatgtttcaatacaatgttcttaacattctttttgggtattcaaaacccaatataaaattgcatcaataataattattttaatgattctttagttgtgttcacataaatacaatatttttttttataaatataaaacatttacttcatgaaatatttgccaaaatctatatcgatattagattacttttaattgtcctaaaagaatacaagaacatatatatgaatatatattcatctcttttattatatttcagtgagttatatgatgaatattacgtttgcataatcttcaaaatatatacaaaattttattgaggacgcataatgttcagaatatatgcaatattttattgagaatacgtaatcttctcaatatatacataattttataaattttctttatcatatcatagataaacaataaaagcatataatatatgtatatatatggattcaataataaacatataagaataagaacataaatatacatatataatat

SEQ ID NO: 105192 - DNA, 543 bp, Cannabis sativa
tatatttttacgaactcgtttccatccctaaaaagggagataaactcaaggatggattttatggtatccgggcccatcatttgaatgagggcccagtcccttttaattaccagaagcatgtgaaggaataccgtcaccgcttcttcttctcctccgggttccaggtcgtggatcatccgaagcttctgacagattgggttaggatccccccttatatgcggaccaaaccaacccaacttttccttcaacgggccaagaccttcgccacgtatgacaagaaggcccttgatgtcggggagttggtcacgacgaaaaattgtcggaaggccaagctgatcctggggcatcaatcggtggacgactccaacctttccaaagtcgtctgccgaatgtgagggctccggctgcggagaagatatttcgagacgacatcatcgccacagtaaaagataagtaccagaagtacctcttcaagagggaacaggaggtggcttatattaaggcccaggcgaccgccggaagggcccttcgtattggggctcc

SEQ ID NO: 105193 - DNA, 719 bp, Cannabis sativa
aaatttatttagatattaaaaaatttaattttatggaacaaacttatttttttctctaaaaatcaaaatttattaaagtaaatatatatcatattttgaagtttaatttatatttttattgtattttaaataatttttctttaatttttaagatattagtttgtataagtttatttttttttcttcacaaatttttagcttgtttaaaatatttattatatttttaataatttttatttgactttttaagatatgtgtttatgaataaaataaattttaatataatttttataaaataatttttttaagtaaacttttttaatatatactttttaattttttaagaattaatagaaaattataaatgtgatcataagcttagcttaatggttccacacttttccttataaaaagaggaggtccaagttcgaaactttcctccctcaatatctaaaagaatggaaaattataattttaaaaattaatttttttcaataaaaggaggttaaatttagtatcggtcaaagttgaagggtacaaaatattaattattaactctaaaagaaacaaaatttatagaagaaatataattatgtatctattatattttgagagttttttaataagttgttaatgtaatttaaaataaataatattaattatatttataattattaaataaattaaattttattttaaaataaattaattaactaaaa

SEQ ID NO: 105194 - DNA, 659 bp, Cannabis sativa
tcggagatatcattgcaacccccgctccggatccattttcgttggaggctccgtccacaaatactttccatgtttgggctgacggtgccggtatgttcgcggttgcttcggcttcattaaattcggtgatgaagtctgctagcgcttgcccctttatggaaatacggggtacgtagtgtaagtcgaattgacttaactccattgcccatttgaggagccttccggacgcctctggcttttgtaggacttgtcggagtgggtgattggtcaacaccttgattgggtgagcttggaaataaggcctcaactttctttaggccattaggaggcaaaaaactagtttttcaatgacggggtaccgcgtctctgccctatcatgtgcttactgacgtagtacacgggatgctgagttttctcttcttcccggactaaggccgcgctgaccgcgtgctcagagacggccaagtacaggaacaagtcctctccaagaacggtttttgacaggattgggggcttggccatgtgctctttcagtttttgaatgcctcctcacactagttagatcattcaaacttctggcacttcttcagaatgttgaagaagggaatgcacttatctgtggaccgggagataaaacggctcaaggcagcaacctttcc

SEQ ID NO: 105195 - DNA, 522 bp, Cannabis sativa
ccttacctgcaccacatagagagcgcacccatgtgggtcactcaacaagaaaagtaataaagaaaattacatatgataattaattagctatattaatatcataacataattaaatattaatactccaataattatataatataaccaatcatatttattaaactgaatagtaatcatctctgttacaccacatcgcctaattaggcaagacgatgcttgaacctggtattcatatatcgcattgcctaatcaagcaagtccatgccacaatctgacacccatatatatcttattgcctaatcaggcaagcccatgccataacctggcacccacatatattacattgcctaatcaggtaagcccatgccataacctgacatttacatatatcgtaatgcctaatcagacaagcacattccacaacctgacattcaaatctatcgcattgcctaatcaggcaagcccatgacataacctagcattcacatatatcgcatagcctaatcaggtaagcccatgcca

SEQ ID NO: 105196 - DNA, 2754 bp, Cannabis sativa
attgtgcatctccaatcatttctggaatgtgatcatcctcatagtccaaattaacacccttaaccttgttagacttagacgttccctcgcccggaactctattcttttccctgtggtaaacttaaaccttataactcttgtacatttcattcctaaataaatgctcatttaccctagtaatgtccatacgctctatgttaccacatttaagacaaggacaaagaaccaatttaagatttttggcatacttctgacaaaagtccaagaaatggtcaacaccttcactatactccgctgataatctattctcactcattcaatttctatccatttcgaaacttctaaaaaaactttattcaattatttgattaaatgtgtactaaataatcagttaaattaattaccacaaacatatatattttattaaattttatgcattttagtgaaatatatcctaattcgatctagcaaaattttggcagcataacggctgtaattggacattcccaaaaattaaaaacatgaaaaaaaaatgattaataaacataaaataatacaataataacaaaaaaatattaataatataaaatcatccacccatccgaccgcagtacatgtatttgcagaacctacttcactatagatgaatatttaagatattcaaactcttctaacatgcatattccacccatctgaccgcagtacaattaatcacagaacctacttcactatgcatgaatatctaacatattcaagctccactaaacaaagaattataaatttttagagattatacctttctctagtaaatagagctacaattgcgcaatcttcaattaacacaaagaaccaaaaacctacaaataaatacatacacaaaattattaattaataattaattaaatgattaaataaaactaattaaacttaaacttaatgcataaaaaatagttaaatttttaactaaatttttgttttacctaataataatttataattataactaaactaattaaatgaataaatttttttacctatatcaaaaacttttcttttcaaaaaacttttctccaaatattttatacatacacattaaatcttttacaacaacacctaattttataacacattacatttttaaaacacatcaaattttcacccattaaatttatacaataagaactaactttaaattaaaaatttaatttttctttcctaaatattttcacaaataaatatatacattcagttttaaaaaaaataaatttattataaattaatagatttataaataaatatataactatatatttacattataaataaataaataaatataaatttacaccttcttctagaagacctgcggtggtggtggtggtgctccgacatcgccgtagtgtagtgtggagggagatcgtgcggtggagctccagagttctcatggtaggtggtgcagtggggctttgaagttcttgtgcggtggtgctcgagcaagagagagagagagagggaggacggaggcgctttgatggaggacggaagtgcgatggggtcgagagggtgggagatgtgatttcaagagggtcggagatgtgataatttctagagggccggtggtgttagctcgagcaagagagagagagagaggttatgggaatagaggttggaggcgcataaatggggttaaagggctgctgtacggttgtggaaatgaaaggggaaaaaatttagtggggctttacccaacggtttaaaaccatcaagtataatcccgtattttttatttcctaaaaaaacgttgcctaattttttaggcacagttgtaaaccgtcgggaataccaatttttcctgacggttttaaatagttgcttaatttttttaacgacggtccccaaaaaaaatcgtttttgggaccgtcgcgaattcattattttatagtagtgaaagatatcattgggcgggttgaactttttctaatttttaattgggcgggttacaattaaatatttgcaacccgatatttatattagattggtaaaaatatgctataacccgaccaaaccgaccgacatacacccctactattttttatgctttatattataaccacttacacacattaactaatatagggtaagcctacaatgtacctcttaaataaagtgtttcgatagattccctatctatttcagcatttgagagagtttttagtctaattttttttcataatcacataagttgtagctatttaggaccacgtgtaaatttttaaaaagttatgaatagtttacaatgctaaaaataagatttatatattttgttgcacacgtgactatttttcttatacgagtggtaagtaactgcttaaatcttatttttaatacggtaaactatttgtaaatttctaaaaatatacaaatggtcttaaataactacaatatgtgattgttaaaaaaaatagattaaaaaattttcttaaatacagaaacagatagaatctactagaataactgttggagatcaaagcatattgatcttgttcaacttcagctcgaaaccaaagacaactcacacacacatacaccagaacacaaacacttgagagagagagagagagagagagaataactaagaatattatcttcattgaatggtaataatagtgttgaattacaatgctaaaaacagaaaagaatagaggtatttatagggtaaataccattttggaccctttgttttacaaaagttac

SEQ ID NO: 105197 - DNA, 930 bp, Cannabis sativa
  modified_base (158)..(158): a, c, t, g, unknown or other
atgtcatccacgtacacttccatgtttcgtccgatctggtctttaaacatcttatttactaatctttggtatgtagctccagcatttttgagacaatatggcatgactttatagcaatacaaacccatatctattcagaaacttgtatgttcttggtntggtggatgcattttgatttgattgtacctcaaataggagtccataaagcttagtatttcatgtcctactgttgtgtccacaagctgatctattcttggaagtggaaaacagtctttagggcacgccttcttgaggtcggtgaagtcaatacaaactcgccatttcttgtttggcttgggtaccagtacgggatcagcaactcaagttgggtagaaagcttcgattatgaaattgttgttgcgtaccttttcgaactcttccttcaaaactagggctcgctccttgtccaacagtcttcgcttttgttgaattggtcggaagtttggatcaatgtttaggatgtgcgaaattccgaccatatcctcatgtgaccgggcaaaaatgtctaggtctgctctcaaaaatattatcaatgctgattttacttcgagcaacaaaccttttccaattttaagctttttggccggaatatcagggtcgatctcaatctcttcaagttcttccactggtccaacattgttgcttggtcccctagtcgaggatccacatcctcatccccaccttgggaagttccctatttagaaatcctttttcccttgtccaaactctggctagagggtacttcctttttagccttggctatggcaaggttataacattgccgagcaattttttggtttcctcttagacaccctaccccattctttgttgggaacttaaggcatgaatgaaatatcgacgtaacagccgttaagtcatacaaagctggtc

SEQ ID NO: 105198 - DNA, 630 bp, Cannabis sativa
actaagtattgtactacatgcactcaatacctaattgtactagtgttggtaataccagattacacctttaggttgtaccacatgcactcagtaccattattatattagtgttggtagcttataaaacatatactcgcttgcatatattatccatacacacatacatatacatactttatgcttatcatacctcgtttccagattcaagcgtgccggtagacttgaatggaaactcacgcgctgaacggatgcctaatgtcacaatcgtaaaaaccggtaaacaactttctaaaatctctttggggatctaaacttaaactaaaagtcccccaaacaataaaaagcataatggagctataaccatcgagaaaactcaagaaaaaaccctaaaatgaggaacctgtctaaaaaaacagcaggccatatttttctgggtactgcaccagaaaaaatgataggccatttttgccttttttactgtagaaaaacaaaaggtctttatttcgacccaaaatcaacccaaactccaccaaatgctccaaaacacctaaaatcaacaatataaaccaaattcaagcaacaaaaccaagtatagcacaaaattttataatccacaattgttgagccaag

SEQ ID NO: 105199 - DNA, 512 bp, Cannabis sativa
cgagtagcattaggcacattagtactgaagaagacagaggacttaccgaaattaacttgttgtccagaagcgagctcaaacagctgaagcagatgtaaaatatgcgaagcctttctgtcattcgcacgacaataaacataactgtcgtctgcaaaaagcatatgagatataaccggggcaccagtagcaaccttgcaccctttaagccgaccatccccctcgaacttccgtatcaaagatgagaagccctcagcacaaataagaaataaataaggtgatagaggatcaccttgtctaatacccctctcaggaacaatcgaacccagctcatgaccaccatgaattattctatacctcacagagctaaccgtagcaattacaagatcaatgtaataaatagaaaaatatttttaacttattgaaaaatagataattaaatgtatttttaacttatattttggtagaatataagtatatgaatattttttattaatataattgagagaattaag

SEQ ID NO: 105200 - DNA, 528 bp, Cannabis sativa
tgttcacctttaattatttggattatgtttctatataatacgcatattcactatagagtttttttaattttaaaaaaaaaaatcctacatagcgtaaaaatatgattaatgttagacttgtaacttataaatatatcactcattattctttccagtgattaactaaatcttacctaattaaatatttagtaaaataaaccattaagaaaaataaccaaaatttatgtttaaaatatcattataatttagtcattctttggagtcttttatttaaaaaaaaaaaaaaatccatatagtacaaaaaggagaatggtcacaacttggtaacctgaataattttggagaatatttagtatcgataatagtttgaagacatgattttttcagtagtaatttaggaacaataaacttgtttatttttataacaatttaagttgtacaaccatgaatttaaacataattttaaaatcattttaaatatattgatattgattgttttatttcattaattaacaatgagaaaaatgg

SEQ ID NO: 105201 - DNA, 511 bp, Cannabis sativa
ttgtttttccttatcaagaattcaatttcctgtttcagattgttgcattcattggtgtcgtggtcgtagtctccatgaaatcgaaaaagtttgtcaagtcccttttgcttacatatttcttcacgggcccgagcttcttatacggggcgagcgactgagtgggcatttaaacactttctatatccttagtcaagatggtaaatgcagtgtaccttgcttgattctcccagggatcctactcggttttgttggtgaactttgccttcttcccattcccttgcctgttgctgtttttggaacgtttaccatttgcgcttgaattatttgggtaatgggaaagttgggcggatgttccagtggaaggagcttttgtcttgccaggctttcgatcaccttctgctcgctaaatagtttcttcgagtttaatgaaaccttcagcacggtcgagaaaatcgctcattgagtctactaggtcgttcttccttattgaggacttcaatgcccccagtat

SEQ ID NO: 105202 - DNA, 630 bp, Cannabis sativa
ctctctatgtgtttgcttctcttggggtttcgaggctctttactattggctatagcaccagtgttgtcacaaagtaaaaccaatggtttctctattccagaaacgacaacaagtctttgagaaaaactttcttagccaaacaagttccttagcagcctcagtggcagctatgtactcggcctccctggtagagtctgatattgcgatttgcttagcgcttctccaaacaactgctccactctaagagtaaaaaccatcccaaatgtagactttctatcatcaagacaagcctggaaatctgagtcggtatagcctacgggatttgaagcaccacctttgtagactaacacataatgcctagtacttttcaaatatttcagaacatgcttaactgcagtcaatgttcctctgttgggtttgtctgatacttgctcacaattcctactgcatagcatatatcaggtctagtgcataacattgcatacattagactcccaactgctgaagcataaggaacccttctcatgtctgctatctcttgaggaacagtgagacactgttccttagatagacaaataccaaatctagaatgcatctgtgcccctttggcattggtcattgagaatctct

SEQ ID NO: 105203 - DNA, 500 bp, Cannabis sativa
aatatttatgtaggtagttagtgtatctatgtcatattattaagattgagcattgctattaggtaccagtggtgcctagcatcttctcgacatgtcgcgttgcgattggctagcgatattctttaaaagctattatattaaactatatatgacccgatacttaattggaccaatagcgatattgacacataggaaggtgctaagcaccactgatgccctttagcatttttctattattaatgaccatttttattgatactaatagtgcctaatattatttaaatgtagtattttttttattggttagcgatattctaaaaattattaccttaattaagttatataagattcaatgcttaattataccaataacaatatgtgataccaagaagaattctaaacagtaagtaccactactgtcttttaactttttttttattattattagaacattactattagctaccagtagtcccaaacactttttatagtcatctaca

SEQ ID NO: 105204 - DNA, 511 bp, Cannabis sativa
attacaagtacaatatccaacacattccgtttggtacgcaggactgaattggattatttatcccatccagcaggatgggataaataatcccggacagatgaggttagttggattagttatccagacttctaacatgcccaaacactggattggacaaattaacctgtctaatccaatccagtcctgtgtaccaaacggatagtaacatacaatgcatgattgctaagagttatattaaaatttctattacttaattatcaattaaaataatatttataataaaaattaaatctaacacaatttaattatattttttaaatatataaaacttaatttaatttttaatttatttataaaagaatatatctaactaattttattaaatattaaaataagtaaataaaattaaataatttaaataatataactaataaatttgttataaaatataattagttaaattaacgtctaattcaagatcaattatttaattttatttatatttttaata

SEQ ID NO: 105205 - DNA, 1156 bp, Cannabis sativa
  modified_base (927)..(942): a, c, t, g, unknown or other
aatcaaacaaaacaaaagaaaaaaatgattaaaaaaaacaaacaatctgctgcacagcttcactagatgcaaaatcaactatatttgcaagttcattcctagaaaatcagaataaaaaaaactactaaaacaaacctaaaacaacacaaaaacaaatataaaacaaatgaagcagacataaccgcttagaaaaacataaaagaacaacacacctcaaaactcttttgtcaatgagctcgtcaaatgtatttataggagaaccagaaaaaaaaaactataaaaatagccaaagagaacgaagaaaaaatgaatttataaccctcatcttccacacccacggacagaactaccacaacaacaccaaataaattataatgagcagaagacatagatatgagaaaaaaaaaccgagaacatatacaagaaaaaagaaaaaaaatgctaaaacaactgaaaaacaacataaataccttcagcactttgggtatctcaaaaatcttcatcatcaagttcaaaatcagaatctgaaccttcaatgatcagtttgaaacgttttgattttctctttttcaaagtgagtaattgatttccttttggttcgaaactataaaagatgtagggctattagatttttttaaaaaaatatttcttacccttttttaatttactaacaaaagcaagagaaaaaaaagtaagaagaagaagaaactagaacaaaaatggaagaaacaaaaaaaaaaagatgaagaagaagaatggaacaataataacgttaaaggagttttatttatcacttttttaaaaattttaatttttattaaaaaaattatcagatgtgacaaccactttcaaatcatcatttattgtgtcttatttgtgttgtggtaatttcaacgcgcaagtgcacgtatcgtgacaagtagtaannnnnnnnnnnnnnnngtcgatcccacaaggattgtagtttagtattttaaaattaaacttctaattctatttggttaaatgaaaattaagagaagattaaaacgagaaaataaaaacaatgaaataataagcaattaaactaataaagaaattgacagttaataaaaattaggactttgattttaattgtatctattgaatatggcttaatatgattatcttcctatta

SEQ ID NO: 105206 - DNA, 578 bp, Cannabis sativa
aatgtgggaaaaattactaccaactttgatactgcaggttggcctattcgagactcatgacatgatcctcgtgcctcaactgaccgccttagagagccaagttagaagttttacttcaaaagtcatggatcgaagcattgttcgacagacagaatcaaggtaacttaattacaatttatttttattatttaacttgaatttaatttgcatacttttatttatttacttttattgtctcatacagcggtgatagcgggatgtatgtgatagagcacatcgagcatagtatgctagagactacgtttgataatgtgcacgatgacaatatgaagaaatttagagagtcgtggtgtgtagatttgttttacgagaatttagcatgaacaattatgtttttttaattggtatttattaagataacaatgtaacgagtttttttattagtatatttatgttcttttttagttcataaaaactttaggcttttctttcatgcaaaaaattataataattatgtaaatagaaaatatcacatattccaaagtttaaagtacgtagtccaacattaattcaataac

SEQ ID NO: 105207 - DNA, 889 bp, Cannabis sativa
  modified_base (174)..(183): a, c, t, g, unknown or other
atgcacttagtaccaccatcgtactagtgtaggtagggtatgaaccgtaccccgagtactattaagtgttgtaccacatacaccttgtacctactcgtactaatgttggtaataccgtaatgtactctccagacatcgtacactttaccaatgcactctgtaccgctaccgtannnnnnnnnntagtgtacgaatcacaacaagcatgcatatatatcacacatacatacattcgcatatatatagtctgttctatgctattcttacatcgttttcgtgttcaagtgagttggccgacctgaacagaaagtctcgtgcttgatggatgccctaatcacaaataaaaccaggtaaataacacgccaaaaccctaatttgggaaacccaaacctccaacctaaggttttgatattactaattggaactacaatatcccaggaaataggaaaacacccaaccaaggctctgaaatggatgtgaatcgaggaaatgaattgtttggggaatctgccaaaaccggttggtcctggcaaaccaattaaccggttggcactaggtttccccaaacaattccaaacctgctcaaaacatgtccaaatgccaccaaactttctagaaaacctataatgagcttacacaaccatttccaatcaatagaataatccagaagaaaattgcacaaaatcaaaacaagccaaggatgaaccaagcttgagttttcaaactcaaacttgtgcatccactacccgacaaccctaaaccagcaactagatcatcaatttaactcaaattgaacttagaaaatgaattacaaaacatcttaaccctaacaaccaccacaacataaaatcatacactaaagctcttggaatatattttaccaggatct

SEQ ID NO: 105208 - DNA, 515 bp, Cannabis sativa
aaaaaaaaaaatatatattaataagtaccaatagtgcttaacatattcactaaaggccggccttagaatttttattttgtgagcacttatttattatcaaaaaatatttatacatatattataatcactctagatttatttaattttgtgggactttttcattattttagtctataattatcaaattaaaaaaaaattgaatttaattttttaaaaggtaatatttttattagtggggccatagcctcacattaacacaagtggttctgagcatacttttattgttattggtccaatttaatatcaagcataatataatttaatgtaatagcttatcacatgtctagaagatactaaaagctactaacactcaataacaatgttaaaaaaatagttcccactaacccgaaaattttttcaccatttacaagaaatttttacaccatatcaattatttttacagaagactattatatcggcgagtggggatatcttaaggcttttacaactttcaa

SEQ ID NO: 105209 - DNA, 565 bp, Cannabis sativa
ctcgtccaggttcttcccaatgtgaaaatagtttgtgggatttcttgggccgagaataatttcttccaattcttcaattggttttaataagtttctttcatccttaacctgacggtcaagatcctcgtccttcttttcgctttcatctgccaaaaccaccattagctggtgaccgacttttctatgctgcaattctatgcgatagcaatcgcaagctaacatccgattgcctcgcaccactcctacaccttctggtgtttgtaacttcagggataggtgcttgatcgaactaactgcccttagtccgatcaatgctgggcgacccaacaatataatgtaagccgatggcaggtcgacaactagaaattcttgcataactgtggcagataggggggcctcacccaaggttaatgcaagctcgattattccttcactagcaatactgtcgccagtgcagccacaaagatctaccatgcaaggcttcaatttggcttttttgagccccatcttccttagcgtttccttattaaggatgtttatagagctcccattatctattaacacc

SEQ ID NO: 105210 - DNA, 500 bp, Cannabis sativa
tggtcagtataaatctcacacttttctccgtagagataatgccaccaaatcttcaaagaaaaaactatcgcggcaagttctaagtcatgcgttgcgtatcactgttcatattcctttaactgacgggggcataagcgatgaaccgatcgacctgcatcagtacacaccccagaccctatttggatgcatcgcagtagtccacgaacttttctttatcagatggtagggctaaaatcggagttgtgatcaatctttgttttaactcttcgaagcttgcttcacacttgtctatccacaaaaactgctgattctttttagtgagtttagttaagggggttgagatcttggaaaatcccttaacaaattgacgataataactagccagacccagacgaattcattctcggccaatccctgacgaattcaatctcggccaatccctgacgaattcaatctttcctggatcaaccttgatcccatctttgctgataatgtgccca

SEQ ID NO: 105211 - DNA, 590 bp, Cannabis sativa
agcagttaacatcatttgaatgtcagcttctatttgagagagctgactcgatgtagcagtggatctcattgaaagatgtctgaagctgattagtgaaggtaccatatgtatgtcttcttataaagagatgtatgcctcgatattcgttgtttagattcattcagctgttatgcttagtttgtataatgtatgttatacgctaggtgttctaacagtcaacatgtctcatctacatctcttcatacgtagcaacgttggtgcctcgctttgtattactgatgtcgttcttatgatcgtgtcttcttatacgaaatggtttctcgttaatatgtgaattaatagtttatacatccgtatctcccttaagactttacagttaacgagttatagatatactctatcagcttcgcatttaatgagttattccattttaatatcttcgaatataatcgtcattgtattcatcaattcacgttctccaaggttaccacgtgtgctcctctgaagtgccaacctaatttcgggtataacactattcaattccaaatctatagtggtgcaaggaagagttaataagttagagaatttac

SEQ ID NO: 105212 - DNA, 2151 bp, Cannabis sativa
tcaaattaattgatgtgtcacaataagattagtttaatacacctaccacacacaatctttcaatattgattcctttataatttattagcagttttatattatgtattatatgaacaataacaaatattattaattaagaaaactctaaatatgtctaattaagatgaatttaatcaagaaatatttgtgattatatatatcttttgtagcaagtctataaatgtctatctaattgaaaaaattacttcagttaatatcttaatattgaccatatatatataaattaattaataacaaaaataaataattcttgatcatataaaagtctaattatctaatatagaatctatatatatatcctaattattaattttttaatatcaatatataaggttataattaaattatatcattatatatatagaaacttacagacggtggcggtcttgaaagtttgggttccgtcaatgaagttatcctttccggtgatcctagtcttagtagggccatcaccaatcatcataacatgagtcatatgcttatcaaccataactttctcagcataaactccttgcttaatataaatcacaaaagttttattattcttcttaggaacatcctttaaagcctcattaatactcttgtacttcccactcccatccttagccaccaccacatccgcctttattttcggccctttcgccgccaacagcctccgttgtccctcattcacccacccaggaccgctctcgaagccgccgccgctcgacaaaaggcggcggctaatgttcattggaatgttgtaactcgataagattgtagagatctctgtcaccatagcaagaccattgcttgtaagctcttgagacgtctttagaagcgatttcattcgctccccggcctcaccggtcgtgttttcgaaaccatctagacatgtttgctcgtaggtaacagcagcactaagccatatcttcaaatcatccatgtattcatcaagtttagacatctcaaaaggtccaatcctgtgaaaagagtcttggaggtcgtcgatcgcgtagttgagaagctcgtcgcaattagccaacgcttggtttgttcttgaatcctttgcaagctcctttaatgtcgatgacttctttatggcttcgccaatgtaatttacggctacgtcgaatgcaacctttacgagctctttcgggtcggttgtgttgccggccgccttgctcaatgtgctctcgcaagtttgtttgtaatcggtgggttgacaaatggcctgaacggcctttgacgtggtagatacactaccagcaggtgaagggctggcggtagcttggtagtcggtttcaccgcggttgaaaccgactgctaccgccaccaccatcgccaccaaaattaatgtagatgtaccaataatggcaatctttttctttctatcattcccattgtgagaagaaccaaatgacatgttgatgatgatgatattctttgattttgtaatctatgactaataaccaatatatatataaatccttttttttactttcctttttttttttttttgttgtgaaataataattagtgattggggggcttttctactctttggctaaaatgcccatttggactctatgaatgaaagatttgatttataatcgcatgttccaaaaacagaatgtgttttggaaaaaaaaaagaaaaaggaaatataaaagaaacagtttgttttctgttaagaaaatgtggggttgtagagactcacagcacaaaaggttgttagacttttccaagtttaaaaagctctcaacttttagtttatgctaacaaataggtctctcataattctacaccattgatctctaatttataatacacaccttcataactatttaatgtttatatttaggattacttccataaacttttggtgatttcttatttttcttaaatgtactgagcagtatttgtttattggtttagagattaggtatttacttagaggacatgatttttagattataactgtcaaacttttatttattaattttaccaatattactgttaatgttatgttatattatgtatatatagtttttcttttatcagtcttaccaaagctttaattttatgcttgttaaaatatataggattttt

SEQ ID NO: 105213 - DNA, 684 bp, Cannabis sativa
tgaaaacggacattgtgaagcccagttgagactatgaaaaagcgccttagcttccatttcatcactacgaaagcagccttgtacacgtttggagagggcagcaaggacatctcctctatagttgcgaatcacagctccaatgccgagtgtttgtttgttgaaatttgctgcagcatcaacattcattttaagcatatgcacagcaggaggagtccatgtcatattgtctaagcgtcgtggaagtatgatacttgcatctgcattcgaggtattcgattggttccttgttgtagcagcaggttgctggtgcaactcagtagaagatagaaccaaaccattgttatgtccaacaagctgacaagtggatcgggtaggattgtgtggtgctgttggagatggcattcttgtagtgttaacagaattgctgtgttgctggtgtagatgctcgtttgcaggttctgcctgttgaaagccagttttgtgagtgactggctgctgcaatttattgcagagagcacctttagcacttctgtacttttcaatgtagctcaatgtgaaggatgcaattgtaattggatctctttgtttgccaccatgaaggactttgttcctatcattccaaatgccccacatgacacatatgagtgcttcaacatcctctttgtccatagttgctgccaaatg

SEQ ID NO: 105214 - DNA, 965 bp, Cannabis sativa
cagacaagtacttaatggccttgggagtgaactgggtcggacaaaggcaaaaataatccgccaccctcctgaagtacgggtgcaagggcaccattgccccctattttatgtgagcactcgaccaagcacacatctctttctgtgggttcattgcccggtgattcggagaaggaatgtaacactctagtccgcccaaatatctagccttatgcaaggccttcatgcgtgcctcgcttattttggacggagggctcacccatctggcacctaaggcgccttgcctcttgtgaggaactgcttcagtaagctcctcggtgacgtagtcctccccttcgaccaagacttccccctccgcagacaccggctccccgacctcattataccctccaaagtttggaggctcagccactccttcctcctcggcctcggaagggctgccagaacggacgtcgtcgtgctcctcaatctcttggacctcaacgtccccctcatgatctgcctcctccatggcgggcagatcttgttcggcacttggcaatgtggcgagttgggccacatgaggatcagatgcgttgacctttcgcatcgtctgctttgtgcgggccatcatcctcctcctggacaggtactgatgtgtatgtcgtgcaaccgtaacagtagggacaataattgggatgccaaagttacccaaacttggatggccaacaggaagagtatcagcaacacctagccggaaaatgtatgtccagttggacggaagataacgcctccaacctttttgcacttcccaaatgaagcggtcgtacccctctccgccgatctgctcggggtaataatggtgttgcactacgggttctggagtaggagaacgatcaatactcacctctcaatcttcaaagctcgagttagaaagtctgtcactcgaagaggaaggactggcacgaagacgaggctggtcctcgtac

SEQ ID NO: 105215 - DNA, 979 bp, Cannabis sativa
aggtatatttcaaataaatataaaattagaggtaaatttggttaattgattaataaaaagacatttttcaacttaccccgatagtcctgcccaaagggccgaagctagtccaaaggcccaaaggacagttcagaagcccaaaagttagtaaatccaaaagcaggcccagtgtaacatctccaaaaacccaattcaagttaggggatgaagctagtgtcaaaaaattgaaagaagacgaagattaatggggtttttacaaaaataatatattttgggtaaaagtttataattttattgttacacagtaaaaataatatttatattggtctctccttttaaacaataaaaaataaaataaagagcgtgttcaattatttactcaagagaaatatatatatatctattttatatagagtgtgcatatataacagaattcttggtttatgagaaattcatgagtaactttttatttatattaaaaataaaatatttatgagaaatttatgggtcactacatttatatataataaaataaataaaatagatctcattaaatctaaaaaaaaatactatttatcatcatcaccagtacacatatctattctatatagaatgtgcctatataacaaaatttgaaaaattattgggtgatttttttttaaaaaaaaagttttcattcaaaaataatatttttttttggcaaaccctatatatcgcaaatagtacatcattgttctaggcgtttggctttttatttcagtacataattgattctttgggagttttgactcacaaatttggcagaagagccggtaatataaaggtattaattatatctaaatcaaaattaattaaccaaaacccttgtgtatatttgttcatattattacaagcttttatttcctagatatatagtgattatttattataatgtactatttgagttttgtttattatgtttagatggcaacattggctg

SEQ ID NO: 105216 - DNA, 538 bp, Cannabis sativa
agtattcatcgctggatcttcgtttgtttcactcagggggatgacatttgggggttgttgcctgacagtttggtaagctttttgtttcagcacagtagcttgtcggctacgattgtcaatctctgcatgatgagcccttaacgcttccatctctctgtccctccattcggcaaacatgcgtctttgttcctcgaatgcaagatttactgcagcaggagttcctccctaatcatgatgtaaagtgttggaatgaccttgcatgagtccaagagcagcacggaggttttggatctcagtatcatctccaatggtcatctgaacgttggtggcaggcggaacgactgtgttatgaatgccctagttgagtgctgaactggtattcccagtctcttgcacaccaggcgcaatttcatccacagcagtcgtcacaccatgacccgcattcgacgactgttcaagattaacagctggcggaaccctagtgtttcttgggttctgcaatgcaggatccaccgcctgtggatttgccggatcaacc

SEQ ID NO: 105217 - DNA, 689 bp, Cannabis sativa
caaggacaagcgtaagtcaccagtgtcgcgatcatgatctcgcagtccccgagggaaaattccagaggtcgaagcccaagaagacgcaccccacgaagactgcgaagcctgaagttggccaaatctcctccaaagaaggagtctttgccgaaaaggaaaggtggaccgcgcttcgtgaactataccgaactcgcggtgccacgagaccacatctacgcaattgaggaaaagaacggggtcttcaagaagccgcccccgatcaggggaaaccgcgacaagagggaccccaagaaattctgtaagtaccataaagatattggtcacactactctggaatgttgggtattgcaggatgaaatcgaagagctgatccggaggggaaagttcaaccagcataaaaagaacgaggaaggtcatccccgagcagatgacaaagaagaaaaccagaacgcgagtggttcgagaacacctcgcaatatattaacaatcattggaggaccccatatcgcaggagactctcacaaatctcaagagcgatatgccaaggaagctaaagagaagccgctcccctatgtaaacaatctcagtgagcggccagagaaattatttaaaagagaatgcgacgacatcacgtttatggagagtgatgcgagatgggtccatctcccgcattccgacgcactagtcat

SEQ ID NO: 105218 - DNA, 1111 bp, Cannabis sativa
  modified_base (155)..(158): a, c, t, g, unknown or other
agccagtgaaattaaccatacactacttaataaataattcagtgtcactaaatatgcttaaaaattaagccaacaaaatatcattatcgttaattaaactcaaaagacaataatcacgacaagatatgaactacatgctttcaattcaatcattnnnnaaaatataacaaaacataattgaaagcataaacatccaataaaaaattattggcccaccaagtagttcataacatcaacaagtaaattgcatataaatgtaatctcaaaagatagaacaagaatttcctactaacccaaaagaactaaagattataaaatactcgtatcaacatgtttattaaacaacacgacacttaatcctttagttagaggatctgctaatatcgatttggtcttacaatattctatcacaatgtctcctttcttgactaagtctctaacagtaagatactttatttccatatgtttagaagcactactaatcttattatttttttaaaagcaaacaatagtattattatcataatagattaatataggagatgaaatagaatcaactaatcatatatctaaaattaaaattctttgaccacaaagctcgcaaacatgccccataacatggaataaactcagcatactttgtatatgatgtggttaaagtctatttaatactttcaagatatagctacaccagtcaaagtgaaaatacatccgaaaattgactttaaaatatctacacaaccaccaaaatctgaatatgaataaccaacaacttggagattgtcgatatacttgtacacaagtataaaactatttattctttacaaatatctcatgacttttttggttgcaactcaatgatcatgcccaagatcagatatatatctcctaagaatattgactacaaaagtaatgtcaggtctagtacaaacttaagcatacgtaaaaattcttactctacttgcatattggatgttcttcattgcatacatttccaagtcgttcttagggcattgctgttactaaatgtcccctttcagaataggaacagaaatagccttacacaaattcatgttgaaccttttgaggacacgattaatgtaagcttctt

SEQ ID NO: 105219 - DNA, 574 bp, Cannabis sativa
ttactcaggtttggtgaaaaaggttttagcaaaagtagaacataatttgatgaagcaaggcgatgaggagggatgtactcctctgcaccatgcggcaattaggggttatgaaattgtaaagatgttgcttgaaaaagatgaaggtagtgcatatatcaaaaatcaacatggtatgacacctctccacattgcaactgcccataactgttgggctgtgatgagagaaatcataagtagatgtccagatagctgccaagttgttgataataagggtagaaatgctctacattatgctgtcacaactcaacaagtttatacagtaagtgaattcttgggacatgagtcaattggcaatgactactgctttttgaatggaaaagacattgagggaaatactcccttgcttcatatggctgctgctttatcttgggatgtccaaattttagatgctttgttgtctcacccaagagtggataagatggcatccaacaaacaaaacatgaatattttagatatggtgaatcgtttggataaaaaacaacataagaaggtacgtacttaatatgaatcgtta

SEQ ID NO: 105220 - DNA, 1134 bp, Cannabis sativa
atgtaaattcaacaatataataagcagtaatggtaagattgtattttctaaagctctctcatgtgtgcatactaacatcaagataccttgtgatcatttaatttcatgtgttataactaatgcatcggatttattgatgaacattgtctgaaatcacgataaaacaatacataaagatatagtaaaaacattatctgattggctacagaaaaaggtcacctgatgtaacatgaaagactccccccacacagatagctcaacaaagttaaatccaagcgagctctctagctttccacaggagcagcgaaaaatctttctgaaatgcgaggcacctattctgtctctctcatccggttggtgcagccattttgcaagaacaactgaactagaaccttgatcatttacaccgccggtaagcttctcttgagcatcgaccatgttcccatcaggaatgctcaatgctggagaatttgagctcattctctcaacttttgaagaagggaagccatcagattcaaaatcttcttctccatcactttcaccagattcaaattctgatgccttatcagatgctttcacacttcctgacacatgaccattcttatgtgatttctttgcaggaaacttcgtcctgtactttgctcgcactgtataattatgaaaaggatgttctccctacaaaacatggttacacaaacaaactatcagttcaataaatttcctcacacacacacaaaaagaaaaaaaaaaaaaaaaagaggttgaaaagagaggacaaaaataaggaaacggtacctcgaaagtattcaatatctcattgaaatctgagatatgaaaatcaatttcatcagtgcttaaattacttttaattccaatgatatcggcaggaagaaggtaggaatactttcggagattacactcctttctgggatcgaagctcctgaaacaggaacacagacagataaacatagcagcactagcaagaatcagacataataatgtgatcaggtaatcacacaaataacacaaaaattctgagataataagcttctttattaatttcaaaattcaatgagaaatgagattgaattagcattatcaaggtcaaattctttcactttcttttttcttttt

SEQ ID NO: 105221 - DNA, 920 bp, Cannabis sativa
  modified_base (321)..(326): a, c, t, g, unknown or other
agtcgacagactcagtaagaaaagcataacataaacatacaaataacccgggttataagttggcgcccatacacctgaccataaccgtaatcccggtgtcccaaacggtactgagtctagaacgttcataagacagtactatcgaccataatgtcagcctatactcaatatgctagtcatactctagccatattgatgtgacagcatcgaccagtattttacccaacatacatttatcagtaatcagcacaactctatgtatactattattgctatcaatgtaatctaacaggtataacaacatgtacgctaaacatgtannnnnntatgcatgatattatactaatcttgcctcaattccgaattcaggtgtgccgatcaacctgagtggaacaacacgaataagtgactcgttaaatcaccaccgggactaaggtttacaatcgaaaccctatctactgcaacttaatatggtaatatcccaaactagcaaagaatcaaccaagtagaaacttgaaattggcacgaaacgacaagcagaaaaacctattttccctgctccaaaatccgggtaaccagttttacaagcagtgtaaagccggttaaccggttttatccagaaaactaacaaaaattcaacccctaaccaaattgttcccaaacttaatcaaactttccaggcctgcatattataccccaattaacattttccaagcaacaaaacaacaattaaggctcaaatttgaatttcaccattaaagctccaagtttgagctcttaaactcaaaacttggttaaaccttcaaacaactaccaattcatgcttaaaacaacataatctaacatataacaatctttgaaaactataacaaactctaacactagctacaacaacaaaaccataaaatcatgcatgaact

SEQ ID NO: 105222 - DNA, 1022 bp, Cannabis sativa
gatccacaattatagtagcgatcttgagaggagttcggatctgagttgaagaaggagacctctgtcttccgttaagtaatctcatgcgccgtcaaggacctccccaattcgcttgaagtaggcacctttgtcgctttggagtcgctcaaatcggttggtcgtataatcaatgacaataagttttctatcctttaaatctctctttgattttcaacttttatcccttcactgcaatgctattttttatatgcatggttttgttttcttattattaatcaagtttatatatgtatttacaatacttatgtgtgaaatctgaagaggttagtgattctcaattttatatttacttatgtcgaacacttttattcgtgattggaagcaattccaaatattttatctataaaacgaaagtggcagcaacacaaattggctattgttcttggtggctcactttaggcggaggcgtggagatgacattccattcaatgatagtaatcggaaaagtaattgtatatttgtttcatttttatatttgacttttttatataaatagaatttattgctttttatattaaattttattgatattaattgtaacacgttttttcaactttttcaaaatgtaattggttaaatttcaaaatgcaattttattaaaattaaattaattactttttggttttttccttaaaaagatttattttattagctgttacttttaattttaagctaatcttttggtctattaagatttattttattagctgtaactttttaattttaattttaagctaatcaggagaaaattaagttaagtaattactttctatatttaatttattaaattttgtattcatttcaaattattttacattaaattatcctttttggttatcaatatgattttttatatctagtaattgagagattgatttgtgtgtcaattatgtctttgtaattatattaatttcattcacatttcaaaatcttaaataattttatgtcaatcttacctttta

SEQ ID NO: 105223 - DNA, 694 bp, Cannabis sativa
  modified_base (654)..(669): a, c, t, g, unknown or other
ttgactcaagagtcacatcctacggggtgcacttttagatggcatggtgtgcatgaagagttaggcggtcaggcattcacgtgtgggcatgttgtcaaggatgccaacagatgaagtgggggagagaccctcacggttcactcagaagactaggtattcattacaagcatcgagaagagtatcatggagatggattgttgttcaggatgtaaagtcaagaagacttaggacacaggcagtgccaattatctagggtaaaaatctgcaggactcaggtactaagataacaccatggtaatgtttacctaaggtgaaagtcagcaggactaaggtactaaggcaacgttgaaatgtcgaggggcaaagagtcagaatgatcgaggcattcaacatcttcattaaagtgacatttggaatggagggaccgcatgcgagtatgtggttagcttgcgagctataccttgagaggtatttctaagagagagaagttcttcccaagtttaagtgggggagcccactagctcatatgtttgaagaattagtgtacttgttcagttttagtgtgtgaatccagagggaaacactacaacgaatggtttgtttagtgtgaagactgttgggttttgtgccctatataaaacccatttcaatatnnnnnnnnnnnnnnnntaataaagatcagaaatcacatttt

SEQ ID NO: 105224 - DNA, 701 bp, Cannabis sativa
tggtgaataaatttcgagtaagattaatttctattggaaataaattctcaagggcaaaatagtgatttgtgaaattattatttcaatttttatgaaaattatgaattgtataattaatattatttaactatttagttttattggataaaattgtatcaattagttaaatataatattattcttaaataatattaaagagagaaatatattattttagagaaaataatatttattttaatccttttgaaataaaaaattaatgaaaattaattaattattatttattggtagaataaaaaataaatcttatttatggcaaaattgagaaatcaattttggaccttaaattatgactcacacatgtagggtgatatataaaggcgcatgattaatttgttttaattattttattagttaaaataatttaaatcaaattaagttaattatcttttaattactaattaaataaattatatgataattgtttaattaaaaggataattataaaataaaagatctagtgatatttgatatttaattattagatatttatatttgaattctaattcaaattaaattagatatttacttttattttaaataaaggattaaaatgttttacttacaacattagaatatatagtatcataaattagtaagcaattaacagaaagaaaaggcataacaaaatgaagagaaaa

SEQ ID NO: 105225 - DNA, 586 bp, Cannabis sativa
tttgcttttagctttatcttttgtaaatttgtattttgaaaaacgatctgcaaataagttgactcattgcttggcaagagactcttgtttctctacaggtcgtgtgcttcagctggaggactgctcctctgaagtgcatactattattttgaacgaatttattaattaataaatcttataatttttattaaaaaaaaatatttaactacactacacaatatagcacatatcaccattcaggtatatatttctctttcgttcttttactttcaaccgctttctcctctttgatctttattaatttttttatgtaaattctattattatatatatttatatgatagtttcttttagaggttgagatcataattcaaaactttgataatgcaacactatcacaatttttatacgacataataagatgattaattctctttctaatagatatttacttgaaataataatggaaatttatacatgtacactttttttttcaagtgatcattctttcaataaaaatagtgttggttgctgggtttgagaagaaggcgtagagttttggtggagcaccggtgttggtggctgg

SEQ ID NO: 105226 - DNA, 992 bp, Cannabis sativa
  modified_base (779)..(783): a, c, t, g, unknown or other
gtcggaagagttaaaattgttgaccatgtaagatacaacaaatctattatactctggaggaagactattaagtatgaattgaacacattattcccttgataattcaattccaagtagatttactttttggaacttcagattcatcatcaataagtgcgagtttatgcaactaccagggtgcattttcacactgtagagttcatttgcaaaggcattgacaaggagtgggttattcatattggcactacaaatatcaataaacagaagtaagcaatttcaagtagaatttctaagaatgacatcacaatcttcttttttctaatgtgttggtctgtgttttaccctcaagtatttcaaaggaaaagttccttcacagtaaggcagaatactctgaatttcattatttgcggcataaatactatatgttttgaatttatacatttaaataccacatgtttttttttcaacggattaaataccttatgttatatttgtgttacttctgttactacttttttgttaaatataccagaatttaatttatatgccacctgttgatcaactattggtccaaataataatattttttaaaaaaattatttattaatttttaactgaaaaataagtataaaaaataaaaacaaacttaattataattataattagaaacagaaataagaaaaaaaaaaatcatcttctacgctatcttgcttcttcttcttattattacttcttcctcttccttcttttcaatatgagatgagagagagagagagagnnnnngagagagagagagagagaaagttggaggatgagctagataagttctatgggtttttgacggatctggtacatgaagtggctcgccattaaatccggcaaagttgaatacattatgtcttgttgttctttggcggtcgaagtgggatctgatggttcgccattaaatccgacaaagaagaaaaaatagaaagagggagaggaagagggaa

SEQ ID NO: 105227 - DNA, 526 bp, Cannabis sativa
tttagggcacaaaatcccaacaaactcccacttgtactaatataaaactaaaagtgcattttgattaatctcaacaccttgatgtccatatcaagtgtagaatgtagtattatctatgtaatgggatctgacaggttgtcttcaatataaactttctctaccattacatctccttaatcacaaaatccttgatattgtaaaattcctttctatatgtctactcctcttgggatactggtttctttactatttggaaactatatctgtgttagtcaggaagtaacactagtagttaatccatgattgaaataataccgaaaactgtatagaactttccatagactgaataattatctagtagcctttttggcaactttaacattcagtctcactgctagagttagagatttcagataggtttttacacttccctaaaaattactgctccacccccagagtaatcaccatctaataagtagactttctagcattaacgcaagtctagaaatcttatttggtgtagtct

SEQ ID NO: 105228 - DNA, 729 bp, Cannabis sativa
ctttcattgcgcaaatgtgttaactgcagaagcctaccagcacttgaagagttgtggaatcttaaggtacttgtattggatgaacttatcaaactcgaatatatttcgaagaatgagaatgcttcttcagtagccacacccttctttccttccctgaaagaactatggctcacagaactgcctaagctacagagttggtggagaaatgaagtcatgaatgttaatgtgttgccttcattcccttgtctttccaaattggttattgaggattgtcccaaactgacttccattcctctattcccaactctagaggaaggtttagctctggactcaacttgctggaagccatttcaactcaccttaaacaagaaaactgcaccccaagaagcatcatcctcgtcgtcctcatcatcatctccaccactctccaacttgaaggctctccggattgtaggcattgaaaacttctatggtaatgaaattgagtggagaactttaaaaagcttagaattcttgagatttgattgtcttccaaacttggtgagtcttcctgaggggcttcaacatgtagtcagcttgaaagaattccaactctggcgctgtggtactgaagaaatccctgaatggataggaaaactccataatttaagcaaactcatgatttgcttgtgtcctaatttgaaatcgctacctgaatcgattcgggagcttaaacttctagagacacta

SEQ ID NO: 105229 - DNA, 4627 bp, Cannabis sativa
aagactacgtaattttatatatatatagttaagaaaagagaagaaaacaatctaccatgcccatgaattcttctaacttagaagctcggtatgtttttcaattctctcttttcactttgatttagttgtgaaatgcttgatttgtagtttttcatggttcggagctgggaagaggtattatgacaggaaaacaaaaatcatggaggttatagtgccttataatatatagtgttggtgatctagttacttagtgttattataattacatatatttatatatgagctgagatacatagaaagattctcatagttcttggtggggacttgtaaatttcatttatttcttggtatttgatctttgatttctctgtttttctgggttttcattaatttggtgctaagagagctgaaattaatattttgaagttgttttattgaattttataatagcgtctgagctatgaaatttctgaaaagagataagtgagcagtcaatttcttaggataatgattgcctatagaataatattagtggaaaagtttttaacatttgtttaagaagaaatgcccaaaaattttatctgtattattgaataaacaactctctaagtaccaatgagcctgaagtgctctcaaatgaatatgcaattcttttggtccattttgtctgcagaacattattaaatactcctttagattaaagcaagatctgttctgttttatatacaaatttaataataagttaccgtttcaatactttatcttgtttagttgacttatattctctctctctctaattttgcgtgtgtgataggtatcttatttcttgcaagaagcatgcggtaattcctaactcagcagtacaatcatggttttctgaggtcagagttcataaaccaaagaatgagaagtatggcataggtgttattcttgaccagctaatggatagtgatatatctccacttgtagatataataatggcctttgagagctcagatatggatgcagttgacttacttcaagaatcaaatggtaccctcagtgaagaacatcttatggctttgatgcgtgcccttgactttaaacttcgagttgttgatctacagaatatgtcattgaccaaggagttcttgaggtatgattgagattagttacatatgattatggtgtgattgttatttcagaatgttctctaattacttcaactgattttgttctcattagggatctttgccatggaggcttggcttgccaagttttaaacttaaggactaatcatattcaaaagcttgctatgtctggaaagtttatacggttacacacccttaatctggatttttgcactgcactcaccactttgcagcagaactgtttttattgcatgccacatttgttacgtctctcaatgtgtgagacaagaatcactaatctctggacaacttctgctgctttattgaaacttccttcgttgaaagagctacggtttcaaaattgtctctgctgcaaggacaccggggcatgtcaatcgtctcgtgagaaaacaagatttcatggaattgagagtcagtcaagtctttgttgctatgatcaagcacagtctgctgatagtggtgatgctacatttcattcttctactgcaggcgaaacagttagggacctgatttgtaaagactcaatgttaaagtgtgagcttggaattggaagcaatgagaacaactcaaaagtaaagacttcaagttaccttaaaaaaatagatatgttcaaattatctgctgatcttcctgatttggatggaagcaaaggtcttcaaaatgaggtaagaagtagggttagtaagtagattgatgtacttgagcttgaaaaagattagattagacaattttactctaacatttagtttggcaacatgtagatttgggaaagaggtaatttttctgcaaattcacaaaagcaagacttgaagaatcctgcaattacattaaggaagtatgtatctcatcacccttcaccgatatgcttcgagaaacattatcgagagtacatggttgcttcattgcctcatctagaggtactagataatttgcctgttacaaagatagacagattaactgccaagactactagtagaaagtactttgagtacttaccttataaaaggcagccaaaagaaagtgttgttgatattttgcataagcgcgagatgggtggaagcaaggcacgtaaccagaaaatgtcaatgccaaaacagcttcacccttaccaccataatcaattgtttttctcaaggtctctttgtgctgcaaaacttggatcttctgaatggccacacttgagtccagtatccaacttcagagaaaaatttaaacaagaatgcaaaaggcctcgtccgaggcaatttgagtatcatccttcagatcctagtcttatggtttttggaaccttgagtggtgaagttattgtaatcaaccatgaaagtgggaggactgttagttatatcccatccatgggagcaatgagcagcgttttgggactctgttggctcaagaagtatccatcaaaggtaatccgtatcttgttttactttattgtttgtgaaatttgtgttattgtatctcctcataaaattaatttgtctagtatttaagccttgaaatttcagatgtgacttaacgagactatgcagttcgcagattcaaaaacaaacttattcatttcttgttacactaaactgattttgttttctccttttttattgaacatgtagcttatagcaggatctgataatggttctctgaagttgtttgacatcaaacatacacctcaagaacttgcagagtccaattggggctcctcaaatgtaaccttttcaagctttgagcaattgacttctcttcatgtaaactcaacagatgacaagtttctggctagtggatactcaaagaatgttgctctatacgacattgacagcgaaaaacgtttacaattgttcagtaacattcaccgagaaccgatcaatgttgctaaatttgctcaccattcccctcacctatttgctacttcatcctttgaccgtgatgtgaagatgtgggatttgagacagaaccctttgcagccttgctatacatcttcaagctcaagaggaaatgtcatggtttgtttttctccagatgacatgtctttgctcgtgtctgctgttgacaatgaggtatgcctgtaactaataaatacacaatcacactcacactcacaatcatgcaatgatcatataaattatgaattatggaaatgatgaaattgcaatattctccaattttgctatggtaaatggtgactaagttttgagagttttgacaggttaaacaactctcagcagcagatgggaggctgttgatgactcttgagatagcttcaacaggaagtgcttataactatactcgttcatattatatgaatggaggggattacatcattagtggtagttgtgatgaacatgtcattcgcatttgctgctctcaaactggaaaacgactcagggatgtctacttggaggtactttttcaagttaatgagtcacttttagctgatttgtttgtgtactttaataagctcttgtatatttcattcttgtttgtaggattttgagacaggaaactcaatgttcgtgcaatcattaagaagcgatccatttagagtgagtttgttttgttcattctagtattatgctttcactgaccaaataaaggcataataataaatctaactgttactataaaaccaggatttcaacctgagtgtgttggcagcatctacacgcccaagctcaaagtgggagatcatcaaggtaacttggtaacattgttgtttattgtgattgttatgtgtatgtcataaaagttggaagactaaacatataatttggtgtcaacactactaaatttcaggtcaatatgctggcttcatccaactctcaggaacaggaagcaatttttttctagttgctacagtctcagaggttgaacttgacatatacttatcaagtaggaagactacatatataattttgtgcaaatcaaaactactaaatttcaggtcaaattattcatgtgcagtagcttattatatataagccattattttaaaaatatataaatataattggatgataacgggatgataattggatcagttcagtttagatgtttattggatcagatctcatccaacaatcgatccgatccaaatggattttcagaatttacatctgatctgatccaattataattgaatatctgattatattggatcggttgtgattggatcgatcaatcgtatttgaattagatgtttctgcacacctctagtaattacactgtaattatgtaattgaagttacttgaagagttccacttactctccaattcgcatgtacccataagaatttagtataattacactgtgtaattattaaaaaaaaattattttaaatatcaactattaaaaatattattttcatgtgtaattactaactattttatcaaacaaaatactaaaaattcatatataattactatctcatatttaaacatatttttataatgtaattattagacaggtaattactactcta

SEQ ID NO: 105230 - DNA, 681 bp, Cannabis sativa
attcttctcaatatgctcaagtttattggacaatcatttaatttcattttttttttcaacaatctcatttttaaaatttttaacattcagttcaagctcttcatttcattgagaaagagatttaatatcttttgtcaataaatgatactttgaacacaatttcaagttcaaccactcaccatacatacttttgtatgcttctttcaaggaatcctcatccaaatctgattcatcacaatcagtccctaaagcatcatcaacatctttatttaccaaaatagtgttgtcaagacaaacaaagttcttattttcctgcaaatgacatggaacactagaaaacacagatgttagtgcaatattctttgattcctcttcatcactactttcagagtaataagtaatattcataatatttttggttctttttaaagtatttacacatcctgattgtatgtgtccaaaaccacgatattttctacattgtacaccatttttatttttggatgtaaaaggttttgaataaatactacctctcgaggacttagacatgcctttcttgttgccaacatttgaagaacaatagagcaactttctgcaaagaacgacatattgcacaaaaaattacaagaaaatgttaaaggatcacactaagagtttagtgtcccgctctgataccaattg

SEQ ID NO: 105231 - DNA, 755 bp, Cannabis sativa
ttactttttagctccatgtaaatagatgttttttttactgtttattgtttaaatactgtcatgtaaataatatgagataaattgtactataaactgctattgtgagtgagaaactaacatttatcaagcaacttttgggaggaaaaaaacacaagaaaagaaggttagcaaggttttagttgtatgaattttacatgtacaatttaaaaaatatgaaggctaatactttttctaaatttaataagaagtttttttattttttttttaaaaaaaaattatggataaaaaaactaattaacataattttgtacaaatacatgagaaactcataaaaggggagtttcagttgataaaagagatgaagatatttataatgtcctttggcaatgtaaggctgtttcatgtgtgtggaagttatgtaggttatggtcacaattacgaaggcaacataaggaagataatagatatgatctttttccttgctcagattgcaatcggtatgtatggaccaaggagatggagacttttgagtattttctcatagtttcttggcatctttggactatttgataaaggtaaaccatgatggtggctattgtcttcaagctagtgatgttgtggagtagtgtggtcgatacttgatagaatggaactacaagatgatgctcctgtggaaggaaagaaaagaagacaacgagagaagctgctatgtgggaggcaccacctgatggaaccttcaaaataaatgtttatat

SEQ ID NO: 105232 - DNA, 753 bp, Cannabis sativa
ctcgttggtgggtcaactggaaagagctcagctcgattgggtgctggacgtgatggcttcagttggtacagggatgggtttgacttggtggtggctcgggttgagtggatgaaatggctgggaggtttgagattggttcgaatggtgattcgggctgctatgagttcgggtgaagtatgggttgagttaacaatggtggttcggattgaggctatgggagctggtgtgatttttgtggctacggtttcaatggaggaaatggaagctcgggtttaggtgagattttgggttcggtttcaggtgaaatggaggttgggtcgactggtgaagggaagtgcggctgtgtgtgttggtgattgatgaagatgatgaaatggtagggttgggtattgggctgagagaagtgggctctgattagtagaggggcccagttgactaaagtcaaaaactgaaagccccactaaataatacatgtatactttatgtggcatttttgagtacaaaggtacatcactccaaatgattggactgagtaaaaagagttgtgcccaatgattgctcattaaaacaatttttgtcacatgtttctcttgatcagaccattcactttattctttttttttttctttcaaaccccagtagcaaacccttgctattaactaatatgcctgctgccaaatagatttgctaagccattgctatagcaactgggcatatctcttccaccccaaacttagtttctttgcccaactt

SEQ ID NO: 105233 - DNA, 564 bp, Cannabis sativa
ttttttttagtctaatttcttttatagttaggtgttatattgtagttatttaagacattatgtaaaattttgataaatttaaaaaaacttaacacgctaaaaaataaggtttaaacaatgttgcacgtgtaactcttttatttttatttttttaaacaatgaatatttattgaaaataatttgagtttatatcttcatcgaaaaaagatgagaaattattcatccaaattagttcaccatccaccataagtgcaccgtgcacgaactgctaattcatgtatacaacgaacatgaatcagagatgtatcaaaaaaatttaataactaactaacaaaatcatctaagaaaaatctaaataacaaaaaaaaaaagatcttctaaagaatgtaataagcaatccacgtgcgagttacaactataaaatctgctaatctccctagtaaaaactgctctgacgttattaacatatccacatagtttgtttaaatgacaacaagagcttctgcaaaaatgttaaaaagaaataatgagaatcatgttaaatcaataaactaagcaaactaa

SEQ ID NO: 105234 - DNA, 745 bp, Cannabis sativa
gcacccgcacaacgaaactaaaaactgcagaaactacactgtaaaaaatggtgcggtgcagtgcagtgcggttttgcactttctacagtttagattattaccaaataataaactatcacaaatacgataaagcttgagcaacacttgtcaaaaatactataaggcttgaaaataaatatgaaaaaaacttttaagtttcaacaatacaataattagtgggctttgagttggaccttcacatattggacctaaataattataaaaattggtatttttataatatgcagtgcggtgcggtttgaatcgcatattaccaattcaaaactgcaaactgcactgcaccgcgtgatttaagaaaaattcaaaccgtgactgcaccgtaaagaatttcaaaccgtattttttttgtggcgtggtgcgatgggagcggtttgaacgttgttaaatttatttacaatattttgacgggatatttttttaaaaaaaaattgaaaataattttttttaaatattttaatcatatcatcgcatgtaattttaaattatgacttattgcaaataaataaaaattagacacaacatcaaatactctaacataaattagaataaactattgaaatttcataaataaaaataataataaaaaaagaatagaatagtatgaaatgatctacaattgaaaagattctatttacatttcactttttctatattttgattagtttattttacttccctatggtat

SEQ ID NO: 105235 - DNA, 1190 bp, Cannabis sativa
taataaataatataaaagcactctcatcttcattactctattcttcaaaatacatcaccaaaattttactttctttattttacttcaaacttttatattatagcatatatcaatttttttttttaaaattcaccaaaattttatttttttttcaaattttaatatattttatttatttcaaacatataatattaatttctatacatattcaatataaaagtaaaattaaaattctaaacaattaataaaatatatttagagtagtgaataatattctataaatgtaaagcattaatagtaaattttaaagaagctttaaaataaaaaaaaattcaaaacatcagatctgatgtaacgcgtttttaatttaattctttaaattttaaagtatctgatatgagtactctaaaaaaattgctaaggatttatagaataccatatttgtgtggtgttggctggcatgatactagcaatactcaatagattatgatgttgatcatctaaagtgtagtgtagtagtactagtggtggagttggtgaaaagagattcatttatgatggaagaagttggtgttgactcaaacactcttatgcaagtatgtcacaaattatcataggactactactactacaccattcattcctccactccctctcattgttatcaattaatgatctttgtttatgatgtaagtgcatgaccagtagtagtagaaagtagaaaccaattaattatagatgctgataattaaatgagtgcatttgggattgttggacttttgtgttacatatataattggcttggcatcatattttctgtaaacaatgcaataatatcagattccttatggataaaattaatcaagtattttgacaagcatttaattaagagaagatatcatatatggctgttgccattttcttctcagtggcatgagttgaaatcactagagttgcaactaccaaatgtatgaaataattagaaacattaattaatatttggtgtgtacctgttaacaaataaaggcttcaacttttaatgaagcaaattgatgaattaattagcttaagtttctatatgagcattgctattaggcacattggtgcctagcaccttctaaatgtgtcgatttgtaattggctagcgatactctataaaaattattatattaaactatatgggacccgat

SEQ ID NO: 105236 - DNA, 577 bp, Cannabis sativa
tatgattaaatttaaagtaaagagtgaatttacgattcttgctctcaatgaaagcaccaaaatattgacctcgcttttacccaacaacaatgagtctgaattgtaagtgataagtgatataatttagatatgatatgataagataaataaagaacacagagtttttaaagaggttcggccctgagttgttctgtaatagcctactccccttgatttatattcacttaaggacaaagagtatagtgattcttctcttaaagctcttgcaatgatatctctgagtatactctcttagataattctttcgaccttttgcccaatgagaatagatcactatttatagggctgtgtgcttgagggaaggttttccttttgtttacaatgtctataattgttaatattacacattaaatatatagaatacactgattgtccagatttatagggattgcctttgtgattcacgatgcaagtgctgaagttgctaagtgttgatatgctattcggattgtccactgctcggctaggaggactccgtccgtgcaagtatatatggtgttctgttcagaatatctcc

SEQ ID NO: 105237 - DNA, 541 bp, Cannabis sativa
ccatctacatataacttccaagtgtttgcgtctcggtgaacaagcagattttcttttagggttattccttctattacgaagtctcccaaggcttggcccttgatggatgttcgagggtgatatgttatgtcaaactgccccagtttgattgaccattttatcaatcttctagaagcgtcttgttttgataaaacttgtctcaagggttgatcagttaacacttttattcggtgtgcctggaagtaaggtcttaacttgcgagacgtgcggatatggcataaagaaagtttttcaagagggggatacctcgactctgcccccaataaccttttactgacatagtaaatcggttgctggtgctttctctcttctcgcactatagccacactaatcgcgtcttctgagatacccagatagaggagtaatgtttctccagttattttttttgccaaaactggaggtgtcgctaaatgccttttaacgttctgaaaggcctcttcacactcttttgtccactcgaatttcttgttgcctcgcaata

SEQ ID NO: 105238 - DNA, 520 bp, Cannabis sativa
tagttaatccaatcctgaggaggaggggactaaacttcctttaaagctggggtagcacattggagcaaggaatcatacatatctacataagaagtacaaatattatcaatgcatttgttaatatcaacaggacaattattatggaccttctcaattgcgcaccctccaaatagtatccacaacaatagaagcatataagaatatatcatcgacacaagctcctttatgttttaggtcccagatgaacttgacccaatcccagacacggatgcctgtatcacacaccggatagataccccaaggagatgaacgccaaaaatgaagtgccacctcacaggatagaaacaggtgttcaatggattcttcacaccttccacatagggggcagcttgggtcctctatatggaatctgttaccgatcacagctcttacagggagagcacaagacaagatacaccaccataagaccttatgtcgctccaaaatttttgccactagtcacaatgaatttgtactaata

SEQ ID NO: 105239 - DNA, 635 bp, Cannabis sativa
cttattaaaaataagtacactatttatttatttatttatttttgttaggtcaaagacactgttttaaaaataaaaaatcaacagtaagaaaattaatgaaatatttatttatttatttttaaatgaatgaaatattaattttaaactatacatacataactaaattaataattatttatttatatattattattatatataataataccaaccctcttgctaagaaatcttcattaagcttccaagcacctacaaaacacaatatttaatcataactttagattgagttgacaattgacattatatttcacttcatatttttttttatatatatataataattcaatatatattatatatacacacatagatttctatatcaatgaataatattacactcacaaaaaaaatgtctgtttcttctaaaattttatcattcttcttattaccatattcgattttaatcatcatgaatttcacaaccacagttgctcaaatctgtaacagaaataactgtatttctccaactgaattaactgtcaaattcccatttcaaatttccgatcaaaatcactacccaactcgttgtggctacccaggtttcgacctctcttgcagaaacaccaccaccacca

SEQ ID NO: 105240 - DNA, 561 bp, Cannabis sativa
gcactcagggtggatgataaactagtttggatagatgatttttcatcttttctctatgtataaacttttgagtattttcaatgaaagttcattgtcaaaaaaaaaaattagctattaaaacatagggaccaaaaggaagagtaaaatgctaaatagagtaaaacatagggaccaaaaggaaaacaaaatgaaaattagttccaaaaccctaaaatatagaattaacaaaaaccctcctatcagccatttctcaagctcaactcgcctcgcctcgcccaacccagcctaacctcgactcaattctagccatggggatgggtcgtaaacaaagagaagtagaagcctgtgaaacccccatcgaccctgagctcaaggctgagaagaagaacagaaagaagttaaaaaaccttaatatcgaagaagagaataaccatgccccaaagagaagtcttgaagagattaaatcccaggaaggttctgattccaaggagttaaacaagaagaagaagaaaaagaagaataagcataagaatgtggatgaaaatgagaatgagaaacaaa

SEQ ID NO: 105241 - DNA, 515 bp, Cannabis sativa
  modified_base (151)..(167): a, c, t, g, unknown or other
tttattaattatttaatttgtcaatttaatttgtcatataagataataatttgtcatataagataattttatttgtcatataagataattttaatataatatttcaaataaaaaagatagatataccttttaatttaaaatatgttaaatnnnnnnnnnnnnnnnnntataattaaataatatataaatataaagaaagtgcaaatttttaaatctgaccataatttaaaaattaaaataattaattttaaaatttaaacaccaaaatatcaaaattaataataatctattgaaaaataattattattaatttaaaatatgatatttaagttcaaatatattaaaattaatattttattttaattttagggtttgaaaatatcaaatattcgaaattgggaaaaaaagtccctaaaaaatcagaaattggtgttgggctggcagctaggctgcacggtcagcccctggaggctgcaaatgcctcattacgagtgcggaagtggaagggtgcaggg

SEQ ID NO: 105242 - DNA, 777 bp, Cannabis sativa
gtgagaagaaataggtgggcatatagaaaatagaaaagaagtaggtgggcacatgggaaatgtggcgagaagtaggtaacgattttttattaggcccttatacccgacggtttaaaaccatcacctataggcggcaattttaaataggtgatggttttaaaccgtcggatataagggcccaataaattttacaaattccaattaaaattgtcgcctattcctgtaattactgttataaaccgtcaggaatactaatttttcccgacggttttaaacagttacttaattttttcagcgatgatctcaaaaaaaaaaagtgtttttaggaccgttgcgaattctgacttttattagtagtgcaacaaagaattgtatgctgcgttcagaaaagatgaatcactttagattaaaaatttattgattctctttcccaattggttagaccatataggcacacaatgatttactttacgggcaagatttttgggtgcatatcattaaccatgtactaatggtaacaacatataataattaaagaactctctcaagttgtaactcatcgtaatcactatcatataattgctaacaaactgtgagcccatgtaagtgtgtgttagtaagcaaaagcacaacgattggtccctacaaaaaaaggtagcttattattttcaaattgaactaagaattatgatcattatcttaggtttttagaaaaatcaatgtcaacaactcatttctttgtaaaccataataatcaaagtctacttagatttgggg

SEQ ID NO: 105243 - DNA, 815 bp, Cannabis sativa
  modified_base (141)..(145): a, c, t, g, unknown or other
tataatccaaaaaaatgaaacatccacgaactgaaaactgcaatgaattgaagaacacaaaaaattacaaacaaaaaaagagatttcgttgtgagagaaagagagaaatatatgaggattactcttttttttttttttttnnnnnaaaaaaagtgatattatcatagttatcatataaaatctaaaattctagtaaataaaatggaatcattcatattacaatttagtaattacataaatgatgaaaataattaactagtaaaatttgcctttttattttatttttatatgcaattaattagtcaaattcagatccttacaaaaacaaagtcaaaaattgagatggcaacattttgtcaacaaaatcacccattaactacatgtattaattacataaaatttgtgactattatataactataactatagataaaaacatagagcaatgcttaaaattaaatacacatttgttaaatttaatattataactatataatatattagctaattaaaaattttaccactaaactttgatatgtactaaattatgtttattgagtttaaaaagatcattaaaaatttcccttaagctattgatattgttggatttaagaacttttgtctaattttagtaagtctaacatggatgaaagttaggggacataatttgacacatgtcaaagttcgaggggcatgatttgatagatatcaaagtctcatgagaagcatgatttagtacataggcaatcaccgaattaataaaaatgaatgaaattagataaaagtcttatatctaataatcttaatagttcaaa

SEQ ID NO: 105244 - DNA, 1417 bp, Cannabis sativa
gtcagtgatgacactacaaaaaaatcttgggacaatatttatttttttcaatttaataatgacaaagtaataaatatttcttattcacaactttctatatatataatttaatagcacatttcaatttttttattgacaccaaatagtaagatatataatatttttattgaccaaatttttacaaactatgtttagaaaaatactaatggtaaaattaaaaataaaatatagatataagcctataaggttatgttaattaatgagaagttagcacatatataatttttttagtttactaaattcaatcttattattccccaaatctataattaatctcattttattactcctcgaatttgtaaattaccgaaacgcatgcatattttactaattaatatgtatcaaagttataaatatgaatgtttcaaaagtataaataatcatttctaaccttgctgaaatttttatcttcctgtgcgctttaccgaaaactaaaattaatcggttattacaattatttttatattgcatagtaatttcaaattaaaataataatataaaatatataattaattgtatataatatagtatatatatatagtgcaaactccaaagtgaattattaataataataataataataataataattataatcttatatgaaggcttgctcccttataagtgatcctaattatattatgctaaaatttttatttttatttttggtgtgtgttagaactagcagacaacaacattccagatcttaactccataattataaataacccattgtttactttattctttgtgtcattggttgcttaagaattacagtttttttttccttctcttactttaatttccttttaatattctctgcctttcatgataaatgtactaatgagaacaagaaatccagatccaaaggtagaaaagaaaagaaagaaaataataatcccatcaccacaagcccttgtaagaagaatttattcttttatttttttaatatatatatatatatgtaatacatgttaattttttttttctttttaatgccaaaacaaaccaagtcaataaagtgcggagcaaaagttggaggagaccagattgattatgtatgtgatacattctttttattttaattattatttaactttttttacgatatatttatagagtgaattgtaattagttgaaattaaaaaaattatcgcttaagaatattatattaacgtttaaaaaaccactatagataaaacgcaataaataccactgtaagaatgttgcggaccttactaataaatgttttgctctcttgttcagtaaatagatattgtactatatatatacatatataaatatttatactgatgatgattttctttttcattttactgttcataatagaaaaaaa

SEQ ID NO: 105245 - DNA, 738 bp, Cannabis sativa
  modified_base (490)..(498): a, c, t, g, unknown or other
tctctctctcttcgaaaccctctaaaccagctagggttggtattttctttgtgtttcaagtgattctcagcaagttttagtaatctccaagccaaggtaaggtcttaagcaacttctcttttagtttcttatttttaaagaaagtgaatcatgcttatttttgtgtttttggttgttgttcttgctgttgaagtttcgttatgttttttgtagttgatttatgttaaaataagttaatttgggcaagttttgttaggttgtttgttggatgagcaagctttgagtttttgaactcaagcttggctcatcaatggtgaaaattgattctgagctttgattgttgttttatcacttggaatatttttattggggtataatatgcagtctggaaagtttggttgagtttggaaacgttttggttaggggtttgaattttgttggttttttgggtaaaaccggctaaccgattttacactgcttgtaaaaccgnnnnnnnnnattttgcagcagggaaaacccatttttcagcttgtcatttcgtgtcagtttcaagtttctagttggttgactccctactagtttagggtattaccatgttaagttgcagtagatagggttttggtttaaaagtcaagtcctggttgtgatttagcgagtgacttatgcctattgttatcgatgtgatttaggagcctataattcgtcgagcagttgttttactcaggttgaccggcacac

SEQ ID NO: 105246 - DNA, 851 bp, Cannabis sativa
  modified_base (436)..(445): a, c, t, g, unknown or other
aaactaatgtatcttagtttgatacaaatataaatagaaaaaactaatgtatcttagtttgatacaaatataaaagaattaataattttttaagaaataatttcaaaaaaaagaccaaaacttgagtttaaaaagctaataaataaaagattatttttttagacttatcatttttttaaacatataaaataaaaaataaataaaaaatgagtgaattaatatattttatattaattaatattatgaaattaataaaaaattaaagaaaagagagaattaaggagagaacatataatactcatgagagagtttttagagtgtcacatcaccgccttatacttctcctttatatatctattctctatataaagtgtgtctatataactgatattcttggtttatgagaaattcatgagtgacttttaatttttatttnnnnnnnnnntaaaatattatttatatataaagtaaaaaaatattttttcaatatgatatttttttaaacccaaaaatttaaacaatgttttttttttaaattaacaatcttttttttttttaaattaacaatcttttaaactgtcgaccatatattagaaagtagaaactagaaactagaaaggacgttgaaacaataaagaaaaacaacatcaataaatagtttataaatatatttcaagagaaatttatctcgaattattaaattcttccaaatttatttgctctaatatatatgacatttttataagttttttgttagtgtaattatcactcacttttctctccatatcactcttttcttttttcatcaacctagcaatttcctcatcaaccaaattaagcgagaggatata

SEQ ID NO: 105247 - DNA, 600 bp, Cannabis sativa
  modified_base (27)..(61): a, c, t, g, unknown or other
atgacaggaaatctacatctgggatgnnnnnnnnnnnnnnnnnnnnnnnnnnnnnnnnnnnaagtgctaaacaaaccgcgatttttcagactcatgtatgaattaatcaagttttaattaatcacgatttttaataaaattgataatttattactataaactaatttaaaaaagcacatatagggcatccctagggcgttacatcatggtatcagagtgatcaagattttaaagttcttgaagaccggctgaatatatacatttactatagagaccaattcgactcataatgtagtaaattttatatgtttattttaatttgtgattatttaaaattatatgaatataatagataatgtgaaagtagtaaagcatggcaggaagttatgtttattaactgaataatttaataatatatatgaaatggttatttagcattattgaatttttgactgtgagttggtgatcacatgggtatttaaaaatgtgcctgaggcgatttgataaactcaatcaaaaacttgctagaattggaggtggggatgaaaactgttgggattttatgcactaaacaaaacctataatataatcagatatact

SEQ ID NO: 105248 - DNA, 543 bp, Cannabis sativa
  modified_base (64)..(64): a, c, t, g, unknown or other
aataaaaataaaaagtcacccataaatttctcataaactaagaatttcagttatataggcacantttatatagaatagatatatgagattaaatgctaattatttctatttcgagtttaaactgtttccatttttaatgtagttgtttcaatttttgaggttaaagactagttgtttctatttcacatttagaggttacattgtttcaattttgttgtttccttttctcaatgtgagttgtttccattttttatgatatttgtttccatttcacacataaggttaagtgttacttatttccatttcgaggttaaattgtttctattttttaaggttaaattatttccatttttcaaggttaaattagtttcaatttgttgtttacatttttcaatgtgagttgtttccatttcacaaactatagtttcaatttttcgagtttaaattgtttctattttattgttttcatttttaatgtgagttgtttccattttttatgatatttgttatcatttcacgcataaggttaagtgctacttgttt

SEQ ID NO: 105249 - DNA, 2913 bp, Cannabis sativa
tttttttatcgttgttcataattgagttttaagtttcaattttttatttgattatttaaggaaactcgtttttatttgtttgttttaattttgattgttttactagctggtttctcacattccactatttttttttgttattcttttatggtttttattgcatttttgtctcttttattttccttgatttttttttctctttgattttaaattctgattctccttgttatatttgctgcatattgtatgcttaaatcaactctggtttttgagcaagcaaataaaaaaataaatgccaaaataaagaatgaagttagaaatttagttattacgtattgatataaaatttatatgtttgaaactggtttttaaatttagtatcgtttgtaaaagtttagttgtgtatttttcattatgttattgatgaaattatttttttgcctcctttaattaaataattagtttattttaatattggtgaaactggtttttaaaatagggaatttttaattatatacccaatattcaaactaattacaagaaagggttcaacaatttaaatagtgcacacactacatagcaaatgaagcggcatataccgaaaagagaaataattatctctctaatgtgataattatttttctttgaaatataccacacttttttattttttttattttttaattattttctctctctctctctctcttttctattattttaaaaaatatttttcgatcattctgttgatcatttcattttataaataatactattgggatttatatttcaaggtaatcattttgatgtgcggtaatcatatatttattttttgttactaaaaaaatataactataatagaaatcaacttcttagttttattttttcccttaatttgttaataaaaaaaaatagcaaaactttaaatttagaaaaaatccaatatatctactaattattacatgttattataagaatatctcttaattaataaaaaagccaacctatattaattttattataaaattttcaatttaggtaacattatgttgcattgttgtttaaaatacttttaaattattattttttaataatatttaaattatctacaaaatctatttaagaatcaaaagcaacatcatcatcactgaaaaagattaccgtaatcaaaagctacattttaatttctttcatattttattaagagataaaacaaccaaactttaaattaaaacaaaattttatatattcactgacttttggttacttattcgattagttacttttaaaattataattttaatttaatgttaaagtaagtgtttttattgtttaagatacatttttgttacattttatttattttaggtgacattatattttcatgttacttatagtaataaatttataacatattttttattattgagtaattttgattgatatgttaaagtttatttgagtttttttttaataaatcacacaaaacatagcattttatttaattaccaataaattttgtttgaattaatttttttttccttctaattaaatacaaaagaaactaaaaagttacatttaacatcttttttccttaagttattatttttttaaaaaaaacctataaataataaatactttttagtaaccccttaaaatcgattgtgatatctaattttgttgatttaaaatttggcaattaagtaaaaaaagaaaagaaattatatcttttattatgattattttttttcgtgaaaaaatataacccacataataaaatgataatcttatttatatagctttttagaaaataaaaataataaaaaaattataagaaaggaagagagagatataatttcgtttagttaagaaaaaaagacaaaaacaaacttgtctttaaaaaagaaaaaatagaaaaaaagacaaaaaataataaataaaaaagtcattgttaaaaaaataagagagtttaaaaaaaacaacactaatatctctctaagagagtataaaagacaaaatagagaatttttgattttcggtggccagcaaaagaaaaatattgatttttggtacacacctacccatttattaaaaagaaaaggtatccacacagtagattaaaataattaagcttattttcataaatattttcgaaagttagtattatgatctaattttctcttttaaaattagtatcgtttttagattataaattttttcactattttgttaatgaaactatttttttttatttttttaataaaattattagtttatttcaatgttgataaaactgatttttaaaattttttataacattcctcattacttttcttatatttgtaagtgttttttttttctttaaatgtcatatttagtataattaagtatttatgtcatatatatcaaaacttatgttcattttcctatatttttgtaaatagcccattttctttctaaccaagttaaaatatcattatttttatcaacaaggcctgtgacacattttctttttaagcattttcttgttgtaaattaagagacgactcttgtttgtaacaaaggtggagaagtataatactgcgaaattaaagaaaagaaaattaattctctttttgatgcaaaacttcaaaataataagaggatattgtatttagatatacaaataataaagaattatgttttcagttttcgaagaagcatcaaacaagagatagatatttatagatactttggtatgagtgtacgtttttattgtacacatgcattgcagacagcatcatcaagctctcacatctcctcggattcttcacttggtaaatataaagagaaacttccatatagtaataataattataaaaacaaaactttacaccgaaacaaattaattaattaaaaaagatatgtgtgttc

SEQ ID NO: 105250 - DNA, 533 bp, Cannabis sativa
tttaattaagtttttattttttataaatcttaaatttagatttctttttaatattttatatggtttttttagaaaaaaaaaccatattttttagtttaattaattagataataccatatttagtgggatttactttttatgccatatttattataatcttaataattttttcaatatttttgaaaataactcataaattgaaatacaataacaaaaaataatataaaaatgtcacaaaaccactttttgtcccaaatgagaagttatgtccctattgttttcatttgaggaggctgatgttgataacgatttggattatgaattcaaagtttgagtagtacgattcatcaactcaattcatgtctcctaaactattaccacaaggtttaacaaaaactaattgaaaaatgaaaaaaagtcaaagtgataagttcttacactccaaaacactaaagcaaaagcaacaaaagaaaagaaaacatcgatcgaattaactaacaacggttggaagcctttgttctagtcggaggctg

SEQ ID NO: 105251 - DNA, 507 bp, Cannabis sativa
agcattcctgccagtgataacaaaatttttatgtgtttatgagaattttccaaaactcacaatttaaattctaccatctagatttacatattcccatatcaaatcagattagagaacactaattatgcatcaattcttatgttatgcaaggtaaataaaatattcctattccacttacagagaaaaacctaaatctagggtttctcttgctccattcaagttgaactactagatctagtccttccgtaacaagatctagcttagcaaattgttattaatggccaagaaacaacaatcaaataaaaatgagatctcacttgaatgaacaaaggataaatgctaaaatatgcttaacatttaatcatacccaacataggagttcataaccacccaagccttaagaaaactagctcatgttcaacacaaaaattacaatccaaattcgaaattgttcatccatggttgctgcctctcttttacaactatcaagtttttgatatttaaaga

SEQ ID NO: 105252 - DNA, 632 bp, Cannabis sativa
  modified_base (58)..(70): a, c, t, g, unknown or other
  modified_base (167)..(175): a, c, t, g, unknown or other
  modified_base (221)..(222): a, c, t, g, unknown or other
taacaaatcaaagaacatgaatgacattctcgtgatcgaacctaatcatgtcaggatnnnnnnnnnnnnntctaggatcaactaggttatattgagttgaatagatattacggtaaatttatcatatctaatcaaagttcagtattggtcccttccaatgtatactnnnnnnnnncgatactagtaaactttgccaattccctggaaaggacataacactnntccaaggtgtaagtatatctatcgctgattgtcatgccagtctaaatccattgaactgacaaatcagagaattaaactttcgaacatataaacatgattatatattccactgtgctgacgacactataatctcgaacaattacatatgttttggacctaatagaatttataatcatgaaataaatcacatgtgaaccatgcaacataaaatgtgatttctgatctttattaattagtaaatatgattatattgaaatgggttttatttaaggcacaaaactgaacaaactgccacttgcactaatataaaacaaaaagtgtatttcaaataatctcgacaacttgatatctaaatcaagtgtagttagtagtatactctccgtaataggatctaactgttgggttttatg

SEQ ID NO: 105253 - DNA, 908 bp, Cannabis sativa
  modified_base (144)..(148): a, c, t, g, unknown or other
ggaatgaaaatataggaatagaattgggaataagtataggaatggaataaaatttaaaatgcataaaaaaattgattaaaaaattattaaattttttctcatcatgcattggaataatctttccttctatttcaaaatggaatnnnnnttctaccaaaatggtggaaaggccattccattggaatgacattccattaatttaatggcacgtttgttaaactgtaattggaatcagaataatcaatggaagaaatcaatcggattaaaatataaaataaatggaaataatattttattttgttgtttactaaactgaccggaaagaaaatcataatcattttattttgtttacataatcaggataggtaatcggaatgacttaatttgactaaattgccattgttggaacatgtaattcttttttatttatatatttttgaagggcatatttctcttttttatttttaattaatataaaataagttaaggaaaaggaaaagtattccttatgaaaattggggaagaacatttccctttgttttctccttaatttgcgtggattccattagtttcttccatttcaaaatttagtaaacaaatgaatgggaatcaatcccatacaattgattttcattcccctttagtaaaatgaaactaaacaaaggaatgaaatgaaaattgtttcattttcattccattccattccattacctctaatcaaacgtcatctaggtatttttctattggaaatgagtacggttttgaagagtgtgtttcatctatcattagtgattttgttgagagtgttttggtgagagatttcattgaaagaggaccttttgctgatatgttaaaggcgatggagttgccatgaagaacaaagattttgctgatatgttaaaggcgat

SEQ ID NO: 105254 - DNA, 669 bp, Cannabis sativa
gtagaatcaccctaaattatttttattattatattttggttgatgcactttgaaaagtcttgtaattgatctcccctgtgcagataagcatgggagtcggcgtttgggaaaaggaaggactgaattgatgggacaggacacttgggcttcagagaaaggagaggaagcacatgcaaatccaatagggaagggccacgtgtgcatcaagctggaggaggagaactgctcagttggcgttgacgaggcttttgggagcgaatagaaatgcgccagttggcgctaattgggttgcagggcccagaaggacatcttgggttgaggaggcagattgggctttagctgggcctttgcatttcctcctttcttttctttttctttgggcttctcctattcatttttcaaatttgctactttcttctttctctttttttctttttcttttctttaacaaaagcacactttaattcctacaaaataacaataaattaaattcaaataaaatattttcaacataaaaatatatttcattaatttcatgaaaatattaatttaaacttaatttattttaaactttaagaccaataattgtgcatttttcagcattaatcatctgcctgaatgtgggccaagtgggtagaatttatacatcatgcgggattcgtcaaggcg

SEQ ID NO: 105255 - DNA, 1423 bp, Cannabis sativa
  modified_base (205)..(206): a, c, t, g, unknown or other
  modified_base (494)..(494): a, c, t, g, unknown or other
ccacttacacataccttcaacccaggatccatgcttcctaggcaactatcgcgcaaccatcgcacaactatgcagcaacccaacgcagctgaaacgaaaattcaatcagaaagagaaccactattaattttggcaacttcacctgagaagacgactagaatcaatcaaaacaggggttgcttcgaattcataaaaaaagtgtagnnaaactactacgaaactaaaatttaactggaaatccagtttaatttacataaaactaatgtcttgacttcaatttttagatccatgaaagacagatctcaaaaagttgaattggagttcccaaacaatccaactcaagtataatctaaaaaaaattacatcaatactatagtaaaatatttatcctggtgtgtttttgttgttttccaaatttctaatagtgaatttattcatattaaattattaaaagacatgtagttaaacatggaaacattgttctgatttttaangtttcacaacagttgcattacagttgcctaaacattttgctaatagttatttcgtctgattgaaaccttcatctgatgtagccttcagccaaccacccagcaaccacccagaaactttcgtctgattgaaacattcgtctgatgcaaccaccgcgcaaccatgcagcaaccaccctgcaacaatcgtctaattttgtaagtgatgatagtgtaagtagtattttggtaattaaaatcacataaaaagtataaatgttgtctttaccttattgaggtatttttgtaaataaaatgtcaatttatatttttatgtaataatccctttctgaaagagtaccttgaatcgattttttgtcaaaataaaacttaataataactcaatatagaggtgttatgacaaaattggttacatattctatatctgtttgtgttaaaaattatattgaagttagttatattaaaaaaaattatcaaaaaattaagttcaggatcctctttgtactattttagaatatacaaaattatttttatcatttaataaaataaaaggtcgaatctataatttttataaattacatagtccaacataatattaacccatattattattccaaccaaaacctaaagcaaagaaaggaaacggcaataatatccgtacaagtaagcacttagaataatattggcatatgcagggaatcgacaaaccaaattaagtaccatatatacaagaaacctcaacttagggggacaaaacaataccatgaagatgtcaaacaatggatttaaattcatattaaatcccgtcactcctcatcacaaccctccacaccaaacccaaaacttaattcgaaaaataaaaaagtccaactagctagctagtccctttcttatataataaaactatatattagaaataaaaaaaaaaaaaa

SEQ ID NO: 105256 - DNA, 1096 bp, Cannabis sativa
ggcattcataaagccacgttaaaaattcttgttctaaaattagtttatacggtatattaaagaaatccatgaaatatttttatttaattaattatttaaattcaaatcttttattaaatcatatttaattatttgaataaaaaatacatcaaattatgttatagagatttttttccctataaccgattaagggaatctcacaaccacttgagagaatatctcagctacttttcaaattaaatttaaatgatgtttatcttttaaattaattagttaattaattaattaacccaaaaataaatctagtgagaacaccctattaatggggcgactacactgtgtctcagcacagtgtaggtggcgtctccctttgtcttgattaagacaagagttatgtcttttgtcctcacaacttttgtctttttctaatttatttaattaattaattttaaaaataaattgtttatgacaaaataaataattagtatttttacatatcaaaaatgatattttcaaactttcatatacaacttttatccctccccttgacaatctatcaaggtggtgattcggggactatagaactataattctaagctccaataaattagattatttattggatctcatcagccaaattattatatttattaatttcataattactacactataaatatgaaattgaactattagtaaatatagaattatatttacagagttttactgcaatattcattgataattaattctcgtgattagccctccttttgtttgttcgtaattggttttggttaaattactgttttactcttctaattacttatgtttcttttagtaccgttaattaactgctgaaagtataatttagatctaatataaatttgtgcacaacttttcagttccagaattaatacttaaagggaaccaacattcgatctattaggaaagtcaagattctataattgtagatcatgtttctagccatccatattattagatttgcaaaacagaagttgtaagaattatgttctgtgagaaactttaacgagtgatttaaaaaaactaataacatgaacatgagttaatgataact

SEQ ID NO: 105257 - DNA, 885 bp, Cannabis sativa
tatatgtcactgtcgcccgtgcctaatcaggatcaccgataggaagaaacctaacaacggttttagtatgtgccaaagcctggcacctatatgtcactgttgtccgtgcctaatcatgatcgccgacaggaagaaacctaacaatgtttttagtatgtgccatagcctgacacctatatgtcactgctgcccgtgcctaatatggatcgtcgacaggaagaaactaacggtttcagtctgtgccatagcttggcacctatatgtcactgccgcctatgcctaatatggatcgccgccgacaggaagaaacctaacaatagtttcaatctgtgccatagcctgacactcacatgtcactgccgcccgtacctaatcaagatcgccgacaggaaaaaacctaacaacggtttcaatttatagtcagaaacctaatggatgttgaatttgattagttctatctattggatgtatttcatgtacatctatttgtttgatttgggtttattcaatattttcgacctagtatttattggatcggattggatccatccaatattttagattcaatatctattggattgaattagatccatccaatataaaaaaaagtaaatttcaatgttaattttcattgatacatatttctttttatgtataacaacataaaatttaattactcattcaatctacatgaaaatattaattagttcgattggatgttagatgtattagattttcaaatctaacattcgatccgatccaattggatattcaaaaataacatccaatctgatcctattacaattggatattcaatatttgacgatcggttataattgaattgatcggttgttattaaattaaatcgatttatgcacaccccta

SEQ ID NO: 105258 - DNA, 676 bp, Cannabis sativa
  modified_base (350)..(380): a, c, t, g, unknown or other
  modified_base (461)..(476): a, c, t, g, unknown or other
attcggatggatttgagcatggcgatcggactaaaagtttcctcatagtccaggccttctcattgggtgtaacccttagcgaccaatctagctttaaatgtttcaacttcacgtccagcacctcttttcttcttgtagacccacttacatctaattggacgatagtcatcaggtgcgtctacatattaccaaactttattctttttcatggaatccatttctgaatccatgccggctgaccactgtttctgtttgggactttccattgcctatttatgttggaattattttatcaagatctagatttactactatgtatgttgttaaacatcctaatatgaatttctaannnnnnnnnnnnnnnnnnnnnnnnnnnnnnnaaaccttacattaattgcagcgaaatataaacttcttccgttcagatctctagccctattcctttctgtagtagagcattnnnnnnnnnnnnnnnnggatctctttctctccttcttgttcccgattctccttcttgttgattggattcttctcagtcttacacactatgattgagataccacttgatgtgtgggggcactcaatctatgactcaaggtatgaaaatatgaagagaataggaagagaatatggttcggctatgctataggaaggaggctcaaaattttactgaagg

SEQ ID NO: 105259 - DNA, 593 bp, Cannabis sativa
actttttttgtcttttcttttttgatagttatattttctttatgttaatattaattattttttttaatgtatatatatattcaaaaaagaatgtatatatatatattttttttaataaaatcggtatctttattaactaatcaaatcgtgaataacaatagaacgtgctttagaggaacaatcttccaactgaagcacacaacctggagagaaacaaaagtctctggctaagcagtgagcaagcttgtttgcaaatcgtttgacaaaataaaatttcacattgtctaaagataaaggcaacacacgaacatcatgtactaaaagaccaaaaaaagatgacatagagattttactttgaatagcttgtatgcataccaaactgtctgattccagacttgtctccaattgtgccgatcaatccaacttaaagcttctttgatgccaaccatctcagcaacttcaagttgaacccttcccaaatgaccctgattgaaagcctccacgacattgccatggtagttgcgagccacacaaccccacccaaacctgccttcatgctcaaataaggcgccatcaacattaaccttgatctt

SEQ ID NO: 105260 - DNA, 521 bp, Cannabis sativa
gccacccttttacacgccccttttcggaggatggtgctagctttgactacattcttccaaaaccaggagtcagaatctttataactgcaattgagaaactctctccctttaaggtacttagcctccagaatcttagagcaaagcgactgcttgcccgttaataagttccatccccacttggccaaaaaagcaagattcatttccttcattttccgaaagcccaggccccccatcgacttgggaaggcaaagcttatcccatgctttaaggtggagaccatggtttcctttttcaaaaccccaccagaagtctcgtactaggccatcaatccgattcacaaggcggttcgacagtttggtcgtttgcatggcataaataggcatagacaaaccgaccgacttgataagtgtagcccatcctgcttttgataatgttttggccttccagccttgcaacttagacgtgagattgtcaaggatgaagttaaaatcagcatccttttgtctagatctgaagagggg

SEQ ID NO: 105261 - DNA, 662 bp, Cannabis sativa
tttttcccttaaaccgttcattacatatttaattttacatgatatgttacaaatgtatatttttaaacaaattgacgtgaatagttgataaatatatataaattaaacaattagaaaagagtgtctgcccatgttcatgctctgtggcagtttttcagtttttttcagttctttccaacccacttcccctgttcttccaccatcaccattgtcgatccaaactgatcttcctttttgcttatttattttggttctaccctactgtgacatcttatactttctccatgaatccacttcttgataaaatgaagtcgactatgactctcactgaaaatgagagtgaaattctggccattactgatgatggtcctgatgcagatgtttcccaggaatttattcttattgctcgtgttctaactagtaagaaagtctggttatccacgtttcaaagacagatggctgaccattgggatgggcgtttcaaagtgaacatcaaagaacaccattcagatttgtttatggtctgttttggatgtgaaggagacagatttcgagtgttggataaggagccgtggcactttcaaaatcaccacattgtacttattgatccttctttgcatttgaatgttactccagaaatcatgatttacagtcctttttgg

SEQ ID NO: 105262 - DNA, 561 bp, Cannabis sativa
aaaattacaaaatgacatgcttgacatgctcttcaaaatgtaaaaatggtaggaagaaaatggtaagaatgaaatggcaaaaatgaagagggttatggaatgaaaagtgaagagtttttgagatgaagagatgagagatgattagaggggagaagagatattttggtagtgaagagatgtgtttgaaaatggtcttacaacactctatttataggaaaaattgggggattaaattaatcaatatataataaataaattgattaatttaattagtgttgggaagataagggataaatagaatatgtgtaagagtattggaaaaaataaatgtttgcttggatggaaaaatagtgaaaagatagggtaaaaataaaataggaatgttaatttaggtgagaataattgggaaaataaaattgatatgtaagtgtaaagtgtgggagaaaatatggatttttggcattttctaagtaatttttgaatgtgaataattcaactaacagctcattttttccttctttttgtttcttctgcagatgccacatggcgacggttggatgg

SEQ ID NO: 105263 - DNA, 1383 bp, Cannabis sativa
aagtttttccaggaagcgtgcgagtgaggacaaagcacactggaaacactcgtgttgatttgtaaggtcagtcgtcaatccaggaagcagacagagtagcgtagtcgtgtataaaagccattaatctgagggtgtaaggaccaaatgaaggcctgaagtgggaacgttacagtcacaactcaaatcgcaactctaaatcaccatcaaaccatgtaataattctatttatgtcccaatcgcaacataaattgcaagaccaccgaccacataaagctttcattgatttcctaaacaatacaaagtcattgcaacacaaatcgcaactaatattgtaaccctaaatcaccattaattaaaccatatcacaatctcagtcgtgttcaattctaacataaagtgtaaccctgaataaccattaaaccatattacattctcagatgttcttcgcaactcaaattgcaatataaatcgtaactttcttcctcctcttagtcattctcccgagccaaaggtcagtagctttagcaatgattatcgaaaacttgttgaagccaaaaaagatgattccatacatgaagctttataccacttttttcttcttttttttatttcttattggaatcacaatcttggaaacgacacatggctttcaaccctaattttgcaaaataaaaatttatatccatattaatgctacaaaaaattaaaaaaaaaaaaaaaatagcttcaattgtacaaataaaaaattccccatttttttttagattgtatcccctcctataattaatttaattatgaaaaattaaaaaaagtaactaattacatattcacaagataaaactattaaggtcataaacttagcctatactagttacacacttcttctaatgaataataataaaaccttttttttagaagaggaggttgaaaattgacattttaacttcaaatttgagctagccaccctaatttgattttaatatatgtcacaacattcgattgtagaacaacatttattaatcaaagaaagtagaaaacaaattttgacattgctttttctttgaaattgtgatgaagaatgcaccacgtgtcaaaattattaagggccaccaaaataaaataataatgttcattttcatctccacaacaatatgattataattttaatattgttattaagtagtatttaattgatatccatattttatgaataatcaatttttttttataataattattaagttaaaatatacaaaatttaatatttattttcaccaataataatataacacctcgtattaatattcaatttttaccattatattactctttaacattttttatttatttatatattctatatatattaattaaagttgtttt

SEQ ID NO: 105264 - DNA, 577 bp, Cannabis sativa
atagcatacggattccaaacaccatgtccctgattggtgtttctgttgggaggattttgagatcttgaatctgcattgttagagagattgggggaatattgtggtttgaaacgagaaccacgattagtagctaaattcacagaatcaagttctctattgtgattctctatacgatgttcttgagacaaaagcaaagtcttgattttagccacagagtagggagaatttcgtgaattgacactaataacaaaagtgtcataagcaggaggcaaacctttgaatattgcagcaacatgttgttttacagtaacaagattaccaacagatagtaaacgatcaacaatagtttaatccgaagtagatattcattgatagacaaggaacctttcttttgattttgcaactgagtagtgtaaagatcaatctcagcagaagtttgagtcacgaaatatacctccaaagttttccagatctgattggatgcttcagcaccaactatacgcgtgagaatgccatcagacatggaagagagaagccaagagtagagaagctaatcttgaacctcccattcagtgta

SEQ ID NO: 105265 - DNA, 1878 bp, Cannabis sativa
ataatttaatattaaaaaataactaatccaaagtaatcgatccaatccttacttttgcggattggattcgattggatttgagctattgtgcggattggattggatccaaaaaaataaaatccgcacttagtgcggattggatgttgtttgaccaaaaaaatgcggattggatcgaatgaacagcgctaactaaaatcacaaacaaaatcaataaaaaaaataaaaaacggtggtggtgcttcggttgtggtgcgccgtgggtatcgtgggtcggtggtggtgcgccgtaggtatcgtgagtcggtggtggaggttcggtggtggtgtgccgtgtgtcggtgggggagcgccgtgggctggtggggatgttgaaggggtccgatctgtccgattttgtgggtctgtagggtggttcacgtggtttgggttgggatgttcacgtatggaaaaagagggagagagattgggggagagaactgatgttgttagagagagttgagaggttttaaaatgagaagagtatttttgagtttaatgtaaaatgtttatatttttttaattttaaaattttggaaaataatttcaccactagtttacacatataatcaaatttcccactatttatttgaggccagaggaaaacccgtattcttcttctcctcttttggtctcactctatcttctgatatcatgttgtcgttttcttatatagttgtacatatacataatacattgctgaaaaatttaatggaccaataaaattagactcataattctctttatattaattgcctctctgtttctctaaccactcagtttctttcactctctctctctccctttctcttacgaataaataaatacccactatatcttcgtcaattagtctcaccaaaaaaaggaaaaaaagcagaaaagaaatggaggtctcatctgttttttcactatgtgctaaattactgggcatagtcataactgtgacatggattttgagagctgtgaactgggtatggttgaggcctaaaaggcttgaaaagtgccttagaaaacaaggtcttaagggcaccccttacaggtttctgtttggagacttgagagagagctttaagatgatcaaagaggcaaggtccaaacccatcaatctctcagacgacgtcgttccacggattttcccttttgtccttgacacagtcaacaattatggtatgtttatttaatttatattaatgtttattacaactttcaagctatacaaatatatatatatatgagtagtgatatagatatctatttaacacagtacttatgtggtaacaacttattaaattagtcatttttatttaaaataaaatctcacatgttaaaaatgattgagtgcgcacaaatttgatacacagttttctatcttatcttatctttttcatttgattgacttctcatgctgtggttgttttcagtgctactatgattacgtgttatctgtgtacctgactatacgtgtacgagatttatatatggtccaaattaaagacgtattgcctgcctatataatatattacttatattataaattgttaccatatacaacgataatatttatatgatagagaaggaggctaatggagaggtttatttatatgttatatataaataaatatttattttaaaaaaattgttttgagaatagtggcgactggcgagatgaatatatattggtacatactaacaatgtttaagatttataattaggaacaaataacagcgctagctagttatattaacattatttatcatttgttagttgcacactaataattagatcgatgtcacataatgtgcaatatttttatgtataccatagtgttttgatgatcaatt

SEQ ID NO: 105266 - DNA, 552 bp, Cannabis sativa
  modified_base (520)..(525): a, c, t, g, unknown or other
tcaccggtacctctaagtatctcaccagtctgttgcaaaatggcttcttaatgagagggttgatacataacttattaaactaataatattagctaattactagacatataggtaggtaaaattaatagtatcttgtcatgccaaatcattaaaagtaaaagttataccaatgctttcatcttattcattaaaatctcatttgcaaaattctatttctttttccatccttattttataatgatgttagtgatggatattgattagtgaaaacaaaaattaatcttgatgataaggggaaaagaaaataagaagaaaaataatttattgttaaaaaatgcatatatttccaataaaagtaaacataaaatttcatcataaaaattcctccaaaataaacataaaattaatttattataaaatatatctattaataaaatataaaacattaattcaataaaatataataataaaaacataatttatttttattatcccaaattttgcactctgacgtggcatnnnnnnaatggtgacacgtggagtccacttaga

SEQ ID NO: 105267 - DNA, 693 bp, Cannabis sativa
  modified_base (623)..(667): a, c, t, g, unknown or other
acctatacctgtacaaagcattcggtcaaaataaaacaaacacagttgcatgatgattataaacagacaatgaaattcattaaagataacaaagcatgtaaaactaggattaaaagctactcggtcagcccgttgtatgaaaaatgaaaaataattccaagtttaaagaccgcttggtcagtcaccttgtcttaaaaaagccttatggccagacaaataaaaaaaaaagagagaaaaagaaagtagtcaaacggctggagtcccaggctctttgtacgggtcttctgggtcagttgtgttggaattattttaccaggatctagattaactaacaagtatgtttttaacatcctaaacatgaacttctaaaatgatatgaattaaacacatattaagtttcaaaaaccttacagtggttgcagcagaatataatatctcctcccactcagatctctaacccctgtatcctttttgtagcagagtatcacaaggatctgagtccgaatctccttctcttgaaactggattcttcacagtcgaacacactatgattgagtatcacttgatgtgtgtgggcattcactcttttcactataggacttcggttttgaagagagaaagannnnnnnnnnnnnnnnnnnnnnnnnnnnnnnnnnnnnnnnnnnnnagagagagagagaaggtttcgaatag

SEQ ID NO: 105268 - DNA, 844 bp, Cannabis sativa
acagagacctaaacccgaaccgagactaggtctcgaacccgaacctagaccgggacccaaacccacacaataactggaacctgaaccaagaatcaagataaggaacttggaaatagaactaggactgggacctagtacccgacccagacccaaacttgaaagtaggagccaactcgtgactcgtcaccgaaaatggaaccagactgggacccgagattgggatccgaagttggacccaaggcttggacaaaacccgtaatcggtgtctggatttgggacccagccctagacgcgaaccctgacaagaatccgaacccacacccggaccttaacttagtcccaaaaccaaaagtggaccagaacccgtaccttgtgacccaaaataagaaccaaaactggaaatggacggggactggaactaagacttggacttggaatcataattgaaattggacctagatccagaaccgtaaccggaccacgacccggactccaaatctgacctagacccgaattgggagccaagcccggatcccaaccaaatcctggactcacgacccgaacccgaacctaaactcagaaccaaacatggaacaagactggggacaaagaacaagggtcgggcgtagaaccgcaccccagtctcaatcccgaatgcaaactcagaaatggcacctaggacttgaacaaaaaccaaatcgagacccatgacagtgatccagatcatgactcgggactctggtgacggggcctggaatagaccagtagtcggtgtctatatctgggactcagactaggaccagaacccagacgaagaataaaaccgaaacccagacctagacct

SEQ ID NO: 105269 - DNA, 1025 bp, Cannabis sativa
ttgtgtttcaaagatgcttttccatataaaactaggattattaccaatcacagctgaaaggaatatcccataaggataatacctactcttataaacctgactaacaggagatgtgtcattgagaagaaaacgccaagcttgtttgcccaagaagggcagattatagtcatgtaaattcttgaaactaatttcacccaaactcttgtgtttacacaaacgattccaactcatccaacttattcctcgagatttcttcaaattaccccatcaatacttggccatgagtttttctagtttgctacaagtgtctaaagggataagaaacacatacattgcataactcgaaagagcttgtgtaacaattttaagcaaaacttctctacctgcctttgagagaaatttgccttcccagctcaagattctttttaccattttttcctttaaaaagcgtaagatgtctttcttttttcgatcgataatgcatgacagcccaagatacaagctattctcattagcagccaccatacccaatctttgacagagtctctcacgccaatcggtcggagtattagcactgaagaacacagatgatttagcgaggttcaccctttgtcgaaaagcaagctcaaagatatgtagtaagcgaattacgttatcagcttcctgctccgtagcacgacaatacacgtagctatcatcagcaaacaacatgtgagagattgtaggttataataaaatacgcatagccgaattgtattgtatataaatataatttcattataaaaaaaaaatacttccgtctgtattccaatatatcaattaataaaattcaattagtagactcagaaaaaaaaaatgaaaaactgagtggcttatttaactgaaaaataaaattgaaaaatatatgggtaccgaaatttaattttataaaaacacaattagcaactcacgcgtgccacacggaccctctcaattctcatttcccgccttatatttatatatatatatatactagcaaataacta

SEQ ID NO: 105270 - DNA, 562 bp, Cannabis sativa
  modified_base (47)..(54): a, c, t, g, unknown or other
gaaaatttggaaaataaggaagttttctctcaagctctctctctctnnnnnnnnctctctctctctttcggtttggcttggggctgctaggtctgggatttttctttgtaaatcaagaatttttcagaaattctaagtgttgttcaagctaaggtacaagttctagtaaccttcttgatgtgttcttgaattttgaagaaaaataagtgcatgcttggtgattttaatgtttgtagttgctttgcaggtttgttgttattttctatagtttaaatatgtttacttaaggtgatctaagctagttttgttgttagttggtgggatttaaccttgtgtaaaggtttagactcaaaatctttaatttcaatggtgaaatgttgaaatagcttgctttgcttgtggtatttgattgctgttgttttcagaggcttatttatgtatatttgagtagattcaaggaggttttgatgcatgtgaatgcggtttaaccaagcttgagttttgaactgaaagcttggcgctttaatggcagtttttgtatttttgcatgaagctttgtttt

SEQ ID NO: 105271 - DNA, 809 bp, Cannabis sativa
  modified_base (221)..(226): a, c, t, g, unknown or other
  modified_base (436)..(443): a, c, t, g, unknown or other
tttacattttttaacttgggttacaatttgagttgctgtgtgggttgaaatgtggattgcgaattgagttgggttgcgatttgggttgttgcgttggttgcgacgtggattgcgaattgagttgggttgcaatttgggttgttgcgtgggttgtgattagggcatttactgtaaagcaccatatatgtaatgaccgcttaagtaatttggattagtaaagnnnnnnagcactaatttctgttatttttatgattagttatgaaattaattatttgtggaccccaatatttagaaatgaatattagagttataatttcttaattccacattttttattaatctctagggtattacttgacttatgtgtgaaatatgttattttagtaatttttgctcggcgacaacggaaaatgtgatggatggctagtttgatcannnnnnnnagtttagaaccttatttcttagtgcgaaatactgtagagaaaataaaatatcagaattaagcggggttgtggaatttgaccattttacccctagttttgaaaaatacctatgttataactttgagggcattttagtcttttcctttagtgaaggataggtggctgccctagctaagtgacacctagcaaaatgaatttagcaagggaaagtgattttccctaaccttcatcttcatttagagaaaataaaagaaaatacaaaaatcaaagaaacctctcttgtcacgacccgagccctaggccgtggcaaatatgtaatatccataacttgggtggtcaaaggtcacactttgacccttgttgaaa

SEQ ID NO: 105272 - DNA, 533 bp, Cannabis sativa
ggatcagtactagaactaaggacttagacccagaattgaatccaaactcaaataggtattggaacttgggactcggaccgaacctacaccataacagaaattagaaccgaaactgaaagttgaccgggactggaactttgacttggacttggaatcataacagaaattggacctagatctagaaccgtaatcggaccaggacccgcactcaaaatcagacctagacccaaattgggagccggacccggatcccaacccaaacttagactcgcgacccgaacccaaacctaaactcagacccaaacatggaaccagactagggatagagaaccagggttgggacctaaaaccgcaccccagtctcgatcccgaacccaaattcagaaatgggacatgggtactgaacaagaaccagaccgtgacccgtgacaatgttctgtatcttgactcaggtttcgggtaacggtgcttggaaccagtagtcgatgtctagatctgggacacagactaggaccaaaacccagatgaagaac

SEQ ID NO: 105273 - DNA, 645 bp, Cannabis sativa
  modified_base (42)..(50): a, c, t, g, unknown or other
  modified_base (121)..(121): a, c, t, g, unknown or other
ttaaatacatccattaatagcagtggctcgtggactaaggcnnnnnnnnnccccaaccacgtaaaaagtcttcatctgacttttttacagctcattattataattatattttaatagttgncgaaaacctcggtcaacagtaattttttggtattgatttaatactaaatttgagttttaccattagggataaccttagtaaaaaaaaagaattactagaagacataaatgatgtcacttaaatatgataatattttattacttagtacataattaatttttttaaaaaaaattaccatcaaataaaaaatataatttaatatttcttaaacatcttccacaaaagaattgtttactattctaattaaaaaattataactaaaaaagaatttaaaacacaaaaagtaaaaatataacaacaataacaataattaaaatataattaaaaaatttattcaaaaaatataatttaaaaaaaataaaatagattggatgtccaaacctaatttcaagtgagaaaataataaatttaaagattttttttatcacaaatttattgttaaatttaaagattttgtctaattttagtaaaaaaattctaacatgatagaaattcaagagggatgatttagtacatattaaaat

SEQ ID NO: 105274 - DNA, 563 bp, Cannabis sativa
tgaagactataactgctaaaaaagcactagactttgttatccaaaatatagtatgtcaatacggcctgcctcacaaaatagtctcatataatgggaagcagtttgagtgtgaagaattcaccgacttctgcaaccaacacggagtcgttaaaagcttctccccagtggcaaggcaacaaacaaacagacaagcagaagcggtcaacaaaatcctaaaggtcaccctaaagaaaagctgctggcctacaaaaataattggcccgaagaattgccaagagtgttatgggcctactggacaaccccaagaaccacgaccggccactcgccattttcagtggcgtacggttgtgaagcaatggtcccggtagaaatgttattcccatcccacaggagaacaacttacgatccaacaataaacaaggctttattataagaggcgttggatcaaattgaagaactccaggatgagtctcaaatacgaatggcggcttatcaaaagaaggggactaagtactttaaatctaaggttaaaagtagaaaattcactattggtgatatggtct

SEQ ID NO: 105275 - DNA, 897 bp, Cannabis sativa
ataatattttggcatggatatatcctttagttagctttgcctaatatcaaagaaatacataacatttacctcaatctttaatcttctacaccaaagcacacctaattaggattagtatcaggcaaaccctttaaaagaaatacacctaattaggaacatactaaatggaaatggtatcattttctctcgcactttatgaaaacttaaacattattattttttttttgaatttatgaaaacttttatcgaacaaatattatatgtttacgggagaacatgtacataccagtactaattatttctttctcactgaaaagcaaattattaatgataataatatcgattgaggaagcaatcagttggtagcagtaacaataactagtggatcatcagtgaatctgcaaaaatgccaaagtgaagcaaagcaaagatcaaacctgaaagttgttatcaatgaaactggacaaaaataaagagataagcctaacaaaataacagacaggaatggcaagctgcacatcttttggctaaattatggaaaggctcagttgatatctactgttgtcggaggaaaatagacaacaccaaatatagcgagtattcaaggtaaacaagaacactcttttgcaaaactgcgagtattcacctagaatagtgaatactcaaatataaatagcgagtatgtgaataaagacaacataaaatgtaaaagagacagaattatagtggttcagtcagaacttagtttgcttagtccactttttgcaagagtttgtgatccgattttattcaaattcgatcactcttttatatagaaagcaagtggtcctttggattacataaccggtcagataggaccacattacagtattagttacatttgatttagataaaaaa

SEQ ID NO: 105276 - DNA, 603 bp, Cannabis sativa
ttataaatttccttgtttttgtcagccttccgccttaccaactcatttctcaagcttaccgcctgctctcaggcttgtttattttttatgtagcccgtgcctcggcttcacctagcccgactgagattttatacttttatgaacttgtgtccatccccaagaagggggataagtttaagaacgattttttcacactccgggcccatcctactaatgagggcccagtcccttataattttcagaagaatgttaaggagtaccgacaccgtttcttcttctcttccagctttcaggccatggatcgccccgaagttctcatggagtggatcaggatccctccactgcattgcactgctcctacctatcttttcctccaacacgctaaggtcttttccacttacgacgaaaatagccttaacgtgggagacttggtcacaatggagaactaccggaagtccaagcttatcttagggaaccattccgtggataacttcaacctctctaaggtcctctgcccaaacattcgtacccgagactctgaaaaggcacttcgggcagacattgcctcagcggaggaccagtatcagaagtacctcttcagga

SEQ ID NO: 105277 - DNA, 553 bp, Cannabis sativa
aaaaaaaaaatctattaaattgtgtttggatgcctttaattaaattaaatgagatatttatttacactttcataaagacaactacactctaatattaaaaaaagtaacttaaaataatttttagaaaatgcttttatatttttaattttattttcacatttttttctcttaatattaataattatttttattttattttcatatttattttttaatttttttttaataaaaattatatattttttattttaatttttttgtcttaatttaaaataaattttatttttattttataaatatattttttttaagaatatgagatggaagaaaaataataataaaaataatataaattaggagaattagtctctacactatttattttacttttttttttattaatttttacggttggggtcattctgatatttgctgcgagggttaatatatggatttgggttgcgatttaggttgttatgtgtatttccgtataaataaaaaaaatgcttttaaaagtaaaaaaaaaatcttataaattaaagatatatatttt

SEQ ID NO: 105278 - DNA, 810 bp, Cannabis sativa
  modified_base (331)..(333): a, c, t, g, unknown or other
  modified_base (384)..(423): a, c, t, g, unknown or other
tcgtagtaagtcttccaatatctgaattgttctttccgactgaccatcagtctgagggtgaaaggctgtgctaaactttaacttggtacccatagctttctaaagtctcaccaaaaactttgatgtaaactttggatccctatctgacacaatagatttaggcgttccatggagacaaactatctccttcacatacaattcagcgtactgatcaactgaatatgtaactttcactggtagaaagtgagctaattttatgaatctgtcatctatgacccataccgaatcatacattaacgccctaatgttaaggcacgctacagtgcttttnnnattacagtgcaatctttgctaatttttgctcagcgacaacggaaaatgcgnnnnnnnnnnnnnnnnnnnnnnnnnnnnnnnnnnnnnnnntatttcttagtggaaaatattttaaagaaaataaattatcgggattgagcagggttatggattttgaccattttacccctagctttagaaataccttagtatttggttaaagggcattttagtcttttggttaaggggagagtgaggtggctgtccaattatttgacacttaaagagtcaaattcagcaaggattaattgagaataactcttttcatttgaagaaaaaaataaaaaagaagaaaagccaaaattagagaaattacttctctttctctctttcccttcgagatgcaccaaacgaaggagaaaatcagtgggttctttgcttcttttgctgggaattcagtagagattcaagggtcttgaagctaaggtaagccctagt

SEQ ID NO: 105279 - DNA, 1228 bp, Cannabis sativa
  modified_base (253)..(259): a, c, t, g, unknown or other
tagtcgcgaccatggtcgcgactactgaaacaaatttgacaacttcagcatctttcagtcaaatatgcataactttcacatacgaactccaaatgagtttgattcaaaatgcgttagaaagtagaaaaataaatctaaagtttctatgttttgactttttccaaaatttgaacagaacatagtcaaatttaggcttgaagttttagctttattttcttgcaaaattttctctattttatagattgttgttttnnnnnnntttgatcaattgatatattccaagtgtgaaacctgaaaccaaagaaaacaagcatataattccatcccaaatataataacaaagaagaaaaataactataaaaagtgacccaaaacgtaggcgaaaaatagcctaacaaattccccaaaactagattcttactcgccctcgagtaagatcaagactaacactaaaactcgattaactaagctatcagataattatattaccgctgactcatgtgaaatttccttccattaactaaactagattttcaattcgaaaaactctaacaattaattaggatgctaaatttgaaaaacaatgtaatgatgtaaattaacttcagtatcgaaacaatgtcaaaactgttttactcattctaaccaatccacactccaatggctaatatgcttgcatgcttacctctctcaactaatattgacaacatttttcagaatcaaaaggacttttcaggttagaaattaattgttttgatactcggtacatgaagaacattttggctaaaaatgccataagtacactagaacccgcaaacttttcactaattaaattcttccgaagtgttcccacaactaacaataactgagactttataaaaaaatttcggacatcacttatttttcacttttagcttttgatctctcgcttattttttttttctttttttttcatgagaaattactattctaaaatttgcaagtgatgtcaggttaaacttttttttttcaaacctttctcaatcacgcagttttttttccttcttttcttcaacactttcactcacaccattattcattctcctaaacttatggtatcattcaaaatacaatgaggatagaaaacatggaaacatttttggttaagcaggtgaagaaataaaacaggtttaggctcaaaagggttcactacgggtattcattgtatggtaggcttgaaaggctcaaa

SEQ ID NO: 105280 - DNA, 6582 bp, Cannabis sativa
  modified_base (26)..(32): a, c, t, g, unknown or other
tcctttccattccattccatttcatnnnnnnnaaccaaacgccaccttaatttttcaaaaggagtgttctctcaacgtttcctttattgcttacggtggcatttagttaggagaaatgaaaacataagaatagaaataagagtgagaataggaataagaatgaaataaaatttaaaatgcatacaaaaattgataaaaaaatcattaaattttttctcgggtaaatactattttggatcctgtgttttgtaaaagttaccaattcgattatctgttttgttaaatgacaaaacggacactatttttttcaaaatagtacaaataggaccctaagcttaatttttgacaatttttttttaatataactaacttgaaaatacgaacagatacaaaaaatgtaaacagttttgtcataacacctttagatatgattattattaaattttattttaacaaaaaatcagttcagggtcctatttttaccattttagaaaatataggatccatttcgtcatttaacaaaataaatggtccaatcggtaacttttacaaaacacagggtctaaaatggcatttactcttttttctcttgttatattgaaatgatttttttttctttctttttaaaaagtaacagtcattccaccaaaatagtagaaagaacattctattggaataatttcaatactttaaaatgcaactaaacaaaagaatagaatgaaaattgtttcttttatatttttttattttattacctctaaccaaacgccatgtggttgtttgtaatatcttaaaagcatcatatgcaataggtttccattacttttttttacatccaacactcttttttcataaggaaatgtgtaaagctgctagattaaatttttcctcttagttgccataaatctgacaatacttaccaattaaaagttgcatctcatatcaagtttggactaaatttatttttgtaagaaaattctagcataaatatatcctttcgaaagcaataaataataataataataaaacaataaaagtaatttagacaaacatcagtattcctattctacttggtcgtatttaaataaaattatgtttctatatttagataaatagaactatgttttaaaaccgatcacacactaatatatcaaacataatccaatctatttgaatctcaagcaaaactcatatcctcataattagtctttgacatctactgatcttatggtgtacaatcaaaattgagtgggttcatagcttatatgaaaaacagtactaataaataacccaataagaacaacagaaacaaatatacacaggccatccttgtaaaaacccaacatcatttgacttggcactgctttagaagatttagagcacatttaatttccttttgaacctttttcttaatacttgaacctcgtatgatctgggattgccttggtggtagttgccaaggggacatggcctggcatataatgccattagttggagagattactcgaaccagaaaagtaatcagactgtttttagagaaccggcattcacaggcttctggaaaactcttacaactggcattccatcatcgttgtcatttccgactctccaagtacgattcttgttcctttgaggcttcttgtggagcttatgtggagccctaggcttctttgcagtaccctttttggaagtaagcccgttagccatgtcaaatgaattgagatcgtcgagcacattttcaagattaggggcattgttgtttttatcagctggagtattctcaacgtcagacgtgtctgaactagttcctacattatcttcctcatcgtctgtcattcctgggggaagctgataatgctgaagcttaccatctatataatccttcaacatttggcgggcagctcttgtttcatccggcaatccacttgaggcaacatacccacgagatgcacaataggacctcaacagctctgcagctagaggcggtcgtgactgtagttcatatggtttgggttttggaagtttaattttgtaaacatcttcaataacttgccttgggactctgttggctactacttgtacagcctgcctgtgctcagtcatccgatcaattggcagtacccctgaagcaatcatctcataccttgaacttgtaaatgatggaaatactaatccagggcaatcgcataacgttagctcctcagaaatgatcaatgtttggaaatgcttagtcttccctggtgtagaggtaacacctgtgcgcttctggcctaccaatgcattaatggttgaactcttgcccacatttggatacccaacaaatcccacaaccacattgtttgaagcggaactttcagatacacttcctccttgggaattggcatcagttgaactaacatcgctggagccagcattcctcctcctcttcgctatttgttctgcctcagactgtaaacgggccaaaagctcatccctcccatatactttcgtatcgggatcatctgattcctgaatgctgctctgcggatcactggaggttttccctagtaaagctgcagaagctgctttggcggaccagaaaacaaagagaatttcatgaagacggaaatactgggcccatttttccctgccaataaattttttaataagtgtcacgaactgataatagatgaacccaaaaaaatgaattgagaagctactaacctgacagaatatggcaatagatctgctttgttaaccagaagtaacgtttttttgtgcttgtcaagttcttgtgcataaatctgtgcaagtaggatggcatcaattgctcaagtgtcaaatatgaaataatcctctaaaaagtaatgtcatcgttaaagagcaatggggatgatgagaatatagattagacaccataaaagaaaactgcaatatctcacagagaaaaactaataccactatatttgtaacatcttttcttttgtaagtttatgaaacacaaaaaatttctatttgttaatgtaagatatcaagcagaagggtcatttttcatggatcggtagctagatatatccaaaacttttctattctcccttcctgaagtgccatatttgggacagcacatctgataaaataggtttagtaacaacaaacatttttttcctgaaacaagaaaacaaatgattacctcgagatcagggcagcggtaaaacaaaggatttcgcgcatcaaccaccatcacaatctggaatgaaccaagaagatcagtagtcactcaagataaaatacagaacacgactaaaaggcttgtaatttcatattgatcattaatgtatattcagataagaacgcacaatatgcaacaggtagagataccatctatgggaatcaaagtcagagatttctcgcttcggttaccaacacagcaaagttcaaatcccagagcttattactacatatattttttataagatggtaatttatgagtatatttgaggcataaattctcaaaattttatgtttgtaacaggcagcgaccaccaatcacgaagtgaaatgtgttggtccagtcaacacctgacaaagcttaataaatggagcctaaaaaatcactgccggttacaaatgtgaaactttggaacttatgcagcaaatatcttaatttttatatcatatgcctttgcctgaattacattgtaaattatatgatttaataactaaacaggaaaagcttctactatgcagagacataccattaaagcataatatatttaattgattaatgatttcatatatctgagttttaaaaggcttttccaattactaggcaccatgacataattatttttgcataattgctaaaatttgaacaaatgaacttcatacaaatatattttcaagtataacataatctgtatcaagagcaaagaaattaccagccattctaattcttagttttacttttatagccaaaaatctcagcataatctgattatttcttgcctaaacataaaaacagataatgctaaagaagtcaataataacttgactctttttgttttcaaacagcagaagaaaagtttatggtgtttgatctaaattatcaatagaaaataaatgcctaccaagtcacttcgttccagcactcgccaaagctgtctccaaatgtctagattcttctcgaatggagtaagaacaaggttctcattctcttctagtctgcaagtgaataccatcatatgagaacgtggaagagcaacaatagaaatttgcaatcaaattcacaaaacaacaagaaaatagtatggaatattgcgtccataaaattaagcaagtagttcaaactagaataaaccaataacaggacattcttgattcatgtaagatcattaaaagatactaataatatttattcaaaatttccaacttatggtaattaatgacaagcatttgaagataacaagtattttaaaccaaatccctaataaagttcagaaggtaaaacttgaaggcataataaaaagaacagaaatatatatgccctcaatcaatggactaagttctaatctaatttttattttatttttctcatcatttactatactcgccattttactagtgaaatatcgcaacattaaattagagctcctataacatgcatgttcctctgtttctgggcaatacaatatttattatcttacagcactacagcttggatccaaattattaacttagtacataatatatttatatgttattgtttattatcatcaatagtcaatatgcttcaatcaggttcaagacttcatagtcatatattatccaaattaatgcactccgttaacatagcaagctcatttcaaattcacatcagaagaaggataatatccataagccagttctcccattaatctcaaataaagtatttaattcaaaaatctcacaattcacaagctgaattcagtagaaaatttttcaaatgacgcaaataaatcaaccctgttctaatttaaagtcattaaactcacacatacttccacttcaagaattttattataattattgtggtcgaacaaatgcagggaagacagtagaattacaaaaaaaaaatattaaagataatagctttggacacaaatatatattttatattatgtaatatttgtcaatcactgtttcatcttgcatcaagagaacaataaactttatttcgatttcgttttaaaacatatcaataaaaaagcattagaattaaagtagtaaactaaccttgcaaggcttcgacgccatgtcaagaaagactgcttttcattggcatcaagcacgtccacagacattccagcataccattttggcctgcggaagaatttatcaaaaaaggaactagaattgtaaaagtaatattaaaggtaataacattaagaaggtatacacaagcatacctgcgaggaactcgaagactgctggcatgtaattcctcctcctccttttgtttttcccccttttccttagaaggcagatcactggaactcgaacttccatccctactcacaaacaaacaggcataacaaaagtttaagcacactaaacctcagctaaaccacaatatgcttagcataagggccaacaaattaaaaaagaaaaagagcatatcatttagaaaactgttaaaaacaaattagctagcctaaagtcatgattttagtagtaacatctcctaaaccctacctaaactcatacatagatgttcaaggataggtaagaaaggtacccaacaagagaaaatcacccagagcatatgaacaagattattctttctcaagttggctacatataatactcagatgtcctcagttctcttctttcagattgtagtgactattgaatttcttctataatcatggtactttataaaatttataaacaggaaataaaaaaaaaaggttttcaaggtccagggaacttatgacagacaaaacgataatgcggcatgaatgttattggtattaatttaaagcttaaagtttatgtttttcatatccaaattgaaaagttcctaatgaaccctaaacacccacccttagggaagctcaggtttaaagccggagtccataacagaagctcaaaaacaatatcaacacaatataaccctaacaagtagaataggtagataagaatctgaaactcacaaagcgataggaactttaggctcaaaggcgttgagggagaagagacggtcagcctcttcagccttctcgataatggcgtcgatgtcggtgacttcggttactgattcgagaactttcttatgctgactctgatagaagcgtcccttttccttggactctatgatcatctggttgtgctgcctcaccagagccctacccagccctgctttgtcgttcttccccatttttggtttctcttttttctttttctctgtttcaatggaggatggctatgattcaatggcggtgtactaatggaaacgttttcaagggttagtgattcatattcatagccctcttttctttttattattaatttaaattaggtataaaaatggttgggtccaattttttttttgatagtgataattta

SEQ ID NO: 105281 - DNA, 501 bp, Cannabis sativa
atatgcatcaaagcattgaacatgctgtcgaggttattttccccgaagcatgccactatgcatgctacaaacatatttctttgaatgtcaccttcaagttcaagactgatgtatgtaacacgcaaatatggctggccacttacgcatggtcaaagagggaatgtgatagacatttgtaggtgcttcaacaaatggatcctgccattgctgcttatgttgagagtacaggattggaaaggtgggctcgtccttattgtccaggagataggtacaacatcatgaaaaacaacgctatcgaaagcctgaacaacgtgacagaataatttcgaaaatatccaataactactctagttgagttcataaggttcgcactttaaaattggttcgctaaccttctcgaaaaggcaagtaagtgcactacccctttggcaactaattttgaggaagatttgataaagcaacatgagggaagcgtcttacgtaatggttcacaattgttta

SEQ ID NO: 105282 - DNA, 556 bp, Cannabis sativa
tgcttttcttactgagtctgtcgactcacagatattgttatcatgtgtaggtaaaggaaggttaatggtgaacagaatgagtctagagcttggggatgattgtacatgtcaagatggtgtgacctggagagtttggtctctggacatcttgggcttcattttgtagtcgttatgtaaattgtttgtaatgtttattttgaaaatgaatataagatttaaaagcaggaccccaacttttagtatggatgtatgtatatatttataaaagtttatagttaaatcaaaagtttaaatttgtcgcaattttagagaaaaccatttgattagcaaaggtgttcgctgtaattagaaattcactatagtatgcctaatcattagggcattacaattttggtatcagggccgctaggttgttcatcgaagactgtcaagacatgtacaatcatcgtcagggataagctcaactcacggttcttttgtgatgggctaccgaaaaacaagatgcgccttgttgatataggtagtaacaatcaatccatttaagatctcttcaact

SEQ ID NO: 105283 - DNA, 525 bp, Cannabis sativa
atgtatatttagaaccattgattgacgatttaatagaattatatgagaatggtgttcaggcctatgatagttttaaaaaaaatctttaatccaaaagcagtgttattgtggtttgtcagtgattttctagcttatagtaatttatcaggcttaagcacaaaaggttacgaaggttgtccgatttgttgcactaacacatgggctcgttgcttggaaaattgatacaagatgtgttatatgggtcacagacggtacttgtctacaaatcatcttgatagacggaagaagaaagcatttgatggtactgaagagggagatatggctcctttgccgctgtcagggaaacaaattctccaacaagaagaacttgtagattttaactatggaaagacgcaaaaaaataagaaaataaatggttgttttcaaggaaagccactctttttttgtcttccatattagaaaagtttactggttcgacattgtttggatgtcatgcatattgaaaaaaatgtgtgtgagagtatt

SEQ ID NO: 105284 - DNA, 784 bp, Cannabis sativa
gggatttgggtatttaaaccctctgattcgaatcaaaaatccccattttccctcattttctttaactcccttaactcctttgttccctctctctcagagaaaccatcaaaaacttccataaattgcccagattttcgcttttctttgtgggttttttctcgattctccagtgctgtcgagagcaattcgtgggaacagattactagaagtaaaggttagttttcaaaaatttgctgcatttcgttttctgtttgaaagggaacactgttttctgggttttaacatgcatgagagagtttaggaataaatgtttgtagggaatatgtatgaggctacgttttttaggcaagaaattgggtaatttaaaaaaaatgacctaaaattggcataaccgtgtactgtataaaaaatgcttgaataggcactgcttcatgttttgaatacacgcgggtattcagacaaacacttcgaatactcacatgcttgcgagacataattacttctgattgtcgcttagacctttaggattttgtattctgtaaatctggttgtgagaacattggctaagtctttcaaatggtggatgtatcacggtattctaattgtcatatatgttgttatatgctccttgagatactgagatacacccagccttttgcgacattcgttaatgttccaataagcgtactctttggctggttgatattctcgaaacgatgggagtacctcagtaacttcagggtcatgcttgagaacgcatgccccttgagtcactgagtttctc

SEQ ID NO: 105285 - DNA, 612 bp, Cannabis sativa
cttggtgttatttcaccaagtcatattgcacaagatgaaggttgatgttgaggaggatttgaaaattcagttttacattggtcacaagcaactcaaattcagagtggttgagtttgccctcattataggcgtggacttctcctcggggccaacaaaagacgagaaggctacgcaggttgctcgctcagggtcagaccgattgatcaaaaaatatttcaaccggtctgatagtgtgaagacagaagcactccaagataggttcacaaactctcagaacccgaaagacttgtacaagcttggcttgtgcttgtttgttgaggcagtgctactgggttgcgaggctcacgcgttgattacgcctgacatacttagatatgtcgaagatcttgagttcttcttctggattccttgggggaagcactcattcgctagacttatgaactcgcttcaaaataacatgttgaaatagaaggcctactacgagaagaagctgagtttggatgtttagcatgattacaaatacacagcttatggcttcgcacctgcagtacaatattgggcatatgaggctattttagaggttgggaagaggtatggcacgaatcatgggat

SEQ ID NO: 105286 - DNA, 2718 bp, Cannabis sativa
tcgagtagtgagtaagatcttgctctgtgtgtctccttgagtagtagtaaggaatgcatgttttagaagatcccatgttgcagttgtccatatatcatcaaggaccaccaaacatttgttctgtttctgaaagttgtaaagctccttggctaattcaacatcacttaagtttttgatgtgatttctttgtgcatctgtgggagaagtgaaactaaagaaaattccttcgaaaacatctcgcatattacattgctgagatattgaagcccaagcataacaatcaaagtgagtcctgacttgaggatgctgataaacctttcttgcaagagtagtcttccccaaaccacccatcccacatatcgaaatcgccttattatgcttataacggttctctctgtcagtcaaaagggctaccaactcttcaatatctttgtcaaatccaacaacatgattgtcttcaacaaaagaataagctttcctcaacagtcttcgctcctctacatagcttgacaaagtttccacagacttgtccattgatttctgaactccaaacgcttctaattctgatgtccaagtatcaatattggatgaaatctcctttatctttgatccaactttatacacatcaaaaatgcaaaaacaccatttcagtgcacgtatgatagctccattgttgtgatgattattagaagccactttgaagacataagtttcaataacatcctccaagtcataagaattttctctgatttggacaaccaaaaggcgaactctctcatcaccatttctaacccaaacatctgcatctttcaagaaagcactcatacattgcagcttgatctttgcattcttgacttggcctttgactccatacaagaattgagcttcagaaatcaccaagtctccaagcctttcaatcacaaatgaaacaatagcatctgccatcttcttcttcaagtgaatctaagttatagaaccagtgacaaaagcttagtgagtctaagctttaaagagtactttgaatatgatttctttgcaattgtttggttgagaaatatctctgtttgtttgttaaacaatccagctaatgtaatggttcatagctttgttaaagcttctatattgtatttcggttgtagttttagtttagagtctgttcttaatttggtagcagaagtttatggttgatgaaaaaattatttatttattttgaatatgatttgaagtatatattttctctaaaatcgatctggcttctgtagtttcttttgaatatttttcttaagcaagttgtcacttgttaatattgttttcaaacaattactatataaaaattaacattcatcattaaataatattttcatttctcgaataccttagtggacataaataaaaagttttcattaaataatttttttttccttcaccttaattatcgtttgatgcacatgtgatcctttgataatcagtatcaaaattatgtatacaaatagttacgtgcaatgcacgtatggttagatgaattaaatatgtcattattattaatttatcaattcaaatgaaatgtgagaaaaagatatggtgattttgacttcaaaccccaaagattgattaagaaacttttataattattaaactctagcactcacctagcaatcaattaaaataattgtctacaacatgtcgagacagaaagacaactaggatattagaattaaaaaaacaagaaaattaatcggtgtttaattcttagatcgtttgacaaaagaaactaaaataaaattagataaaaaagattacagcatcatagttaacattaagaatacctcttcatccaccgatcagattatacaacagtaggaactattgcagcaggttcattcaatctcgtaacttgagcacttaactattgagcaaggtacgtaattggaccactaataactctttcaactggagagaacttgttattcttaaccagtggcaacgatttgatagagagtcatcgaagaacaaagaagacgaactaacaacgaaacaaaataaaacaaatgtcacagagacacaacaaatactcaaaaccatatcaccgaggcaagactaattgcagtggtaaaaatctaatcgcagtaacctaattgcagtaccaaaatcacaaaccccaaccaagccacaccttagcccaaggagggcttgagaaaaaagacaacaatcgattgctaagaatttcggaaccaaaaaatcctaatatattggtgttattagaaaatagaaatcacattattctgaatattaattattgaacaaacacacactggtgatggcagaagaaatgtgtagctttggagtggtgctacatgagattatttgttgcagaagaaatgtggatatggatgaagattgtttcactcaaaatgtgatctaattccatggagttgacatcttgaaaaagtaccacattaaggtatgataccatcaaatgctgcttgaactttcagagattataatttcatttcctttgtgatgatgaatttattaatttctgtttatgtattgtatttgcattgcacaccaagtgtttgatagatactttctcttatattttctcaatatttcatactctagaccgattgcataacaaagttgttttcaattatttatggataatacaaaaataaaattgaaactaacacacaatttgacttgacaacatgaactatt

SEQ ID NO: 105287 - DNA, 602 bp, Cannabis sativa
  modified_base (404)..(410): a, c, t, g, unknown or other
cttgaccttttttctgcgagtttcttccgacttcatcctcttaaagtgatccttgcttcgttcgaagatttgtagacggagtaacaagtcattgccccaacccataactttaaaaagtaagttactttcttctttctcatgtttgttacattgtgtggatttgttacttagtttgcttgtatcgttgtcatctcatcttgttttggtagtttttaggatttaagttgtatctaggttcatactagggttcaggaaatatgtaggttgttttaagatctccaactcattaccttcgagtttgataaaattgtctccagggattgggactgtttcttgcttacagcgatgtgccactctggttcaggaatttatcgtccagaagttttagagtttgagttccctannnnnnnagccatcctgtataaacccaacccttcaaaacccacctccaaattagagttgaacaatgctagggttagggaacacgtagtgagaacccaataggaagatattgctagttgctacaggcatttcttgaaagaaattaccgacagcaaacgccgattcttgtgagaagcagcctgtgttggaatttattttac

SEQ ID NO: 105288 - DNA, 799 bp, Cannabis sativa
aaaaaaagttagaaattaagtccctaatttttcaaactagtagaagaagaagttaattagtggttaggtacagtatctcatgagttgagaatatattgtaatacataaatttgttcatcctatagaatctaatatctcactctatttatgagtattaaggctggcttaaaagattgcggtatgaattcttgaacgaagttcttggattggatggtcgtatttatactaaaagatagcgaggatcccctgataggctacaagatgtattgtctctctatccatggtctagatttaatctatatattatgttgagatcttttggcttataattcatattggataaaactattttttatcaaattcgcttccacttttctaactctgacatggaccataaaaatcaacaattggtatcaagagctattttcataattatatagattaaatactgtgttgggtatgtatatatttatacatatatgttgatatattgtgaatggtatctccaaattttagagtgtaacgtctctgcttcaagccttcattgggtccttacacccacagaatgatatctcttatacacgagtacatggctgcttcatggactgacaactgacgctacaaaccaacacgagtatttccagcatactttgtcctcactcgcacacttcctgagaaaacttcttaggaggtcacccatcctgaaattatttcaagtcaagcacgcttaaccgtggaatttattcatgatgggctgccgaaaaacaagatgcaccttgttgatataggtagtaccaat

SEQ ID NO: 105289 - DNA, 669 bp, Cannabis sativa
  modified_base (359)..(370): a, c, t, g, unknown or other
  modified_base (573)..(573): a, c, t, g, unknown or other
ccatgtgactaaattggccatctgcagcatttttcatcgtcgccaaacaaaaattataaaaactgtaaaatttgcatataacataaataatatacttagagtttattaaaatctctgaaattgagaaattacaactctaatgcccatttctaaaaatgggactcacaatgaacgtaagtataaatattcacatataatcaataataaccataattaatatttattgccctactaaccctttattaaatcatgtagtcgttatagggggcgttcttcgttgtctcattgtaggaaattgttggttaacatcctaaatataaattctctaaaacaataaaaataaacacataagggtttannnnnnnnnnnnattggttgcagcagaatataatgactctttctgttcaagatctcattccttctgtagcatagcattatcaagatctgaacctgaatttttttctctccttcgggtttggttaccacaatcttactcactatgattgagtacttgactcgctatgtgtgggcatgtcactctttcactcaaggtttcgaatatggtgaagaacnatgaaggaggctgaaatcactaaggacataactctctcatctaggttggttgaatagtcaggttgacattaattggatgagtgagagtattatgtt

SEQ ID NO: 105290 - DNA, 569 bp, Cannabis sativa
  modified_base (47)..(53): a, c, t, g, unknown or other
tatctataaataattttccataatcaaacataattaactgctaattnnnnnnntaaactaagcggtctttacacatgcgtaaggcaaacatttgagagtctaaaaactttgctttaatcgattctccaagtattcttcaaatttcaggcaatttctcaaaaaatttgaattttttttcaaatttttttcttctcctcttgtaaagcttattttaaggattatagatcttgctagaaattattaaactccattggtaagcccaaataaaaaaaaaataaaaaaagatattcatgtgagctatttgagctgaaattcttcattcttgcacagtttgtttgagttactcactactgctattgaaagtgtggacccgagacactgagccttcgagctaagacctcgtttctttagctcaattacccagcaccaagttgaactggtttgagatgagtattcactacctgagcctattgttagaaaacccataattgaatgtcctagttgttctcaaaatcattgttttaatgatctcaagatttcatatgaatgtggtgttggaaattatttta

SEQ ID NO: 105291 - DNA, 1445 bp, Cannabis sativa
  modified_base (49)..(85): a, c, t, g, unknown or other
ttatatgtgtttatttcataatcattttagaagttcatatttagggtgnnnnnnnnnnnnnnnnnnnnnnnnnnnnnnnnnnnnntaaaataatttccaacaagaaatcggttatgaattcacaagaatcttaccataaaagaaaaaatattttgtcaactaacttgccaaaaaaagactttacaagattaaattcaagttctttaaaattagttgaagaccataaaagaccatgatagtcgcataatgtaagttgaaggtcgtttatggtcgttcagagcaaatttaagttctttaaaatttgttgaagaacataaaagaccatgatggtcgcataatgtaaatttaaggtcattcatggtcgttcagagaaaattcaagttctttaaagttagttgaagaacataaaagaccatgatggtcgcatagtgtaaattcaaggtcgtttatggttattcagagcatattcaaggtcctttacccataaattacaaaaatcaaaattataatccaaaagactgtaataaaatatatatgttacctgttcatgttcattgggtggtgtgggtattgtagttgatgtatcacttattgattccattataattctgaatgattagttattgcaagtaagagattgagagaaaaaaaaatattaatggctacaactgaaaaaaaatattaaagaaaagaaacagaatgagaagagacaaggaaattatttggagtttacctctgttagaataaatctcaaattcttttgtctatgactgccaccacttgccaccattcatgaataatgactggtctttttggtcttaccaagaagaagaaagaagaggagaagaggaggagaataagaagaatagttcacttgtgaccgttcatgatctttttagtcttattagcaagaataagaaagaggagaagaggagaagaagaacaaaaagaaagacgagtttacaagaaagaggaggagttcttcttggtaaaaaataaagttagggttaattttttgttttatgaggttttaatcaattttgtttaatataaaattaattttttaaatgagttaagtgtaaaataaaagtaaaaaaaaaaaaaagaaaaagaaaaaattattttgtaaatttcaatttggcaaaaggctattttgacaaattttactttgattaaaggttttttttttctttgttatagctcacttgagaagaaaaagaaaaacaagtttctttttagtattgaatttcaatactaatatatgataattgttgttattttatgaaatataaaaaaaataaatgtggattgaaaaattcatgctatatattgaagtgaaagccaggaacaattctatagcaacaacttccttatacaattaatacataatgaaaaaagcattgctacatgttgaaaaatatatcaaaccaaaattattagatcaa

SEQ ID NO: 105292 - DNA, 537 bp, Cannabis sativa
cagttatgaaaacaataaaataatatgtgtgtcagaacttggttatttaaaataaaaacaccaaaatgttgttcaaatatcaaataataataaaattggtttcatacaaactaaaaaatatttacattgacattcgctccttccttcactctaaaatctcatttgagaactgaatttttagagaacataactctggagaattgttcttaagcattgagattaataaaactcaaagttgactaacctattatcgctaaaagggggtgaaccattataaaatattgtgttcatctcgttaattttgttttctacaaaccgatttactctgattgataattacttgtgttcatcttgctcgtgtacgatcttgctagatctattgacaagaagctgtatcaacaatatcatacatcaaatttttttttttttctatatatcatttatatctttaattttttaatatatttattatataaaccaaaaatattaaatgcaaaagaattaaaaaatataaagaaactaggggtgttcataaaa

SEQ ID NO: 105293 - DNA, 543 bp, Cannabis sativa
ggggagtgccgcggcccgccctcttatttctgggcagattcaaatgcaatctttgaatattcataactttatgatacagactctatattgggagttctttatatcgttggcaagctcgttccgagctctatgtgaatatctgtattttgaatgccaagtttatagtatgtgaaaatggtattagggattaaccctatactattgaaacccaaaattgtgactagggttaccgacacttggtcaggagcactgttaggctatttttagcccacgttttgagtcactttttatagttgttttccttctttattattctttttggaatggaattatgcttgttttctttggtttcaagtttcacacttggaatatatcaattgatcaaatttcggaaaacaacaatctatagaataaaaaaaattctgaaagaaaataaagcgaaacttcaagcttaactttgactatgttcttataacgtccccgcttcaagcctccattggatctgagcccccttcaaaatttggtgggtgttgcttgcggaac

SEQ ID NO: 105294 - DNA, 517 bp, Cannabis sativa
gttaaaccaagaaatgccgttagatagacacttttaatatataaagatatatataaaagagaagtgtgaggtggtgacgtggtggtctaaaatctctccaaaattatttttcttttttctccttaattctctcattttttaataatttacaaattaataatttacaatttttttaataaatttctataaaaatatttatcttaaattaattattttttaaaaaacacataatgataaatataaactaaattaacaatattaaattaaatattattcaattacttatatatatatatgtattcataactatatatatgtgtgatttttattttaactttgcagaatataggaaaagtattttttttataaaaaaaatttattttgaatcaaacattataaattgaaaaaaaagcgatatgtgattatatacaagaagaaataggtgtgagattatgaatcaaattttttcataatgcattattttttcattgtagttcctattaatatcctcaaattt

SEQ ID NO: 105295 - DNA, 11768 bp, Cannabis sativa
  modified_base (492)..(493): a, c, t, g, unknown or other
  modified_base (599)..(605): a, c, t, g, unknown or other
  modified_base (637)..(637): a, c, t, g, unknown or other
taacatgtaccaaatcatgccctgtgaacttttctgaccgttataaattcccctgaacaattgagattgttggatttaaggaattttgtttaatttgattcaattttactatttcagtgattgtttatgtactaaatcatgctccccatactttgatatctaccaaatcatcatgcccctcgaactttgacatatactaaatcatgcctcctgaactttcatgttagacttttttttactaaaattagacaaaagttcttaaatctaacacttttttaatagttcagggagtatttttaacgaccttaaaaattcaaaaaatataatttgatacatgtcaaaattcacgaataaaaatcctaattagcttttttttaaagctaattagtaattttctccccaaaccttgatatgtactaaatcgtgcccctgaacttttttggccgttaaaaattcctctgaactattaagattgttaaatttaaggatttnngtctaattttagtaaaaaaaaattaacaaaagttcaaaggacatgatttagtacatatcaaagtttgaggggcatgatttcgtagatatcaaagtttggggagcannnnnnngtacataaacaattactgaaatagtaaaattnaatgaaattagacaaaatttcttaaatttaacaatctcaatagtttaggagaatttctaaaggcaaaaaaagttcagggcacaattattagctttttttttaatagctactagttctcgttttttttttccttgaatatatagcaaatagccgaaaacatgtaaggcataaactcaagaaaatatagtacggaaggattcaaagaagatcctttgctcagcgacccgacttcagtttgatcctctttttcccgcttcatagttcatacaactgtcgtcatcaacatcaacatcgtacgacaaagaaacccttctcactaagcaaagcctttactcaatttcaacttttactacgttcttggaaactacacacacatataaatatatatatgtagtcttttacatggtggacttcttatagcaatgtaccttaaagtcatcaaacaaatgataaacaagtcttgctgagcccaatttataccgtctgaacttccggtaatagaccattctcattctgattactttatttttgggttaatcgtaggttttcgttaatttcaattttaggtatttatgcttcttttggagagagttcgtttcagtatgtggcttttgttgctttggaattttacaggtcaattattgcatatttggtttataccttcatgggtttaagtggatttatgaaccttaactgtttattttctgtaaatttcttcgatgcttaactggtacaatacttgctttaagcgcagattatagagatgttggtttgtttgcctttctcagaatacattttgctattatcatccccttatcaagattgaaaacaaaattaagaacaaaagaaaatgaaagcgagaagttgtaatcgaaatttctccttgagtggtatatattgtgtatctacttgtttgtagtttcatttgtcatttcttgaaggtcatgctgtgtttgaggtgtttggcatacttaatttgcatattcaatagtttacaggggcaaaagatgagtgccaagggttatggagttttggagcctactctagtggaaatactggatttggttaagcctaagaatgatgattgggtggcacggttccaagtaattgaagagtttcgaagggttgttgaatctctgcagagcttgagaggtgagttttactcttttttttttatggttacgctattttcagtgtgccaaattactctcttgggaaagtatcagttttcaattctccatggcattgtcaggaaattatccatttatttttatgatgatgatgatgatgatgatgatgattatgagatctgagcaatttccaggaacttgggacgtcgtggtggtatctgttgttttgcagtagtttgatttttccattggtagcgtttatgcatggcgtatggacattatcatttaacaaaaaatggaaggaatgtactgaattttcgttaggaaattagaactcatatcagtagcttatagctgctttgtaattttcactatacaattttcattcgttaggtgcattgcatgaatttccttcatatttgtttctttaattttttaatttctgaacaatgtatctgtttcttttattgatagtcttttatggttttggccatataaacttgtattttctaaatttccacaaatgctttgctggtttaccaaatttagaagattttttaaatgaggtgaagctccttacgcttgagtatcaaatgttcttataaagatttcttcttcagcagttcttggtggtacctatcaaagcaagacgttgatggaattttcactctgacaatgaattttcagtcgtcttgagttagtagatattttttttttttttagaatgttagtaataacacagattcatgaacataattggcacaaacaggtgcaaccgtggagccatttggatcatttgtgtcgaatctcttcactcgctggggagacttggacatatctgttcaactggccaatggttcttttatttcatcttcgggtaaaaagcagagacagaagttgcttggagatcttactaaggccatgagacagaaaggtagagttgtattttctttaattatggttcttagaatttctttatatattgtcatctgtaagaagaaatcattatgaagatatgtgtcagtcataagacttttctcgactactatcctgctctttcttttccaggagggtggattaaaacatttttattagtttgtttgattcatcctaattacaattatcctatatttatttcatatcaaaattgatctgcaggtggatggaagaagttgcagttgatccgcaatgcaagagttcccattttgaaagtagaaagcaatatccagaacatctcctgtgatatttctattgacaatctgcaaggccaaatgaagtccaaactcttgctttggattaatgaaatagatacccgctttcgtgatatggttttactggtacaatcctaatgtttgctacaagttgtttttcttgtaagttaaagggcattctataagatgcattcttctagtctctgtaggtaaaggaatgggcgaaatcatgtaatatcaataatccgaagagtgggactttcaattcatattctctgtgtttgcttgtgatcttccattttcaggtgattctttatctttatatttagtatgagtgagtcagaataattttaagttatattggatttttttacccccattttttaactaaccaaggaatggcataatgatttatgattcacttatactgatggtttatgtggacctattctatggaaagtaatgaatgctggtagcttttctttgcatttctgtaaaatcctctaagtaatacatctacatatctttcattttaacttggatttacttccgcgtgtttccgtacattttctgtagttggttaatttaccatactctatgattatgtcagttgctgtagttccactcatatcttttgtatgtctctttctgtttagacatgccaacctgcaatttttccaccgcttaaagatatttatccaggaaacattactgatgatcttcaaggtatttttcctcttaatcacaaaaaaacttatacagtgcaggattattgatcaccataagagattatttctgaatactatttggaaggagcctttagctgttgatattagagtgccttatcatatcaggatagtggatttgaggttcaatatatcccagcaacaaagtttaaaaaggtttcttgagtttgccttatatttgttaactgatagatgttaatgtagactcacttcagagctattgaagttattacatggaagcaattatttgtttctcgtacataatgtacgagaagcaaatattgttgatatgtatttagaaataaaaagtatcaaatattctgagtaacagtctttcaaacaaaaagaaatgttctgagtaacagtctgcaatgatgcttggctgataactgacaagctataaactagtagataggctatcaggaggagattgtctaagtggtcactatggctatcttatttgtaatttattaatcttttttgtgttttcatctgaagtggttatatgaactttcctagtgtttctgattgtttttgaaacatcttcccataatatatatatatataaatatatatatttatataaattaatgggcatttatgaaaaaaattagtttgaactaccaattaactaattcaagtgaaagggactaatttggagtccttgacatggtctggtgtgcaggtatgaggatcaatgcagagagacttgtatctgaaacatgtactgcaaacatagccagattcagatcagacagccagagagcagtcaaccgaagttctttgtctgagctttttttgtcattccttgcaaaggttgtcattccattttgatgctacaggaattaagaaaagtgaaatgatgaactactcattcattatatttgctgtctttgcactgtggtttcactttaacaacatcgatattccataatttacagttttctgacataagctcaagggcctcggagttggggatcagtccgtacacaggaaagtgggaacatatagcaagcaatacaagatggttgcctcaaacctatgccttatttgtaattcatctctacctttttctttttttaaaatttatgttccgtctttatgtcagtttttttttgttggcatctttgcctcttttgacttgctgccattgattattctgatggtttatcagatcgaagatccttttgaacgaccagaaaatagtgcaagggctgtaaacaagagtcaactggctaggatatcagaagcaattcaatcaactcgtaacaggcttatgtcagctaatgtaaacaagacttctgttcttagcacattagtccaacagcaaacgtttcttttacttccaaggaaccaaagatacaatgctgggggatatcagccaaattggcaagcccctgagcatgtacgatcgccaaacacaaggagaggtgggaaccatctccaaccaactcggacacagactgcacattcttacactaatggaaggtcacagatggcacaccattaccctagtgtgaggccacgggcatcgcacccttactcaaatgtgagaccacagacagcacacccttcctctgatgcgaggccgcagatggcaacctcatatttacaagtgcaacctcactaccagagcactatgtcccaaggctattacaacaattcacctacaacaggtttctatgctcccacatattctaatcaaggccagcaatcctggaggcccaaatctgggagataacagatggggtgagctgctgttcaatccacatttgtttttctcgtctgttttgtttttgagtaaaatgttttattgcaactgaatcttacacaccatgttgtgattgagctctttgaactttgcattttgtcaaaaatgtgctaagtggatgctctttaatacaatttactgggatgctcgtgattaatgaaagggacattttgttacatagaggaaaaacagcggtgtgatttttcttcacgtataacgatttctaatatgtataagtgtaagaaataaaagaggttgttttgcttgatgaacaatgttatcaactgtaaaaagcaaagcctttttggacttacacgagagaaataggtttaactaggacgacctattttcttagtttaatacaggaactgaggcttttaaagttaaaatggaccacattgattatctgatgaagtgtattcataataggataaataaagtcacttataaaaatgtttatatattctcaagtgaactacatttaacaacaaactttataagcacaaaacaatagggaataatacatacagctcgataaagaagaaagaatgaatatccgattcacttcatcaagaacttaacagaaaaaacttgtattttaaaaaaataaataaataaaataaaattggagctctagctatcaaacacagttttactaaatgtgtactattttacaagttgcattttttttttcttcacattagatctcacttaatttgactaatggttttaccctttcactaagcattgtcttcgcttcgaagcctaagtgtagccaatttcatgctctattgagtataaaaagaaagcggaatttggttccaaactgcttcaacttcaagggcgtaatagccgtttatcagcaacaagcaatctataacttgcatgaggaccctcagcagtgtcacgcagagttacatgccagcccattgcattcccaatctcttgaagctcttccatgacagagagtgagtcacgaatataggctcgtccgccaggtctcaatatccgatccatctcaagcattattgtagatatattgcacctgatatataaaattaaatgaataaaacagagcaagataggattatccacaaatcactatgaaatctctatttgaaatggattacctttttctctcgatagagaagaggctagccgcatgcaataaatcgtatgttctggggtatgtatcaaacggctcacacctgatacatggtatataaatcagatattaaagcattattttgtcctaaaagaaaacagcaaaaaaaaagtaaatatcttttgggaaaatgcaaattacaacggacggaagggagaagaatccaaatttcttttcattagtataaattcctttggagggaaagaaaggttagtataaagggattgatgctgggttttctaagattaggaaaaaaaaatgtagaagaaaacaaaagtaataagaaaaaagaagagagcagtgtaccagtcatgcataactccaataagtccacggtcgtatataacaggcaaggtgttgggcccgctaaccggaactacattcatcacccacgaattcagaccatggtcatttaaggctgcagcaaatctgcatataccaattcataagacaataaatgaagttctctattctgtattcaataaaaaggatagttcacagcagacttatatagtaagagataaatgtaataccctccaaagccagctttcatgtccatgacatttcttagtttaatcttcttccagtgtaaagcacgtacatatccacctataatatccatccagtatttgtattctgccgtgtagagctccttcctagatatatatgcatcaaattgaattgactggagcctgtcagggggagtttgcaaacgttgaggccagttggtgacattcgctccatatccattttcaggtagtcgtgtaatgcatggcttgagatcaacatacctaaataatacaaaagataaatgtcaacttgccctgagaagaacataaaacactgcagaatctcacataatataccaattgtgctcaacccctgtgcaataacacaaagaccgaaactgataagaaaaaaataacagcttagaagataatattatatttattttactggatgagaaaagaaagcaaaaaattaccagactttgtctgggtcatcagtcgtatcacacaaaggaggagtagttccttcttctcgttttaaatagcagtcattgtttactggcttcttccatacagcaatatacccatcctttttcacaaactcccagcatagacgagtagtgaggttcaacatttctgagagggagttaagaacaccacacaaaacaaagggataaaaaaagttatttcctgtgaacccgtaggtagataatcagcaattgacacgtttcctacatgtctcttctaggaatgacccttttttgagttccaaaaaccagaagtcataaatgaagcttaaaataaagatggactgaaaatccccgttagcacctaggatgatactgtttctgggttacaagatgatgatcaagaaatggccaaactaagtaattcaactcgatcatatttaattatataactatatattatatatatatatatatacacacacacgcaaataatatcagattatacctttccactgctcctctagagcctcttcatgcttatagactggctgtgctgcccaaacaaagtatcctcctgccctgagcatcctattaacctccagcaataaaattccatcttcatcaccaaggattgaaggtggatcaacggaaaagaaaaacaaaattagtaaattctccacaagtggggttaaataaacaaatattttagaattctatattggcataaaattttaaaaaactttgaaacatatactttacatgaacatggcagtcccaccattctttggtcaaagaaaagtgtcaaggattgtccaggaatgaaatattaagtttacaaataaaaaagggtctaccattaaaggtccacttagtaaaacaatctagaacaaaaacatggaaagattaatattttagattgtgtactttaagggggctgaatttaaaagaaagtaatgtctgcaaaatagttctatcttttttctattcttcttcttttcctttcttatatataaaggagaattagaaagtgcatgagaagaattcataccatcacgagtccaattaattctacagcgagaacagtgaattaggtcaaaagcttgactgggatataataagcggtgagttgcaaatgctgccaccattgcaggcacacctcgctcaagagcgaattgaatctgattttcatgtacatctttgggagcaactgacatagtaattacattccgagagagtagataagcaccaaaactcgctacaccacatccgacatccaaaacaactcgagtatgccgaccaaatgcaatttcagggaccatctgcacttggatggttcataatcagggtacattttttaaaagttctgttctataatttagtttaaattcaataaaaaaaagtatgtttaaaattccaaagaatttacttgagaattggggtggacccacctaaattaaggagaaaggaatggaaaagcttctcctatctattttttgttgagaatgacattagtaatggtgctttctttttctatttcatttttaaatattcaaaattaaatacaagtctatccttcgaaaatctatttcatttaataaacaatgcataactaaatgtttttttaagaaaagacaatttggccaaattaaagcattttgattccgtttcttagttatggaaacaaaataaaataatttcaattttagttcagtaaacataataaaataatgtttcagattattttataaattattctctgattacagtttactaaactgtcataagtatatcacaaacaaaaggcagacaatattaattcattaatttcaaggaaagtcacatctaatctttgtaagttttcaaaaactaataccattagttcttcttacaatgttctcctcttttgttgaaaaataaaaaataacattaactatagctgcattaatggctaataaggaaaggagatcaatgtgattacttcaaagttacagtatcaaaacacaaatttgtcaaaattcagaaatctatattatttaacaatctaacagatacaacagtcgctttacatgttcactaggtgaaccttacctctaccattttgttttgttcttcgaaaatatatcattttcatgaaatatttggacaaaaccctactcttcaatctttatatcactttttaaaacaaaaattaagaagacaatgtactaaccttagacatctgatccaagtattcgtttgccccatgtataaattgtgtaccacccccaggaaacttaaatttgttcttcacacgaaagatccagttttgtcctcctttgtcttcagccagacgagtatgaggtacattgctgaaccaaacctgcaaaaggggcgatatattgtctttgtgaagagctcaaaaaaaaaaaaaagaaaaaaaaaaagaaaaagaaaagctcaaacactgtataaacttaaaatgaaaagcaaatgatcgatgttgaaagtttcacacacgcataagcaaatgaacatcaaaacctaaccccattaattgaaaatttcactgaatccatagctatatgcatagcattaatctctataattatgagccatataagataaataaattacttaaaaagaacccaaattcaatactaatgtattatattcaattcgattgtcaatagggccaaactcatgaagttagtagtaacactgacagtaagtaaaaaacaaagaaaagtacctcgtcgcggctttttggccatggtattggggctttgtaatccttaggcggcggaaccaagcaattcaaaacctcactagacttcgggcaatgtcgttcgaatcgttcacctctctccgtcgatttgagctttttaatggctttctcattatccaagcaaggtatatactccctcttatcgcttgaacacagctcaaactttttaactcgaactctacgagagccaccattattcccgtcattcacaacctccgtcccatttccaatcccccaattctccacaacctcatccggatcaaactccccgacctcgaactcatccgacatggtcccattttcgtctacaatcccaaacctctgaataggttcaggtgatggaggcggaagaggcaccgctggaggctcagagaccagcggaactgaattctcaggaataatggaggagatattaaacgacttgttgtgattgggagagatcgagaccgaagaagtttgggtagtagtggcgggtgtgggtgtggcggtggtagagtagaagacgagctgctggtagccatcggaccaatgctttcccacgtagaagaatgttagggatatgaaaagaaaggctgcgatcttcacagttagctgacctttgaaatcggcatagttgagacctttcatggcttggaatcaaatttgcagagtgtggatctgagggtgagattgttgttttctaatctttcctattttgagtcacattattaggaatttgagtttaagagaagagtagattttctaaaattatagttggattgaaattcagttgagtcagtgtcttcggatttcggatcggtggcgtcggttggtagtcagtacaagaatcttagatcgacctcattgatggccagtatttacccccccaattgctatatttttctcttcttttttttttcctcttaatctttttcactgttaaaaattcttcctgaactattgagatagttagatttaaagacttttgtctaatttcatttaattttattgtttcagtgattgtttatgtactaaaacattgatatctactaaattaaggagtgagttggcaaaatacgctttatgaaaacttttattaggaaaatgacttttcaaatattttaattagtaaaatagccttcttttaaaattgatataataattaatataataaatacaattaatattaattttctttatcattaaaaaaaatagatttggttggactccgatgacctcttttcatcttcatcttaatcttcaattgagttcttcattatcatatgaatttttatcttcatcttcatagcactactcaagtatttcttcttcaatggtattcatgcacatttgacctaaaaaattcaagaaacccttaaagaaaaa

SEQ ID NO: 105296 - DNA, 1904 bp, Cannabis sativa
tgtggagaagcggcggcctgctgtttggcggttgaaacggcaattgatctcaaggctaagtttgttattgttgagaatgactcgagtgtggttatcaatgctcttattgggaaggatcctcaatgggcgcttgagaactacatctcattttgtaataagtcttctcctttattttctagttgtaatttttcttatgttagtagaacttgtaattttgcggcccataacgtggacaagtgggtgttcacccacaagaagtttggtgtgatttcggttttgtcaataccggagaacctgttatgtaatgaccatgaggtctaactattctgcttattaatatatttcttcgcttttcttcaaaaaaaaaacaaaaaaaacaacccttcaccaccaatttctgatctgtcatcaaccttcttttgaatttcttttgaattgagtgcagcctttacttcaaacatagttaaggtatcattgccatataagatcatatccacaaagtgttcatagtttttaggcaaggagcttaatagtagaatagcttgatcttcttcctcatttcgaaccccaatgttgtttaagtccaagattagtttgttgagtcatcaagatacttcctgagttccttggtttcatccattttcatggtgtaaagcttcttcttcaaatagagtttgtttgccagagatttcttcatgtatattgatccaagtttgttccacaattccaatccagtctcttcatctacaacttctcaaaggacttcatctcctaagcttaacaaaatggcactatgagctttcatctcagtttattaagaaacttgcttggctttttctccttctttagagacagcttccattatggccctttcaataccctaatgcacgagcagtgccttcatcttgattcgccaaagaccaaagtcattggcttttgtaaatttacccacttcaaatcttgcagttgccatctttgttctttaactttgattatcacggttcttagtttcacaatatcaacatgtgctttgattccatttgtggttattcaatcaccctccaagaacataacaaatacactgaaatcaaagaataacaaagaaaagtaaagctaacaatgcacagtatgaagaaaagataaaaacagagtataggaacacttgaattacaaggttcgatcacaagcagaaaatcttggatctactccttgggtggaactaccttgaggctttgcttttattaattgaagatgatgctcagagttggtacacaacagggacagaaaaacatgaacaaaatggagtcttgctcctactgaaatggctcactcgagaaacaagagttatacaattttcagatcctttaaaataacacacaccctcaaccttttctctcaagctactaaatagcaaatggtcttaatatatagacccaatacaagtgttcccgagccaacaaacttaatagaatttaactaacaaaattctaactagcataactgtctaacttgcacaagtgtgtaaaccccatagaaataaattgcagatcttttttgttgtttgagaacgacttcgattattgatgcttgatcagtatgtgaatgaagcttttttgctctttaactgatttttttttttttgtgagaatggttcgagttgtaaatttataggtttcgtttatgcttttgtgtttcacgtgctctttaaagaaactagtcccgtgattaatagaagattgtgttatgagattgcatgtcatttttgagatagtatgggattattttgattttacagtaaagatgttggcgtgttacgttaatagaagggtattaaattagggttaatttcacaaatgcacaaaaataacaaaaaaaaaaacaacaaaatacggtttcacggaatt

SEQ ID NO: 105297 - DNA, 759 bp, Cannabis sativa
  modified_base (44)..(65): a, c, t, g, unknown or other
cctgaaaatatttttattctatatatagctcatattacattcannnnnnnnnnnnnnnnnnnnnnaattaacaaattacgcttatttactcacttatagtaaaatttaatttgttttctgaaataaattagtaggatcataatctcacttattacctgattaacccataatataaatataaatcctaattatttaccattaggcttatcgggatattacataaaggaaagggaaaaactgaataggagtgagttctaagctcaggggatgattgtacatgtcgagatggtgcgacctggagtgttcggtctcgagacaacttggagtgtattttgtagtcgatgtgtgacatatctgtaaaagtattttgataatgattgtaaaagtttaaacacgggatcccagtttatgtaaatatatatatgtttataaagtttagtagtttaaatcaaaaatttaatttggcacaatttttaaggaaaaccctttaattagcaaaggtagcacgttaattagaaaattactgtagcgcgcttaagtatcagggcgttacaatacactccgtaacactactgtactagtattggtagcatatgaattaaaaatatagcatgcatgtattacgcatacacatattcatatataattacattctatgctagttttacctagtttttgaattcaagtgtgccactcaatgtttaacgcccaaatgtgacttccactagcggtggttgtagtatagatcgggcggtcgat

SEQ ID NO: 105298 - DNA, 737 bp, Cannabis sativa
aaactccggggatatatttttgggtatgaaaaatgcaagatttaaaaaaaaaaatgggtaaaaacggatgaaaaatgaagaaatagggggaagaagtgggtggttgggcgagggattcgtagattctagaggaagaaggggggctgctggttattttaggatttgaagaagacgatagctggagagggttatgtaacgacatatggcatcggttattacaaaataaccgacgccataagctttttttattaaaattaaaaaattacctttgtaataactgactccgtaggagtttttcattaaaattaaaaaaattatagcctacggattcggttattacaaaataaccgactccgtaggtgtttctattaaaactttattaatttgctaaaaaaactgcctctaaaggcttgttttgtagtagtgaatgctatcttctagcttgccaggattataaacctcgttgatgctaacgggatgaagttatatgcagtcttcccattaagagacggtcacctcgcttacttgttcttgagtcgatccgacttttacacttagtttgttcattgcatgccaaggactttcacaatggatatgtgccgctttcatcttccaatgtgttctgtccttaatgtctcgccattcatatttagtgacatatggtttctcattaatacactaagtaacagtttgtacattgattccttgccttggaccttatagtcagcgggttacaa

SEQ ID NO: 105299 - DNA, 1093 bp, Cannabis sativa
tatgtattatatcaatattattctaaaattactctaagtatttaaggatcatctaaatatatataaaaatcattcttataaaagtaagttaaagatataatccttatactaaaaattaggtacttgacttccgataaagtcacttctgataaaatcctaacaaccaagtttaagagaaactaaaattatagatattatcctaattctacttaaatttcggcaacataagggcgctataattgaacgtttctaaaaacttcaaacctattaataacaacaaaatacaattcaaaacaatataaaataatcacaacaacatttagcaatataaaattttatcactcattcgactgcagtacatgtattcacagaacctgcttcactacgaatgaatatttaagatattcaaactctactaagcattcataattaatttataataaaagttagtaaatctatacctcgagctagctacctagaaaccgatcaacactaaataaatcggatccttgacaattgacctcacaatgtacaacataaagatataatacaaaattacaaatttctttatttagctactgttaacccaaaatccggctaccatctcagttggggacatgtgttaggataaaaggaatatagaacgatgcaatcgcttattatagaataactcattaattacgtaagtatcagagtatatttgtaacctgttgactgtaatgtcttatgcaaggaatcaatatacaaattgttccttagtatattagcgagaaaccatatgtcactgaatgcgaatagcgaggcatcaagtacattacatctaggaagacgaaagcgacacatgtcaattgcgaaagcccttagtgtataatgtacaaactaagtgtaacagtcgggttggctcgagacctagtaagcgaggtgcctatctcgctatggggaggcttcttaaaaacttcaaatatcttctcggtgaggcctacaatcctaacaagttagaagctaacattcaaacgagcctcgaagaactctttgtaaataagaaccgcgatcatcacaagacgagcatcatcggtataggctagagtatgac

SEQ ID NO: 105300 - DNA, 1016 bp, Cannabis sativa
  modified_base (756)..(761): a, c, t, g, unknown or other
ttaaacccacaaaagacaaaactcccataggcaaaatgactattttgctcttccctgtctaaaaatcataaaagatcacttaggggtattttggtcaactctaaaatctcgactattcccgacatttccaatgtctaactatattgctccgctatactaaaaatactaggatgtgattctaatagccaaacatcacgttccaatattaccgggtacaaaacatacaaaattatgaaattatatatatatgacatataaaatgcattctgaattcaaataaatcattgtaaataaataattcaaagctaataaacaagtttcataattaaaccctaattatatgctaatttccaaattaaagctaagcggtctttacaatatttttaacttcattattatttattttatattttaaattaaaatgattgtaataagaaattgattgttttctagtttagttatggtaaattgattcacacaccatatttttcgtaaagtttaagaataaaaaaacctttatatcaaatttacgaatccaacctatatataaacacactcaaatttaattatgtgagttttggtaaagaatatagtatacgttacctaattaaaaaaaattttaaaatttaaaaaatacatatatatataatcatatccaaatgacacaccaatgaagcaataactattttttttcttcttaaagatcaaaatctcaaacgttatttaaaaattaaaaaaaaatacattacctaattnnnnnnaattaaacatacatgtattgcagttaacatcacctaattgaacctaattaaaaaaaaaaactaattttacgtgtatttgtattacacgtaacatcaatcaacctagtatttatatatatatgcaataattcatcctctaatgagactccatttagtgcaccattttgagaatatttttacagtgcacgacatatgtaatcacgctatatctattgtatatttaattaatatttatatatttatgaaattaaaaat

SEQ ID NO: 105301 - DNA, 566 bp, Cannabis sativa
  modified_base (170)..(171): a, c, t, g, unknown or other
ttgcattctgttatgaagtcagctagggcttgtccttttatagaagtgcgtggtatgtagtgtatgtcaaactggcttaactccatggcctacttgagaagtcttctagatgcttccagcttctttaggacttaccgaagcggatggtttgttaataccttgatggggtnngcctgaaagtagggtctcaactttcttgataccattaggaggtagaaaactaactttttaatcaatgggtaccgtatctcagcccctatcatacgcttgctgacatagtacacaggatgttggactttttcttcttcatggactaaggctacgctggcagcattctcggagacggccaagtacattaacaagtcctctccgtgaactggctttgataaaattggaggtttgaacatatgttcttttagttttttgtatgcctcctcgcatttttcggtccactcaaatttctaacagttctttaaaatgttaaagaaggaaatgcacttgtctgttgatcgggaaatgaatcggcttagggcggtaacttttccggtcaagctttgcacatcttt

SEQ ID NO: 105302 - DNA, 617 bp, Cannabis sativa
attatagatattgtaagcaaaagataaacttttcttgatacatttagcccgataaatagtgatctagcttcactggaaaattgatagaaagaattgaattagagagagatctaagagaaaatacttagagatttcattgtgagaggattgagagaggaaacactgtgttctttgttctcaagtcaatataatctaaggggagtaggctattaccgaactaaaggggccgaacctcttcaaaatcttgtgttctttattgtttactgatttttgccatgttttgttatatttcttatagcttattaattgactcactgtcgttggctaaaagcgaggtcaacaactgtgacacggtaatattaatattttcactattcatattaatacagtctttttaaaacaatatgaaacttggtataaccccattttgacacttgttttatattcagtccttttttaaatctatttttttaattaaaaaagttagtaaaaaatttgatgtgatgttggttgtcacatttgtgacagttcttttttttttctttaataacaatcatttttcaaaaaaagagtgataaataagactccataaatgctgatttgaaaagtggttttca

SEQ ID NO: 105303 - DNA, 707 bp, Cannabis sativa
cccttgaaactccaccaacgcctccctcgcaaactctaccaccccattcaaccgtgattgttttttcccgaacaagaccgaattccgatcataccacacccaccaccacaccatagaaaccaactcaaactcatccttgctaagcacctcaaataaataaacaagcaactcagccagagaactcactcgaccgcgatatagataatgccaaatccgaagattagtccacaaaggaagtaaagacgagcaaaacactaacgcatgttccggagtctcagattcctccccacacctatgacaaataggctgaacaagaaccttgcgtctaatcagctgggaattagtagggagagcgcgatgatacatacgccaaaggaagatcttgactttctgggggactttcaaattccacattccattccaccaatgagattgggtacaagaagaggagccaaacctatcacctgcaacatcaagagccaccgcatacccactcttcacagtataagaaccattagaactataatgccagcaccaccgatccgcacacccactactacccagtggaatatcaagaatggcctcaacatccaactgtaagaaatggtgagccaaagcctggagattccagaacccacccccaccaatcaactcattgaccatcacattggccgcaggagctgccgtaattggacgaaaggtccgcg

SEQ ID NO: 105304 - DNA, 838 bp, Cannabis sativa
  modified_base (656)..(659): a, c, t, g, unknown or other
attccttaggtcatgggtcacccccaacgtttcgaaaacagaagcgcctggctgcctcagcgattgatatgcttggttgacgggtggaatcgcaccattgatctggttggaaccatcaggtatgacttctcttgataaattactagacaaggtctgcccccctaccgctaggcccacgagtggaactcgtgactggggattaggcggctgaccatttgcagtctgggaagtattcattgctggatctttgtccgtctcacccaagggaatgacattcggtggttgctgacctacagtttggaaggcttttcgtatcaccaaggtagcttgccgactacgattttcaatctctgcatggtgagcccttaacgcctccatctctctatctctccactcagtaaatatacgcctttgttctttgaacgcgagatttactgcagtgcggagttcgtcctgatcatgatgtagggtattgttatgaccctacatgagtccaagagcgtcgtggagattttgtaaatcaatagcatcttcgatggttgtctgggtgttggttccaggcagaatagttgtgttatgaatgctctggttgggtgcggaactgttattcccagtctctagcacaccaggcgcgatttcatctataggagttgttnnnncattccccacgtttgctggctgtccaggattaacagcaggcggaacccttgtatttcctaggttttgcaatgtaggatccacggtctatgaatttgctggatcagtcaggcctctacgagtcggcaccatcgtatttgcggttagattttgaattaagagcaattcttgattctgctct

SEQ ID NO: 105305 - DNA, 3077 bp, Cannabis sativa
gtaatcattaatcatcaataaacttcttttgattaagtgacagagttttaagtggagtagcttatttgtcaggttatatttttttttttttttagataagttttgtttggatcatttcggggtggttcaagttttggttccttaattattattttaatgtttaattttctgttatattcaaactaatcatcgatgatctttctttctattgtgacgactaacttattgtatataaatatatataaaaagtacaattgttttcccgaaaaaatatagatatgtatttctaagttgaccaaaacactttatattaattctttctataacagtatttttgtctaaaaaaatgtctctttcctataagaacatacacgcaaattatgaattgttaatttctcttacgctacgttaatttaattttctggttaatgatgatagtaataaagaaaaggaaattatgtaaatactaaataatacgggtagcaatttatgatgttgtgtcaaattcgtgtttgtcttatatagattgacatgtttaattgatcaatactaacctcactcatcatgttctcgtgttgatttattgtgtttctatgtcgactattagtatattatacaatcgatattaatcaagagataattggtaatacatatttaatttttatatattttgaattatattaatattttttactcaataatatactaataaaataaaaatatcaagttgcaaataaataatattaattaattaaaataaattattacaatttatcaatacaataaattaaattcttaatatctagtataaattatctaccttatattattgtaagcaatttttttctaatgtatataaatttttaagaaaataaataataatttaactataaattaataattttaataatatattaaatataaatggctcaattcgtatcaatttcgtgtcacatgcgttaactactctaacccaactcaaataataatcgtgtcattcggattcaacccaatttcgatcaacgtctaatttttataaccctaacctgcaataatttgtatcaagctcgtgtcgtgttgtattgtcatgacttgaattgtcacccctactaaatagtacaaaccgattgagtaggtcgtatgtgctagatcaaacgagataataaacataacaataaatgatagtgaatgtgaatttgttattgatcattaaagcaatttctttaaatactatacaagtattgttgataaatacagttagctaaaacaaaggatacagttgtataataacaaaattaagctaactaataactaaccaaatacctaaccgtcttaatttctaacaacccctcaaactgagttgggataatgagaccaagctcagtttgtcttgaagaagagtgaatcaagcattagagaggggtttggtaaggatgtttgctatttgatcttgtgcaagaatatgcttgacatgtaattgcttattaaggatccattcacgcacaaaataaaggtcccagttcgttgtgtttggtcctagaatgtagaagtgggttgttgtgtaaggccaagttctccaagaaaagactaaatccatactagctcaacctgtagcattagccaagctcctatacttagcctctgtactagattggtaaacaatcttttttttttcctttaagccataggagatgatgtttaaaccaagataaatacaaaaccctgatgttgagcggctatcatcagaattgcatgcccaattagtatcacaaaatcctagttgaagagtaggacaaggtttatataagcagatcatgatccaatgtccctttgagatacctaagtatcttttgaacaaccttccagtgtggttctaaatgtttctacataaactgagctgccaggatataaaatttctggcttggtgatcactgcatactgtaacgcaccaacaacacttctataatggtgaggattaggcaggggatcaccattatgggttgaaaatttctctctaccagtcataggagagattattagcacattccattttatctttacagtgaagatcaagaatgtactttctttaagataaatacaatccctcttttgaatgatgtacctcaattcccgaaaattaatttataagaccaaggtctttgagagcaaatgtagcgtgaaatataaaaataagactagatatagatactagagaactccttataacaagtatgtcatcaacataaacaagtacaaaaagagtgcaagtgaaagtatgttataaaaagaaagattgatcaactttggcacacacaaaatcaaaggactatagatctttactcaacttgtcaaaccatgcccttggggcttatctcaggccatacaaggctttatttaatctacatactaactttggtgatgtagaatccataaaacctagtggttgtaacataaatacttcttcatgaaaatcctcatttataaaggcattattgacatctaattgtctaattctccatccctttgaaataacaattgtaaggacaatatggatggttataggtttgactattgcactaaaagtctcagtaaaatcaaatccatattgttggagatagcccttttgtaattaacctttctttatatgtgaaaatggagccatcaatattgagtttaagcttgtaaattttcatcctattgattttctccaaggaggcaatggaaccaagatccaggttttattctttatgaaggctatgatctcattattcatagcattgtcccattgaggagagtttagggcttctccaagagtgagaggttcttgaaaagtgattaaaacctttgttttataagcaccaactttgtccttagtaaccatagggtgatcgttaactggtggaggagggatggtgatattttggggtggaggaggaatgatggtaggggaacttgattttttgtagacattaggtaagttggaagatgaacattaatggtacgtttactatacagtaatcagaatcggaataaattaatggagaaatgtaacggaataaatgaaaaataatcggaat

SEQ ID NO: 105306 - DNA, 2333 bp, Cannabis sativa
atttaagaaaatgagcaaatttttctaccaatgtttgatgcgttcctttttcgaaattaattttctcattgtgataattctaaattgctccgaactacatgaaattttcttttcactttccccaaaattcttccttcgccatcattttttttttgtaatccaaagacagatttttacccttaattcatccaaatcgaagctccaaacatatccttggacttttctccggtacataagatatataatattgaagaatctcgtgaggcttaggcaaagataaacactagctatgaggatttttcacgagacacatgaaatttctaatctagccaatggatagcagcttttaactctttgcatatgcttagaacatggctcaaactcttatattaaactgcatttaattttataattgcggcacgacatggttaggtgtgaatggcacaaatgatgctgcgatgtagctacgacatcctcgccactttgtgcttgcaatgagttgtaacttgtatgtgcttaacaaaccggctcttattaatacattgcaatgtcagtatcgcatcaaacaactgttttcgggtccttgactgcaatatttttgtattagatttagtttaaagggtgtagttaggttgtgatattgcagtaaaaattggattattctttttgggaattttatcgacttttttttttttttactatttttcttaaaatatgaagtttgtttgcaaattgccaactggtcgtatgaagatcaccaatgtctatgttgccatctataccaacctaacaagtcctaaagttactactgaattttactcaccttcgtttgcaaatggtagctaggaatttgatcatacgacaaataatagagtgaatatacaggactttgaggttatttgtgaatttaatgtagtctcttgctatcttgaagttcagactaacattgagtgattacttgtaaataattaagaatttgacttatcttaaaggtcaatgattctgaaggacacttctcaaattatcaggctttgaagaacttgattagctatgttcttaaaattcctgcagttgactaagtttgagatacataataactagataattattaaggctttgaagaacttgattagctatgttcttaaaatttcggcagtttactaagtttaaggtacataatagctagataagtagattaataattattgattaatttgactaaggaaagaatgttaaaataaaccagtcattcagaatgtgacttgtctttatggtctatgattataaatgatcaagtgtcatttgagttttgtgctcaataaaagtgtgagaacttattcgtttgttgacacagtaatctctctctctctctctctatatatatatatattgaatattaaattaaatttagcagcatttttatcataatcaactcgttttagtatgctaggtggggaatcttttagtatgctaggtagtcttttgatgatagctcgcttgagatgccaatgggtgatatatttagaagctccttatgaactcatgtgcatgttcataaaagatctgtgctatgtctagtatagtttgtttattgagtgatcagttaacttgattgatggttgtgtcaaatttgattggagataattgcacttttttttttctattataaaagggataggtggggagttgtttttagtatgctagaagtctttcgagggaagcttatttcagaagcctgtggtgagtctggtgactggtgatacataaaagctcctcatggacacttttacggaacctgtttactaaaagaaatctgacttaaaaggagtagaggaatattatgttgataatataggtttagaggtttaattattcaacctttctttaccaccaatttttgccagacctcatggaacatcatatctgaattaatcactttgaaatgtgcaatgaaatcgatgcttgttcatttgtgcgctatgtttacatctttctttgatcctatcctttacatttttcctccccattctgaagatttattaacgttctcaagtaccatttttcctttacagtcaaacttgctaagatttaatctagatttaattatgtccttggcaaatgttttactctcaaaatattgaatacttgtgaattttttcctattttctgaattagatcagagaaggatgacttcagtgtaattgttgtcttccatcaagggccttatgacctaagttccacctgttctttgattttgcacattagtgtgcttgcatagtcctgttttgtaagctttcatggcattattgcacattctctctctctctctctct

SEQ ID NO: 105307 - DNA, 681 bp, Cannabis sativa
gttactacgatgacctgggaaaagttccaggaattgttcaatgcgaagtactataatgaagcagtcagaagtgcaaaaagaaagaaatttactcaactgactcagaatgaaaatatacataactcagtttgattgtttggcaagattggcctcgagaatagtgccaaccaattttagtaagaaagagaaatacctagatggattgaattcaaagataagacatgacctgatggtcaccactgatgacaacaccacctatgctgatatggtggggaaggcactgcgagctgagggtgtagtggagtgcactcatgagtctcgagggactcaggtcgttggtggggctcctactcctcctatctcaggctttagtaggagagatagtggctcgaccacttaccagaaaagaaaggcacctatgcatccagtggctcaagttagaacaagaggtttcgaggcaaccagggacgaggaaattgtcagggtagttccgaaacccgatacacttacccgaaatgccccagttgtaaaaagtatcatctgggtgagtgtagaggacaagggtatttccaatgttggctgccagggcactataaaagagactgtccacaacttaagaaagaagaatagaagactgcagcaaaacctgctccaactagggtgttttctctaactcaggca

SEQ ID NO: 105308 - DNA, 651 bp, Cannabis sativa
  modified_base (331)..(334): a, c, t, g, unknown or other
atatttgtctgaaaatgtaaaggaaaaatcaaagggtataagtcttgaaactgaaatcaagtttctagagaaacttggtacataaaaaatcttttccaacattaaaataaaaccacttcttaaaactaaattgcatgttccaatagcttccactcgttagcccatcttgtttccagataagatgccaagctcacttgaaactagcttccttaggttttgaatatcttgtaaggaatttgttatgtgaattgttgaaccagaatcaatccaccatgtggtaagactaacattagccatattagatttataacatactaaggaaattggattnnnnttgtcatccatccatttcttgaactgactgcactccttttttgcatgtcctttttgcttacaaaagaaacatttgatggaatctttctttatggcagccttgggagccacgggctttcttcctttgttcttcttgaatggtttgcatttcttaggttgagtggtcaggtaagaactttccccttgctcctgtagcagcctggcttccttttgagcaaacatggtcatcaattcattgatgctccatttttccttatgtgtgttgtaggaaattttgaaaggcccatattgtggaggaagattgtgaaggatgtaatg

SEQ ID NO: 105309 - DNA, 578 bp, Cannabis sativa
  modified_base (403)..(403): a, c, t, g, unknown or other
ataaacatgtaacatacatgtaaccataaattacttcaaaattctaaattgataactaatcagattgtaatggattttatttacggcacaaaacccaacatcatttgtattgagtaattacaaagttttattctttaaaattacttaaggggcatttatgtatgattaaccgaaattcatctggaaatacatggtacaatgcaaaccctccatttaaaaaaaaaacattgaaatttaaaggttctcgactaaacctctttgacgaaagaggagtcgaactgttataacttcctgaccaaaccttttcgacgagagaggggtcaaattgttatagcatcttgatcaaacttttttgaagaagaaatgatcaaacaactataatttttgattaaaaacctatttnatgggaaaggaaaatcaaaagttataactcctgtataaaaatgaatattaatgattcacgcgagctaggaaagtgctaaacgagccatcacaatgccttgataaaagtacttgaacctaaaaaatggatagataatctaactattcacacgggcaaattaaaaatatacaaagtg

SEQ ID NO: 105310 - DNA, 1669 bp, Cannabis sativa
  modified_base (70)..(73): a, c, t, g, unknown or other
  modified_base (373)..(383): a, c, t, g, unknown or other
ttaaaaataaaagaatattctcttaaatttaatagtgttagtaattaaagttagttttataaatatatannnntattaatattatttattttagattaatttagatacatataaatattaatatattatttaacattattatttattattattatttttaatattaggagtatgttcaattttaatattcttaaattttatatttttttctttaaatttttaaaactttaattatttttttaaaaaaattaaaaatttagttagcgtttggtaataattttttaattagttttctgtttttaaaattagaaaagtgaaaatatttttcaaaatcatattctataaaagtgttttcacttttcaattttttaannnnnnnnnnnaattttaaaaacaaaaaaaaatcactttcaatattttttaaacaatttttaattaatattttggactctgactagactcggactggacccaaacccgatcccagtcctggcactgaaccggacctctgactcgaacttggattcgacctcggacctagacctgacttaaataaaataaaaagataaatatgaaaatgaactttacagaacacacttttgttttttattttttaaaattaaaaaacaaaagtagttatagaacacatttttatttttcaaaaacaaaattttatttttatttttgtgattaaaattagaaaataaaaatattaccaaacgacatcttaattaataagtgattttattttaatttataaactattaaaatacacataataaaaataaaaactaattaaaaatataactaagtatacgtgtaatgcacgtaacaataacttagtatatataaatatgtaagaagtttatgtgatttgaaatttagttagaaatatttatatattaatttaaaattaatagaatttaaaaaatatatttttattagttgatatatgatatatatattttaaaattgacttgatcatccatatttcaaatatatgtatttatatatttataaaatttaggagtagaaaagttttatatttttttaaaagataatgtggaaaaaaaatgtgtgatagttctatatcaggtgagataatatatatatatatatatagatatatatatattaaatttaagagtagaaaggttttattatttttttaaaagataagtgtggaaaaaaatgtgtgatagttctatcacgtgagatagtctgatattttttttcaaaattaattaatatttaatattataaaaaaatgtagaaaaaaagagaaaaagaataagataaaataaagtcattttagtgtgtaatgtcagcgcatcatatctctcttttaaaaaaatgtagaaaaaagagaaaaaaatagagttaacaaaaaccattttagagtacatatcactgtctcatatctctctattatacatagatcgctctaaaatgagcaggagcgaggcatttgagattgttattttttaataaaaaatattatacaacatgaaaataaaattaatcgtgaataactaccatataaaataggattttttttatttttttttatttttacactttaatacagtttttttttgtatttttatagaaatctatattgcaacccatatagctgctaataaatcaatttaaatcgcaatcaaaatcc

SEQ ID NO: 105311 - DNA, 547 bp, Cannabis sativa
atcacacttgaccttcctcagacaatgtgggattgcacaacttaccctgtatttccccttacagatcacgagactactgattgtcacaatcaccccctcttacgggttttgacgccctcgtcgaacacacttctggctgggtcaaggctctgataccatttgtaacatccccgcttcaagcctccattgagcccttacacccacagaataatggctcttatacacgagtatgccactctggctacttcctggattgacgactgaccctacagaccaacacgagtgtttctagcatgctttgtcctcactcgcacacttcctggaaaaccttcccaggagttcacccatcctaaaattgctccaagttaagcacgcttaactatggagttctttcatgatggggtacctaaaaataagatgaaccttcttgatataggtagtaccaatcaatacatttaagcccttatcaactgtatatcctatccttacacagtctcagaatcatcacacatgacattccccaggcgatgtgggattgcacagctta

SEQ ID NO: 105312 - DNA, 1309 bp, Cannabis sativa
ctcaaccccctcaccacatcgtacgagccgacccagccccctcatccccactccgaccacgagacgaccccctcctccgaccgagacgactccgacggagacccacggctccgatccgatcgagacgactcccacggacacccactaaccgaacaacaatgtccaaggtattttttttttattttttttgtaagaaagtgttaaagattgagtttgtttgtgattgtgtttgtgaaacttaagattttgttagattgtgtttgtgaaagtgttagattttgttaaattatctcggatctatgaaaatttttgcttgaggaagaagaatacccgatgggtccgatacatgtccgatttgggttcgatggtcccaaaaatcggttttgaaataatcggaccgatgggtccgatgctccttaatttttgtttggaaaggatgcgtctgatggggtccaatgctcccccaaattcttttcgaacgggtcggaccgatggggtccgatggtccccccgatggggtccgatagtcttcaaaaaaatttgtttctaacggtcggaccgatggggtccgatagtctttaaaaaaatcgtttctaacggtctgaccgatgggtccgatgctcgaaccgattgggtctgatgctccacttttttagttttttcattttaaatttattattttattttttattgttttatttttttattaattattaattatggttttattattaattattaattacgtttttttagtaattattcattatggttttgtgaattactttaatttttattgttttattaataattgttaattattttttttattattaagtattaattattatattattttttattattttattaattattttttattgttatattattaattattaattattgttttatgaattattaattatggtttttttattaattactaattattgtttaattattaattatgaattattgttttattttttattgttttcttaattagtggttatggttttattaataattattgttttattttttattgatttattaattattactttattttttttattgtcttattaataattgttaattattttttattattaattattaattattatattattttttattgttttattattaattattaattattgttttaatttttattgttttataaataattaattatggttttttattaattattaattattgtttaattattaattatgaattattgttttattttttattattttattaattagtggttatggttttattaata

SEQ ID NO: 105313 - DNA, 537 bp, Cannabis sativa
  modified_base (372)..(384): a, c, t, g, unknown or other
ataaatgataaaacatgcataactcaaccctttatttcagccaagataaattaaataaaacaattaattcataactctaagtccacgaatggacaaaatcttatggggcaaaatgactattttgcccctcccacactaaaaggattaaaagacactaaaagggtatttttcagaaaactctaaattcccgactaatcccgacagtcccaatgtctaaataaactgccccaatatactaaaatactaaattgtgattctactgagccatacaccgcgttccaagttgccgggcatcgaaaatgcaaaattatgaaatttcactatatgacataaaaatgcattatgaattcaaatataacaacataaataatnnnnnnnnnnnnnataaataattttcataattaaattttaattaactgctaatttctaaatttaagctaagtggtctttacattatggttcttggccatcttaggggtggggattggtcttttggaaaccgttgtcaacataacaagcataataagtaagggacct

SEQ ID NO: 105314 - DNA, 976 bp, Cannabis sativa
  modified_base (688)..(688): a, c, t, g, unknown or other
  modified_base (815)..(819): a, c, t, g, unknown or other
  modified_base (932)..(932): a, c, t, g, unknown or other
ctacaagacgtgccttaaacctcaccacattaccattttcatccctcttggttttaaatatccatttacaaccaattagttttacaccttctagtaatgagataacttcccaaacattattgtcttgcatagacttattctcttcattcatggcatcattcaacttttgagagttagagcttttcatggcctgatgaaagttgattggattatcttccatcattccaatgtcatcctcatgttcttgaagacacactatgtaattatttggattaatagtatttcttctttctctagtggatcgttgcaaaggcacttgttcttcaggttattgagtttgtacctctagggtttgattgactatgtttggttgctcttgatctaaaactctatcaatatttaggattggaatccagaacattgtcaaaagcatctaatggaacaggaatcaactcatcttcaagaggagtggttgattctaaatcctccttcacaaaaaagtctttaacaatatttctctccaaaactcaatatcctcaaagaactttgcagttcccgtttaaaatatattccttactttgaaaccataaaatttgaaacccctaaatcgctcagattatccaataaagtagtgactcaaagttttggattccagcttcttttcatttggcctataaggcctagcctnagctggacatccccaaacatgaaagtgttgggctttgttccctaaattaaactctattttaatgtatttttttctgttcaattatcaataaagaaacaaatcaaatttcattacttgtttaatgtgnnnnntggttcatgtgatcatttatttacttatttgatttataactacatccaaatccttattatcacaatgatattcttgtttattgtgttttcaacatagtggaaagtaatcaagnttgtgtgattaaatatattcctatgatttatcagtacacaggat

SEQ ID NO: 105315 - DNA, 869 bp, Cannabis sativa
actacaggtaaccaaccttgcaattggttggctgatcgatcgttggctcatccaaggggtgtcattaaagatgttctagtcaaagtggataaattcatcttcccagctgatttcattgttttggatatggaagaagacaacaatgttccaatcatccttgggagaccattcttggcaacaggacaagcattgattgatgttcaaaagggtgaattgaagctgagagtgcaaggggaagaagtggtcttcaatgtactaaaggcaatgacttttccaaaggcaagtgataactgtttctttgttgatctgatagacactatagtggagaagaaaaagttgatggaagatcctttagaaatgagcttaacgaaagacgagttggatgagcaagatggaatggaggcaatgggatatgccaaatggcttgactcctatgggccattgaatagaaagtactatgaagagttgggggttgttctaaagaagcttgtgccatctacagaaaaaccaccagaactagaactgaaggtgcttcctgatcatctacagtatgagtttttgggagaagacaagaagcttcaagtcataatgtcagcttcactttctgatgtggagattgacaagctgctaagagtactccgcgcccacaataaagccattgggtggacattggctgatattaatggaattagtccctcaactgttatgcattaaattctaatggaggagggcgctaaaccgactattgattcacaaggaagacttaatctagcaatgaaagagattgtcataaaggaagtggtcaagtggttagatgttggagtggcttacccaattttaaacagtaagtgggttagcccagtgcaagt

SEQ ID NO: 105316 - DNA, 676 bp, Cannabis sativa
  modified_base (147)..(149): a, c, t, g, unknown or other
  modified_base (356)..(358): a, c, t, g, unknown or other
ccttatagcataaagacttagcaaatattttggattgtacattgcttgatccacgtgtccttattcggttggtccacgtatattgggaaaaatcaggggcaacaaccactattggcaaaatccagtaaacgacataaaatataatannnataccaaaatattaatagcctaacttacataggaaaatcatgactgaacttatataaaagatactattaactttggaagaaaaatttaaagatgaagaacaatttaataaatgagatatggagatgaatcacaaaagaatcaatatcaatattaagaataaaaagtacaatagctacactctaacctcaccaatattactattctannncattcatttttgtcactaaaataagtatagataaaatataataagagaataataaaatgacaaagtgatttttactctctctaaaatctcatgctttttcacttgcttttggagtctatttatagtgatcaaatgctcttagtacttggtattttcgtgtaccatttagggccagtttagcacaactgtgctgtgggaaaaaacatctgtagctttgctctgagaaaaaacagctgtagtaaaactgtagaaaaaagctgagctgagtgtttggtaaattataaattttaaagtactgtgagttgctaagatttatta

SEQ ID NO: 105317 - DNA, 551 bp, Cannabis sativa
agacagaaaaccaatatgaaactacttcagtaaacaattataaaataattactcagaatactccgagttttgacttttagaaagaattagaaaatttccaaacagtaatattaccaaacaactgtgctggccttagagaatttccaaacacccaagtttaaaatttcccaagacaattggaaataacaactcaaaagcaacacatatttgtaccattaatcagaatttattaaagccatctagcctattattatccttgaaactttattacataataccagcatatgaaactctatttcttgcatgccacatcatgtgacaagcttcaacaaatatcagcgcataatcatttacatacactaaaatcggaagaatcatccaacataaaacatacagaatcagctcagccccatacacgtctaaaaccacaacacaacaaaaatctaagactggtctataaaaacagcattattgatccaagaagtgcgattgacaaataagaaaactgatatacaaatattcaatcaaaaatatatagccacagtgtcaaa

SEQ ID NO: 105318 - DNA, 696 bp, Cannabis sativa
  modified_base (334)..(336): a, c, t, g, unknown or other
gtccggaatgacaaggtacacaataacagaatggataatgtgaaacaatgtaattgattttatttctcactcttatgcagattacagagattccattatccctatatcctccccgaccccattgctttttggaacccgcccctttcagaatagagcatatgtgcgtagcagtggttgctagggattacctgagcaggttaatttgggtgtttacggccaaaatggacttctctgataccctgtgtggagaagctgttgcggtttgcttggcgcttgaggtcgctaaggagaaaggtcaccattttatcctggtggaaagcgattcaaagatagnnntcaacactctcaacggcttggatctccgacgggaaattgaaaactactctttattttgtaaaagtatcgctgcttcctttgcttcctgtttattttatttttcgactaaatcttgtaaatttatggctcataatgtggctaattaggcttttacccataacttatatagttgtattgagatttttactattcttaagaatatttgttgtaatgaccacgaaatctaatgcttatgaataaacctttcttctcaaaaaaaaatattatttttatgtatttgcaaaataattcccaatattaaaagtacaatttttgaaagcaatattaaagagtggtataatattgaaaaaaaaaattaaa

SEQ ID NO: 105319 - DNA, 648 bp, Cannabis sativa
  modified_base (46)..(61): a, c, t, g, unknown or other
  modified_base (198)..(213): a, c, t, g, unknown or other
tctgattgagagtacaaaaggatgtcgtcgataaatacaataacannnnnnnnnnnnnnnnccttgaataccctattcattagatccatgaattctacggagcattggttagtccaaaagacataaccagaaattcataattttcatacctagtgcggaaagccgtctttgggatgtcctcctctcagattctcaacnnnnnnnnnnnnnnnnggagatcaatctttgaaaagactattttccccctgaggttgaattctcaattctttaagttctgttggagccattctgaaaggggccttagaaaccggttctgctctagatgctaagtcaataataaaatctatttcttcctgcggtggtaaacccagaagttcattagggaaaacgtctaaaaattctcgaaccatcttaatatcttctggtcaaatttactcaggttgtgtggtatccaataccacagccaaaaactctaaacatcaattctgtaacaatttcttggctgttagtactgaaattactaggatccgagatccctgcaccgatccaacaaaataaatggttcttcgccttctgattggaggattaccatcttcctcttacaatcaatactgctgagtacttagataagaaatccattcccagtat

SEQ ID NO: 105320 - DNA, 1466 bp, Cannabis sativa
  modified_base (44)..(49): a, c, t, g, unknown or other
atctatattaataagtaaagctgattatattgaaatgagttttnnnnnnggcataaaacccaacacaatcaagcagcacaatacaaattttggaaccaagcaatgcaacatgagctttttgcactactcaaaaacaaaagtttgacctacgtgtagctgcctcaaaataaaaagtcgatagggtgtcgatgggtatacaaaataaagtacaacggtgatggaactgtggagagatataaagctcgcttttttgcacagggatatacaacaaaagaaggattggatttctttgacactttttctcccgtggccaagatggtcaccttcaaacttttactttccatagcaaccatcaaatagtggcacactcttcacctgacatcaacaatgatttcctcactgggaatctccatgatgaagtgtatatgcaactaccaaaagggctaattctacctccttcaacttgtgcaaaaactataacctcatctgcaagctaaacaaatcaatatacagactcaagcattcatcaagacagtggcaccaaaaactctccgatgctttgatccataaaggatttactcaatctcaagaagactatactttgttcacaagaggcaacaatgaatctttcatagctctccaagtctacgtcaatgacatcatcctaacggaacaaaatttaactcttcatcaaaaacttcaaaccactcgcaaaaataagttttcattggaggctctccacaatctcaaatactagctaggttttgaaattgctcgagaaacagagggtcttgtattgtctcaacaaaaatacaccctccaactattagaagataatggctacataagaagtaaactcaccaaaaatcctatggatcctataatcaagcttgatgatcaataatgaaatcctttagaagacccttcttaatatcgtcaactcattagaaagttgttgtatctcactttatccagacccgacatcacctttctcttagccaattcatggcttcccctcacactcctcatctacaagcaacccaccatttacttcgatacttgaaagggggtctaagagaaggcatcttttactcagcaacttcatccttacattgatcttcgaggtttctctaacttggactaggcttcttgtccaacaacaaagacgctcaacaatagattttttgtgtgttcattggagattgtttaatttcatggcacacaagcaactgccaatctcaagaagctttgctgaagcagaatatcgtgctcttacagccacaagaagtgaagtaacctggctgagataccttcttcaagacttctaaataccagaaacacgcatgcctttatatgctacgacgtcaaccaatccgcaattcatattgttatattattttataatataataagtgtagattaaaatgtggtaatatatattattatgtgaaaaatatatattaagt

SEQ ID NO: 105321 - DNA, 907 bp, Cannabis sativa
caatcaaatattgacaataaaactgtgtcaaacaatagattaatctttggactaacatattgttcacacaaaataccttataattgtcatatatttattgccaaaggtatgtttgaaatagcaaaatattcacttacctttgggttagtcaatatatgcatcaattacaaacacacaaccatcttgatattttaaaaaaaataatctacataaaagaggtcactttggcgatctattgtttcaattaatttattcaaaatattagatataaacctgcatcctaatatatatactataacatataacaatgaaatagcatacaattcaaaatgaattcaaattgaaaaaaatataccaatcaactaacagcataaatggacctgaaacccttaccaaaaaaaaaaatacaacaaaacaaattatactgggctgagcttttataccaaaagcacttaccaaggtaagaaaattcatatataacttgttttatattcattttatctaagataaaaaaaaaaatcaactgccacataaaatccatcaataaggcatactatgataaggtatgtggtttgttcaaacaaataccagtctgaagctgaagccaaaaatgaatactaaattatatactttgatatgaaaatcaaaaagaattccatccccacttaaaaaaattcaatcggatcaagatcataacattattatcgtaaattctcaaaaactaatttaggatactcaagatataatccctaattttgaaattcctaaactttataaacaaaatcatctgatcttcaatcaatttagcaaaaagtggctctgataccacttgtttggatttataaaacactcaatatatatatatatataacatatctaaatatattcctaaaagtgtttttttttt

SEQ ID NO: 105322 - DNA, 519 bp, Cannabis sativa
gtgctgagtgactcggagagagtatgatcccgggggaaggaccagtttatcccctttatctcaaacctcatcaatgatcacgctctggttgatttaccaattaaaggggattgcatgacttgggacaaccatagagatggcaacaggcacatcaagtcagccctggataaagcgcttagcaatgatgattggctaagactctttcctaggggggtagttcattctcttgccacctgcaattctgatcataggcctctctttattcagtctgctttccaggaatccaggagcagacgtccttttcgtttcgaggcctggtggaccagggacctacgtagctccttaattgtggaacatgcgtggggatctgtttcgcatgattgggccccggccaatgtttataagagaatgggtgcatcacgccttgctctgctcaattggaaccgggagcaatacggcaagttggatacgtgcatttccaagctacaagaacagttacaagttatccaatgtatgtct

SEQ ID NO: 105323 - DNA, 4276 bp, Cannabis sativa
catgaaataaacatgtgaactaagaaaataaatctgtttctttattgataaatgaatatagaagattgaaatagaattttatttagggcacaaaatccaacacatacatggtcttcttctgatgattgattataccactgatcaaaaagatatacctggctatatttcatctcttcaacaaattcagtaatgagcataacgaccatattattccgatagagagaagaatctttttttattgcgtgtacatgtagaattcgttctattcaactattcaataaatgcctttagcgacaaatcatgttgatagtacggtagtcgtaactaaatgtgtaaatgtcgtggtcgaagttggatttgtcaaatcatttgcaggtacatgaactgtttgaatagaagttaaccatttattccaacataaatagtaattatttgttcttccaccgaaagagaggctagttgagattgtttgagtaatttaagtaattgttgacctcttaccaatagattctgagtagcattatcgacaataaaaaaaagtaactcgaacaaaagaaaggaagtgacttaaacaaattttttttgtataaccttagaccaatcaaacaaatattgattaatacgtaattaattaaacactatttgaaaatgaaaacgactccgaaaaggaaattaaactgataaatttttacttatacagaatcatttttctatgtgtggatatgactagcatatcaattttttttatataggtatatttagttcatttgatttgtgccataacatatttatttatttaaagataaatataataatatttccttctctacgaaaaaaagaatgattaattactcataaaataaagaaataagtctttatataaaattgaatacaatcttacataatttagtatcaagttgtgtgtatttaaatttaagatggaatatgtaaattccactactaaatttatactaactaatcaagatatagtggtatcgatcaccatgagtgttctctatgaagtctttcatgtttggaatgttgagactaaatatggagtcttgaattctttcttttatgaacaaattcattcatacttgggaactaaatgtactaatacaaacaagaatgtttgacttggtacatacaaacttgattatcactaccacacactttgtaaagtaaaggccttcctaatacaaacaagaaaggccactttctcttttctttctttttctgttttctcttttcaagtattgattttttttggttcatcacattaaccaaccacaacagatgtattgagaagcagatggcattcttcctgtttggcgaatgtattcggcttgggcagcagttttttctgcatctcggttctttcttgcttcggctgctgctcgtttttcttctgatctttgccttgtcattgcagttttttgtaccatctttgcttgagcttgagctctcatttgctccactttagcctaaaatattcagattgtgttgaaatgttagttccaaggccaaatgaagtagcaccaatatcaatagagtttcaaatgttggaagcagtttcccatttttatagctttgacaaacatatttttgatgatcatggaaaacaagtgacaaagaaaagtgtctaatacctctattcgcctcaactcggcttctaattttgccttctgctgactctcccatgcttggattttgatttcttcgcgcttaaatctgtacagtgttaataccaaaatgatcaaataaaccatattggaacatgaattctcacagttctacttcatgccgaaaatgcttaaagtcatgaaaagtaccttgcaaaatgtttagatttttcggcttcttcccagtcagctgctctcttttcattttcaatacgtgctagctcgtctgccttagttttttcagcacaagatctttgtctttcctgctcatctttactcgcccaagcagcgatattcgtcttgccaagctggacacctagtgctacaatttctctcctagtcttaagcttcaattcttcttctgacaattctttcttattgatttcagttggatgttgtgattccctatcacgggcaagctccgtaggagttgaagctggagcacctcctctaggagttgatggcattgaggaagttgggctgcgaattggggtggttgcaccaacaggagtagcagttcttgaaggctcaagacttgtaccgggtgtcatttcggttcccatgtctctcattgagactgatcttatggcaggaatccctacataatgaaccactcaaagatatcatcttcttcatctatctatgctcttactattattacaagttcacagaatcagaatctatagaatactagttcatgaaactgaagtctattgttaaagaatcacatatgtgaacttgatcataggacaaaaaaaaggtgagtacaaacctgaagtctcatctgatgaacttttcgggcatattaactcccctaattctttcaaatccttactctgagtagattgatcaaccaatgcttgccccaaaatggggtgattaccagaagaaacaaacgagaacttatcgaatccaacatgtgaggcggtttgacagaaatcaaccctcttggtgtctgccattctgctaagtaacaatttgatatcacagttaccagactctggagcaactctaaccatatttgaatttggcatcctattagtttggttttgtaaagcattccttttatgatgattatgattagcttgtacattctgtctattcattatccatttctcagcatcattccacttagatggcataggtcttgaaattgaccttgaaatgggattatggcctgatctttcccccttatgaaactcaaaactagaagagctagcattactgtcataatcaagattgtcatcttccaatgttctcagaggatgaactgtgcttgaattgctgctatcaccctttgaacaatgctgagttcttactcgaccagtctcaccattttcttcagggaatgactcttttagctggtcactatgccttgcccccaatgttgaaacttctaaacttggagatgtaactgaatgagcatataacagttagtttaagatgaaataaaaggttaaaacactcaaaaatgaggttggttcacaagacagaaaaacaaaccttcttcatcaccagttgatgtgtctaacaagctgttcttgacaaaatcagaatcagcaagttttgcaggagaagttcttgaggagttactgttggatccatctttcttcctaaggtggttgtgagcacccatgagcttcatcctcagtttgcttggggaaatcatgcctgtctgcaattaagaacacaaagaccaaaaaaaatataaaaaagaagactactgaaaagaaaagcttccaaaagcacatttgtaagaagaaatcatttcaataaaacaaaatgaaataattactcactactttaatcattctaaatcatctgaaacaaaaaccaaacaccattttgtggattcaaattttagtaaaaaaaaacaaacaacaaaacaagaacaaccatatatataaagaaatatttacattgtgaagtaattaataatcaatgaaaaagactacactgcacagatataatattcttccaactctgaagtttaaaagtcattcaagacaaaattggagtccaaatgactattactaatactaaagacacattaccattcacactgacattggctgccaccttttacaaattttcagcttgagaaaagaaaaaaaataccaaaccccactaatttttttaacaagacaccaaatgggcacatcttaattggtcaaaaagttaaattttaacacaaacccagaagaaagagagaacgaaattcaagttagcaaatttagaaaccaaaaaagaaaataaaaatcatttttttagtgaaggtgatttacagtacccttttgtgcaagaaagaacaaaaacacaggaggaaaaaaaaaggtagcgtttagttgaaagtatgatgataatgagaaatgggttactgccattttcaatggtaaaaaaatccaaaagaaccgtacctgcactttgtgaattctctcgtactccattagatctctctctctctctctctcaaactcttattaactcagctatggcagtaagtagcaggagaagaagaagaagaagaagatgatgatgatgaaggagaagaagaagcaggagaagaagaagatgatgatgaaggagaagaagaa

SEQ ID NO: 105324 - DNA, 2463 bp, Cannabis sativa
tggcgagggtgtagatccaacttccagagcttcttccaacagatcttttcctcttgaaaccgatggcattgagagagccattacccatttttgacagagaagagccccttattgctgcttttccagaaaacccgatcctcatcctcctctaaaggtttaatgcctataatcgcttcagcaacttcatgggaaaagcaagctcttatcaagtttacattccatgaccaggatcttggcaagaatagatcctaaacagaggagaatttatgagtaattgcataagtaaagctacttctaacctcctccggactgaaccccggcacccacggctttgtccaaagatcggtttcaccctttctaattagaattccagcaccagacacacacagatcacgagcctcaaggattcctttccaaagagagaaatcgtttccacgcttatcaactgtccaaaaatccatagtaactaaatcaaatcgtcaattttattacaatcttctataatgctctaagtacacagaactgtgtgagcaagtgttgtaacactatatggctcataaaaattgctagagagaaagagatactcatattggcaatttctagagagaggagagagttttttagaattttcgatatccaaactgtaaaaaaatctcataaccttcctttaaaaaaaaggaagagttatttttctttaattagttaaataaaaaaaacgaaaaatacaaataggaaaatagcttcaatgccatcaaagtaaaaggatattcgacttgaactttctattttcttcacttaatcctaataaatttaaaactgtgacatctttttatatttaccatatttaattaaacttgatatttaaatatttattattaattactagcaacaaatttcccgatttataaatcgacctttattttctatatcatctaaattttaactaggtgaaaattctcaaaattaaaaaaataaataataaataatgtgaattttaatttattaaataatcaattaatgtaacctactgttaaacattattctggatattgtggcagctatgagcttataaaatcaatctcccaataagtatattcaaaatttaagaaataaattttataacttattaatgcctcataattctattatagattcggaattgcactcctgatttaatagaacgccctacatatacataatatagatacactataaattatctattattataattaagtcaatcaagaattctttatagacgatttacaatgagtagggactaaaattaccgttttatccctcaattttatttgatccttcaactcttagtttctagtaaaggaatttcagtaaaataatataaatactaaaatgagatatctatttaacacctttaatatggttcaaaggaaactatcgttcacttctaacatagaagctatagattttcatatctatgactaacactcccactcaattataatcttaccgagttcccaatatgtaagtataggcttgactttaaagtcagctggtaacaaacaagacaaaaaacttgaatagaacaattagcttaaagcctaaccatatcatgattcagatcgaatttatttatgattaattaataagtgataatgacttagaaaagatataaaagtaagttcatcatatccgttttatcttcaatatcagtctagtccaatataaatctatacattcgatacgagtctactttaccaatgtcctcgaaaagacataccacttgccatagtataagtaaaccacatcaccaattatcatttagtgtaaatttaatgcactgataaatttcgagactttaaaatattcgaagtatataatcataattgttttctattataatgaccccactataattatgaataaatatgtattttagatttaatagaatttatatattagatataaaatcacgtaaataaatatgtaacctatgcaattgataaagtgaaaatatgatttctgatctttattaaattaaaataatattaaattgaatttaaattttatttatgacatcaaacccaacaagtataatcgaattgcaaacagacaagaagaccacacaaaagggaagaagcctccgccacatgaagctcaagcaatacttgtataagggaagcaagtgagcataagatttcaccatttgacgagacaacactacccccattctgatcttccaccgctcaacacaagtaccatcattgacaaacaaattaaactcatccaaattaaatttagggaccaccactacaacaaatgcgacttttggcagtgcatttggctaaatgcgccagtaaaagttaacggcataaaggggctgaaagaagagccaaggcatttagccaaaacttttatctgtgcaatagtgcatcgacaaaagttatttacgccggtgcatttagtgaattgtaccgacaaagc

SEQ ID NO: 105325 - DNA, 759 bp, Cannabis sativa
aattgtaaagttgtcaagacaaaagacaccattcttgtcctaaacaacaagggtaggcgcctagcttatgtcatatccctatggattttgtatttttgggttaattagttatttaattaattcaattagataaatatctaatttaaaaagtagttatagatatttcaaagttgttgagatattctctcaagtagttgagagattccctcataaatatcaataattgaattggttatagatatttatttatttaaataattaaatatgatttaattaaagaaatttaactactataaatagaagcctagtttgagaaatgaaaacataattctcacttcccagaacactgtaatttttgaaattatagagagaaaaaggaaattgattttttgctcaattgttctttttcatgtgtgttgagaattcaaaaaaagaaaaaaaagctatacactttatcctaatagctcgtactattccttgtgtgttgtggaacaatttgaaagacactggcgtgagtctaattgcatcatcctcatcatctggattaagggatacaacatacgtgaagtttcgaggataccatgataggctttaagagatatactctaaacttactatttattatttttaatttaatgtgcacacatctggagatccattgagctatgatacaatgataatcagataatacaaaactttttcgctgcgtacctgatttagtatcataaaactaacaagataaacctaagatacctcggt

SEQ ID NO: 105326 - DNA, 697 bp, Cannabis sativa
  modified_base (42)..(46): a, c, t, g, unknown or other
  modified_base (552)..(555): a, c, t, g, unknown or other
  modified_base (645)..(647): a, c, t, g, unknown or other
attaattaaacatactgatttaataaacaaaataataatatnnnnntaggtttattatatcactctatgtgtgttatgtttattttttcgtaattttttagaaaataaataatataaaaaaattgtttttctttatctttttctttgtttattgtgtcatgcttattttttctaattaaataatttttggagctataaagttatgtttgtttatttattttttgatgtaagaattcactactacaaatatcagaattcgcgacggtcctaaaaacgattttttttggggaccgtcgctaaaaaaattaagtaactatttaaaactgtcgggaaaaatttagtattcctgacggtttaaaatcgtagtaaacaaaataggcgacgttttttaataaaatacaattttttaatggaccgtcgcctataaggatctattaaaaaatcgtcacctacttctcgccacatttttccacgtgcttacctactttttttctatttcccacaccacctatttcttcttacctattttttctccatttcccacaccctaannnnaaaatcttaactctccaaaatcccacccacgcctccccaccatctccctcctctcttgtcgtcttcctccctctctcgatctccttttcnnntcgtctctctcgtccatcgatctccacccacccctcctcccgtcggtctc

SEQ ID NO: 105327 - DNA, 534 bp, Cannabis sativa
taaaagtaattaagtacgaataaaataaaatacatagaaaattaggagaaaattaaatcacattagaaccataaatcaaaatctaacaatatccatcaatagcccaataaactgtttagcaactcttatttatcgtaacaacttcacacatataattttctatttaattaaatgtattaaaaatagaaacaaataattaagtatcttgaataaaattaacataattattaattctagtttaatatctaagaaaatattctaatttaagttggtataaattaatttaaaataagttggacaatgaacatgtatgtttgattataatctataatctaacatcttaaatatgaatttttaaaacaataaaataaacacataagagattaagaaatccttacaatgatggctacagaatataatgacttcttccattcagatctctagccctttattcttgtctgtagcagagcattatcaggatctaaacttggatcttctctccttcaatttggtttcatatagtcttcctcacta

SEQ ID NO: 105328 - DNA, 1155 bp, Cannabis sativa
tttctaatgccaaataattcaaacataaacctagaaggattcctataaatagatagtgatagactcagagctaacagtctaagttacactagcctttagtcaaatttgagccttctctttctatttctaaattttgaatccttctctctctctttctcttcaatttttgaacccttatagtgatagagtacatgtccacgcatagcaagttggtactcaatcatagtgtgtaagattgtgaagaattcaatcaactaaatcgggctcaaatcttggttatactctgctacaaaaaagatacaagggttagagatctgagtggagtgagtcatttaattccgctgcaaccaatgtaagattttttgaactttatatgtgtttaaattctattattttagaaactagtaaataacccgcgcttcgcagcggatgtttaagaaattttaaattatatatataaaataaattataattttcatttaatgacagctaagtaacaaattgtatcaaattttaatctaatttttcatttaattttgtatgaaaaattaggtgtgtataaacggatcgatccaactcgtatttactaaatcttgttattataatggaagctaaacacgacctgtataatatgatgttaggcttgacccctcgatttgttataagaattgacaaatttataaaaaatttactatataatttcaaaaccgttctcatcactatatctcacttgtagtcaacattacaatttgctacactaatactaaatgaaaattgtctgacactttaatcttttctctatttgcatatcaaagccaaaaataggaggatgagtagtggctgaaaaatttagaatgcagaaccaatatatagttagatatatatattttgaataaaaagatagttagattttttttttttttttgaataaataggtagttagatatttgaggatttgttttatataaataattgttattattttaaaatttatatataattattattagtttagaaataagttactacattagtatacataattatatatatatggaacattttttaatggatattacccatgaatggttactaagcaaatttaactataaatattaattttaaaaataacaaaccatcaaattttgatctaat

SEQ ID NO: 105329 - DNA, 737 bp, Cannabis sativa
aaacttaattatgtttatcaccccatctcccctcacataataaaagtaagtactatatcgatcattgtttgatttattttatgtatagaataaatctaatagaaatagtattaataatgattacaagtaagatacggtgatgacatcaactttaaatacagtggtaacgagatatacggtgatgatagttgttttgatattatatgatgagttttctatagatttattgccttctttctattaatttagatatctattttgtgtaagaattatttagtttttaattttcttcactataatgtacatttaaaaaaaattgcgtgattttatatttacattagaaattttatgatatttttttttaaattatttagagttttcgatataaatttattatttttttaataaacatatatttttctttttaaaaaaatgcataaaaataaattcaaaattatttgatactgattttattgtttaattaatatttatataataatttaattaccgcacgcgaagcgcggactgtttactagtactaataaatgtaaatgtagctatgtaagatattatgttaaaaataaacatgatataataatataatttttctattttaagggaataattagatttttaacgtatgaaaaaaaaaattaaataataaactaaatttaaatgagaattatatttattgcccgtaaaatataaatacagacattatattttgaaaataaaaa

SEQ ID NO: 105330 - DNA, 1073 bp, Cannabis sativa
ctctgattcttatggtcatggttcttgctggtggccacaattttgtgaagtgatttcgatttgaaaatgcatggttgagggaacctctttgttatcagattgttaaagatagttgggagatttgtggggctgatgacgtgatgtataaaatttagttttgtggggaaaagctggccgattggggtaaggaggtttctgggaacattaaagaaagattaaaaagtgtaaaaatgagatgcaaaggtggaaattgggtcgagatgaagtctccgttgccaattacaatcaagcaaagagaaatttggccaaaggttacgtgcaaaggaaagttttctagcgtcaaagatcgaagcaattatggttgcaagaaggagacaataatagcaaatatttcatgcttctacaactacaagacgatgaaataattttgtggcaaaacttaaagaccattatggtgcgttggttgactaggatagtggtttggaccaacttatagtttcttatttcaacgaacttttcttatcttctcaaattgattggagagaagtgacaagtagtgtgcaaactagtgtatcatcacagtagaatgtcgagttgttgctaccggtttcagatgaggaggctcgcaaagctttgttccaaatgcatccggataaatcccagggcctgacggtatgatccctggctttttttcagaagtgttggctgattgttaaagatgatatcatcaatatggtcaagcaattctttcataataggtttcttcttatagatcttaacaaaaccattttggtcttaattcctaagaagaagcagcctatggatatgggggatttaagacctattgctttatgcaatgtgttgtacaagattgtgtccaaagtggttgctaataggctcaagagtgttatgtcgtccatcatatccgatactcaaagtgcatttctacaaggccgcttaatctcagataccatcatgattgcctatgacattatgcatcatttaaagagaaaacaaagagggagggatggttatatgataagcaaagcgtatgataagcttgagtggggtta

SEQ ID NO: 105331 - DNA, 2426 bp, Cannabis sativa
  modified_base (2033)..(2037): a, c, t, g, unknown or other
cgtgctttttgaccatgaacaacacggttgcgctcattccatacggtccaaagagtatagaaaagttgctccatttcagcctttgaaagtattgatgaaaggtgaaaaatataatcacctttctgcattgtagcagcaagacgccagtcaaaactcagactcgagttacgccaaacagctcgagcataccggcaatgaaaaagggcatgtccaaccgattcccaagcttgtttacagaccgagcatgtagagtcagtaatcactttccttttgaccagcaaaattgcaacaggaagagcatcatggacagctttccaagcaaaaattttaactttcggcgggagttgcaatgaccaaaagaatttccaccaagaagagtgaacacgagaactagaactttgatccactgcatcaagatcagaagcaagatgatagcccgaactaactgtgtacatacctgtgctatggtgatgccaaataagagtgtcacgactgctgaaataactcaatgggatagttaagattctttccatatccgcaggagaaaaaaactgatgtaatacaggaacattccactgccgttcatcagaaataagattagcaacaacaccatttgatggacccttgtagagaaaggcaagaaagtactatgctagaaatgtgttatttaatttatttaatttattaaataaatcaatcaaacccatgagaaaatctcaaattttttaccaaacgtacacatcattctgttttttttttttaaaaaaacacacacacatcattaaatcattgtaatatatgccaaccaaaaaccaattagcctgcttttaattctacgtgccagtatataatataaccgttgtaatttgtaattcacattaagaaaaaaaaatcgaattgaatattattgtttacatatccaaaagcaacgtacatttttttcaattattttttctttttttgaaaaaataaacattttaggcaaatgattttttcctaattgataatatgtgccttattattcttaattttatcaacattacaaacattttagccaaatttcttgttatcattagtacatatataaataaatgataatgatttgataaaaagaaaagttaagagcataaagaacattattaaaagtttccacaaactaacgataattatatagtaaattactaggccggtgacgactcatcaccacactcatctctcaatgatataatacaaatatatatattgataaatataaattaacgcatacaaataataatacgctaagttccaccaaaataataaataaataaataaaacgctaagcatctgattccatttagcattcgaataatatattgcacaatttttgtatctatacatatatactataatacgatatgtataatgtaaagacaaaacacttacttattcctattattttatttttcaaactaaaaacttacttattatcataatcatacacaaataattatataagcaatcatacaaaatatatattattatattgtgtaattgaattaattatagcacttacaatatatacatgtatattaattaaagatttaaaaagttatttgagtagtaattaaaagtttggagtgtgtaaacatcataaagttaatttatgagcattgttattaagcagtagttgtgtctaccaccttcttaatattcgtgttgcgataaactagtgataccctaaaagttattatattaaattatatgaaacccgatactaattagttagaccaatagcgatactaattaacacatatgagggtgctaagcaccactgatgccctttagcatttctcttaatttatttagcgacataaacaggatgcgaggccgattggaggatggagcatcacgggttagtgtcccaagccccaagcccaagagcctcccaatttttatttttattttggctaattagaatttttgtcccctaaactttgacatgtaccaaatcatgccccctgagctttaaaggtcgttaaaaatgccccctnnnnnattgagattgttggatttaaggacttttttccaatttcagtaaaaaagtctaacattgatgaaagttcatcaagggctataatttagtacatgtcaaagttcgagtgacataatttggtagatatcaaaatctggaaaacataatttagtacatgaacaatcaatgaaatagtaaaattgaatgaaaaattagacaaaagtcattaaatctaacaatttcctagttcaaggagtatttttaacgaccttaaaagttgaaaggacataatttagtacctgttaaagaagcaaaaattctatttacctttttatttttatatagaaaagtttaatttactagctattttttaataaactgataagtttccaagaaagatctcaacagacca

SEQ ID NO: 105332 - DNA, 696 bp, Cannabis sativa
aatttatttgctcaaaagtaataaattcttaattgatatggattttttattattattattattaacatcatgaaggtagatcatgtgtgtgttatattctcaccccaagagaaagtttataatgaccaattaactctacaatatattctaattacttgcctcttatagtttaatcaagttttaatttttcagtctcctttctgtgaacaacaataaatatttccatccaaattctgaatgctccaactttatggcatgattacgaaatgtggaaattactttaaacataattgatttggacttatgcctgtgagaaaaaaaagattgatgatctaactcataccagtattattgcctataaaactcttcatgcacaatgagaaaagtcaaatcatcttaatcttattgctattaaaagatctattcctaaacatctattgagtggtttgtcaaacactacaaattttaaagagtttttcaatgttgtagaaaaaatatatgatactggtgaaaatgctgaaactgagcatcttatagatgaaagaacaaccattatataagtatgatgaatcaaaaggagtacgagattttattttgaaaattgtgaatgttcagtccaagttagaagatcatattatttttcttcctaactcttacattattcatcgtgatcttcatgcatttcccgcctctttt

SEQ ID NO: 105333 - DNA, 752 bp, Cannabis sativa
aattgagatgctagcttcgctagtgcatctgcattagataattgttctcttggtatttgttcgattttaaaataattaaacttctccaagtttttccaaactttctctaaatatttagccatttttaggcctttcgtttggtattctcccaagacttggtttacaattagttgggagtcactatagcatgtaagatttttgacctttagtgcctcagctattctcaaagctgccaacaaggcctcatattctgccttgttgttcgaggtatcaaattggaatctcaatgcgtagtagaatttgaagttatcaggagacatcataataactcctacccccgagccattctcatttgatgccccatcaacatgtaacttctatgtttctgcctcacgctcaacatctgagccttcttctgagtttgctccttcaattagaaagtcagccagagcttgtcctttgattaatactctctggtggtaagttacgtcaaattatcccaactcaatgaccattttatcaatcttcatgaagtattaggttttgataaaacttgccttaatggctggtttgttaagactttgattggatgtgcctggaactatggtcgtaatttgcgagatgcatgaatgaagcatagtgcaagttttataagaggtgggtatctcgactctgcccccagtaaccttttacttacatagtaaacaggttgttggtgcttatcctcttctcgtactaaagccgcactaatg

SEQ ID NO: 105334 - DNA, 868 bp, Cannabis sativa
  modified_base (548)..(549): a, c, t, g, unknown or other
gttagaagaaagccatcagaaacacaaggcatgaaagtcaagaagctcaaaaacaagataaagtaagaggcaaggtgaccgctcgaacaagactcagaaatccatcatcacctgatatcgatcttatttcagacataacagctttctcttttccaaacacgggaggggatggtcgaacaggtgaaatgggctcccttatgcgaatcgcatgttcaataagcctgggcgaggctgggagtttcttcttcctcttcagtggagtcacatgctcttcctcagcttcatctttagaattcaagggctcctgagcatattgtttggcccttgcacctcctttcaacttaggttcacgctttagttgaatcatctcattctccagatgagcttgttcagtccggccagaaccaaatttcctcttcttccccgccacggacgtaggagtaaagtcctcaggatagagcccgtacctcacaaagttatccttggaggtcaactagataatattctggtcttctgccggcagctgggcaagtttttgagctctatcnntaagagcaagagtgaggggaggatggtgatatctcagaatctgctggaaccaagtctgggtaatgcccgcgtccttcaccatgaagtactcatcagcaaaacgccctatgttgctgatggccttgtcgttcgtgctgttcaaccacttcaagcctggtcgagagaaatagaagtaccccaacctaccttgcttggggtggacttcatatcaaagacctaggtaactttgtgaggagaaggagtaccccactcttgggaagcgtagaggacgaagagggtagacagatacttgatgcccttagtttaatttggaaattag

SEQ ID NO: 105335 - DNA, 905 bp, Cannabis sativa
gtctgggaagttgttgtcaagtgcaggcaaggaaattcttttaaagactgtggttcaagctctccctacttatgctatgagtgtctttctcatcccacttggtacttgtgacgaaattgagaagctaatggctcgtttctggtggaaaacaactagtagtcagggcaatggaatcatttggatgaattgggaccgtctttctcgtccaaaagatgaaggtggcttaggctttcgtcttctccatgattttaacttggctatgttagctaaacaaggttggaggttgttgtgctacccggattcccttgtctccaggctctataaagcccgctattttcctcatgatgactatctctctgcggggttggggcgtaatcctagtttcgtttggcgaagcatctggagttctatggatcttcttcgccaaggggttaaaagaactatcggtactggctcttctactagtatcctgcatcacccttggctccctgactctggtaatccttacatcacttcttctcatattggtcttattggtcacactgttagctcattgttttctattgatgaaagaagttgggataccgatttggttcgagatatgtttaatgacagggatgctaatctaattttaagcatccctctaagcttctctgcttcttctgacttctggtcttggtctaatgaaagctctggtcatttctctgtcaaaagtgcttatcgtatcctccaagcttcttaagaccccagaactggtagcaacaattcaggtttttggcaaaacctttggtaactaaaaatctcaccgaaggttcgtaatttcctttggcgtgctgcatcagggagtttgccgacctgtgtaaatcttagaaccaagcatgttgatgttccacctgtctgccctg

SEQ ID NO: 105336 - DNA, 870 bp, Cannabis sativa
tgggccaaattgggatggaccatatgaaatcgaggatgaaattggctccgcgacctacaagctaaaaagaatggatggaaccatggtgccaagggcctggaacgctgattatctccggaagtattacgaatagtcaaaaaatgtaaacttaggctttgttaagagaatttgtaccgaaaagtatatgcaacctctaaatatatgaataaagttgagtgcctcaaaaacaatgttttcatgccactcaggggggtagtaaggcataccacacgaacaaatgtaaaacaggccaaaagtaaaagcaaaatcaagcagaatatgtatctaagcgaaatatatatttaaatgtaaatataaaagatgtcttgacccaaaagcaggtcctaaaaaaatattgagggtcaggggacgggccttaaaaactgtctccccttaaaagataataattaaattgtctgaaaaaaagggaaaagagactgtaaatgtaaagataaaaagaaaaataattgtagtggtgaactggttgaactggtcggcttaatcaatacagggtggaagacgaggccccctgcgctcctcaagcatggcgtcaagcctcttcttcttctcccaaaaacgaacaagagcttcctcaggtttgggataaaagtcaagcttgatgttctggccatttgactgccaggccatgtaaacgacatcgccgaagcgcttgacgcagtgcttacagacaacgggggtcaggagctcatcttttttggcctttttcaaggcttgctccttaaagtccctcagctccttcacctccacggtcaggttggccgtcgacagcaagtccgcctggtgcagctcctccaaggattttaacttagc

SEQ ID NO: 105337 - DNA, 762 bp, Cannabis sativa
  modified_base (27)..(35): a, c, t, g, unknown or other
  modified_base (375)..(375): a, c, t, g, unknown or other
atgtacgctaaacatgtaaatacatannnnnnnnnttatactaatcttacctcgatttcgaattcaggtgtgttggtcaacctaatggaacaatctgcccggcgaattacaggctcctaaatgacatcaatcacaacactggtaagcgatactctaaatcacttcccgtggacttaaacttgaaattaaaagtttccctatcgatgaataacatggcaataccctaaataacacaaaaatggaaaaaactggggttcccacatttgccccaactagtagaccgattccccaactgaaatttcggttctgggaggaaatcctggaagccaaccagaattccgcttcctacaagcctctctgaaccggaattccggntcagtgcaggaaacaccaaaaaatccatatctcaaccaaatcaactccaaaccaattcaaactttccagacccgctaattagacaccaatgaacatttctaaagcaacaaaataaagcttcatacacaaatacaaaaaccaccattgatgagccaagcttgagttcaaaaactcaaagcttgctcatcaaactaattagcccttaaaacctacttaaatcactttaaataaacataatataactacagaaaacataatctaatgacagcggcaagaacagcaagctaaacaacctttcaccattaaaaccaaagtttgagtttaaaacaccaaacttgaataaaatcaactaacaaccactaaaacctgttctaatccattcatctg

SEQ ID NO: 105338 - DNA, 644 bp, Cannabis sativa
  modified_base (46)..(47): a, c, t, g, unknown or other
aggattagaacaaaggacttagacccaaaattgaatccaaactcanntcggtattggaacttgggactcggaccgaaccaagaccaagacccacaaggggaacccacacccgaagcctgatttggacctaggcaaaaatccggacccgaacccaaactcataccagtactcgaactccgagccgaactcaaacccaaactcgaactcaaaatcgcaaatggaactagaaccgaactaggactagaaccaggacctaaaccaaaacctgaacccagatcaaaacccagagagagacctaaacccgaaccgagactaggacaagaacctgaacctataccgggacgcaaacccacacaataactgggacctggacccataatcaggataaggacctaggaaacggaactaggatccggagcttgtacccgacccagacccgaacttgaacctaggacccagttcgtgacccggcaccagaaatggaagaagattaggacccgatattgggattcgaatctggacccagggcttggacaaaacccatattcggtgtctggattttggacccagcccaggactcgaaccgtgacaaggacctgaacccgtacccggacctgaacccagtcccaaacccaaaagtggac

SEQ ID NO: 105339 - DNA, 533 bp, Cannabis sativa
  modified_base (417)..(429): a, c, t, g, unknown or other
taaaaaattattctagatgccgaaacaggtagaaggtgcatcaataaatctcttttaagaaggtgcattgtagaaccacaaatataggaatttttaatctgtacaagtttttttgtaatttttttccttgttatattcttaaaaaaatatacctataaaataaaaataaaatatattttaaatattaagacaaaaaaaattaaaaataaaaattatatgaaattttatttcaaaaaatcatacgtgatttaaaaaaaatatgaaaataaaataaaactaactattgatattaaatgaaaataatgtaaaaaaataaaaaaaaatattaaaagtgagttttaaaaattatggcgtgcacttataatgacaaattttttcataataatattattcaaatcaataataataataataatnnnnnnnnnnnnnataataataataataataaagattctcttgatacacaccctcttatttgaagataagttgaggatttttttttttttattcattaatcaaaaatatctttatat

SEQ ID NO: 105340 - DNA, 707 bp, Cannabis sativa
tgagaaagaagataactttttggagaaaagacaacttcaacacctagaaaatagcatagaaaatccaaatccttcatctcaaactgagaagctaattcagactttaacactctaattccttgtaaatcatctcctctaataatcatatcatcgacatacaaagaaagcagaatacgacctataaatgtaaactttacaaataaagttgaatcatgatcacttgagacaaaataatagtagagaacttctaaaaccatgctcaggtggcctgttgaagaccatgcaaggctttttttagcttgcaaacccctccttgcttatgaggaacattaggaggaggaaccatgtatacctcctcatgtaagtcaccattcagaaagggattcttaacatccatttgagatatagtccattggcaaaaacggatgccactactataagagtgcgaatagtagttatttttgcaacaggagcaaaagtttcctcaaagtccatactaggagtgtacgtcggtcggtttggtcagtttacgttacattttattcaacccaacgtaaagatcgggttacaaaaactaagtgcaatcgtccaattaagaaaaaaaaaatttcaacccacccaatgaattggtcggtttggtctggttaacccgcctaaaccgagcactactgtttttttttttccagattcaattgttatattttagt

SEQ ID NO: 105341 - DNA, 606 bp, Cannabis sativa
tgatgtgtgtgggcactactctgagagaagaagaaaagagaagagagggtggcagcttggttcaggtttttctctaagagaaaatatacttttcaatattaatcaatatactaattgtattacgtataacgtactatgcagtacaatatacttttcatacctttaatccaggttcatacattactaccaaccgaagtgaaaaaatatccccgataatctcggccctatgtcacaacaacggtaaaccaataattgtttatcccaaaacattgcttaatattcacataagacaatctggggttttctaccaagctccacggtttaaatacactaatataaaacttatattttgtctctaaaacatacaccatattgtagagctcgttgcaagcttcgaaatggtatatagaatgtccaaaaaagacacccgagtcaacaattatgacaaaaatacgatttctgatctcctagaaatttctaaaaactattaaacacgaagatctcaattttcgcattcatcgaacatactattaaaacttatccaaatcaccccgaactgcacaaggcacatatatgccataaatattaccatccttacgtaacaga

SEQ ID NO: 105342 - DNA, 1136 bp, Cannabis sativa
tgtaagactgtgaagaatctaaactgtgaagaatctaaaaaacaaggagttttgggctcagatcttggtgatactctgctttagaaaggataccagggtcagagatttgagcgaaaggagtcatttaattttgctgtaaccaatgtaaggcttctcataccttttatgtatttattttatattgttttagaggttcatattttggtgttaaaaacatacttgttagtaaatctagatcctggtagaacatattccaacaaagaactgtatagcaagaaacgaatcgaaaagagctcctatagggatcgcgtactgggcaatagctaaggcatagttctttacaggttccaagcattagacaaaacgctaggcaatcgtaccaagtgaacttgccaaaccgtgtcagcatacaagctgaatatccgcaaagtgcaagtgtcaagtgtaataacttggatgaattttgagtcttacgctcaacattcgactataatagactcaccattaaagtcagagtttctaagggaaccaacgtatgaaaataatgttatatatgcttacagggccatgatagattcttaccgaagtcaaaagaggacaaaaaacaagctacccactttgaaccaagacctaggcaagccttggttcccaagccttgaaagggtcggccagggtctcatgactcagccaagaactaggtagggtcaccatacctaggcatgaattggctagctttatagggtgaaaccctagagcaagccaactcccatggttaagtactagggccagccaggtctcaagcaagacctctcaggccagggaaggttagttttgaacccaaatgtgtgttttttctttcaaagcttaaatatgtgcctcgtattctttatggctcatagagtccagaatcacaataagactaaaatcaaatctttttcatgaaaatatcataaatcatacattccaaaactatcgtgaggatcaatataccaaggagattacaaactaacatgagaatcaaaaagtttccaaaagctttaaaagcttgaaacttggtaatagcaagtaccgagaagggatatccaagaagagaagatgagacgtatatgtatataaatatatatattgagagagag

SEQ ID NO: 105343 - DNA, 969 bp, Cannabis sativa
  modified_base (908)..(915): a, c, t, g, unknown or other
atagcctatatgaccaagacgtagctaccatagatatgtttcgtcttcattattgatctttttctttttgtggtttctaggtttagctaccttaaacacttcgttattaagggaaaatggttcatctggtctaagaacataaagcccttgttccatagatgcaacacaagtttgaatgtcatttcgagaaatgatagaaccagaactcgaaaaattcaatttgtactgttgcaactgtaaacatgaaacaaaaatcaagtttctactgaaatttggaataaacaaaacattgtctaaattcaaaattctgttctaaaacttgagttttgtttttcctctagctctaaccgataccatttcgttaccaactttaaatttcaactctctggattttaaataattctagttttcaagcaattacaatgaacaacaaacatggttagtagacatagaattaacaatccatatggatttgtcattctctaaaacagatgactcaaaaaaacaaggcattaccattgttcttagtgttgagaagtctgggacaatttgattgaaaaggtcccttctatttataattagaacattaaataatatgtctgcttaactattcttagattgttcttattgctggttcattctgttgtgaaagataatctaaggaagtggaatcactttctctatttttctcaactaagcctgaagtagcaggattgttggaggaatcattctcaataactcagctttctgtttgcccttatctacattactagagaaggatctccatgcaagtgacaatgtctgttcataagcacgcaattcagcgtccagcttgtctatgtcggacaagttctagttgttaacaacaaattacttaaactcgggtgataagctgttgagaacaaaannnnnnnnttgctctctagataaaacaattcccagcagagctgccttctggaatttcatgtt

SEQ ID NO: 105344 - DNA, 1745 bp, Cannabis sativa
  modified_base (692)..(694): a, c, t, g, unknown or other
  modified_base (782)..(790): a, c, t, g, unknown or other
  modified_base (1002)..(1013): a, c, t, g, unknown or other
atatatataattaatatggttgtggttgtggtcttttgatgaaaaaagtttagttacagtaaagggttcatagaatagtccaagtgaatcctagtcccagaatacaaaactcatattctatacattaacatacagtttggatccattgacagaaaattgatattgataacttgtgaaagtcatactgtattgtccaatgtattctaggaaactgaatagaaatttctatttggaatttaaaatttaaagtcaaagagttaaatttataccaaatatatttttagtaattattatttcttggaccaccactactaatataactctaagtctaatttgcctaaagttaacatatacaagtaggagatttctaagatcgatgattatatcattttggcatagaatgtcgggaatatagtcatctgcgccattcaatttcatagaagaaattagaatgacatcataagcaaatgatttacaaactattcatccaatgatatactatttaagcaaattctaaatgaaaaagctaagaggaaaattagaggataatttcgaatagaataagaatccaacgatatcctgttttggcaagagtcaaagttattcttattttatgaatctcttcattgtttcatattgtaaatactaaatactagactaagttgtcatctttggatgtacaactagatgtnnnatttacaaatacttatctattgagatctaacactattatgtttgtctaacggacgacaatcctttgggatttgtcccattaaaaacannnnnnnnngttagaccaacaatgaagatttaaaatttatactacaacattaaaaacagaaaacaacatggtttaatataagttcatacacattcaaaaattatcaagcattaaaataacaaatacatgtgaaaatacaaaacaaacacatcttaaataatttctaaggtttccaacaaactgatgcagtgtcccatttaggcgagagtcaaagatatcannnnnnnnnnnnagtagtcaactcatctaaaatggagaccattctagcaatcttttattcgatcaagactagaatccagcgttgtcccgtttaggctagctcatagaattacccaatctcatagagtaagggctaaggctagctcaactctccataaatgaaaaacagtgtcaaaaagtactttatgcctttcggagtgatttgagttggacacaacctgaagaagttggctatgtcccaaaagtaagggtgcagggccagcactactccttgctcaatgtgatgacctgacctagccatccacttaaacaccacgcgataagctaactggtcccttatgggcctatcggatcgaattcctcccactagtcctcctgccttgatctcatcaagtttcttggtggatagagaagacggaggagatatccattgttatagctggttcccgttctcaaggacccatgggttagaagcctcctccaaaacatggtctatctcgacctcacacagacaaccaagactattcaaggctgcccaacctcatcgtaagaatctaaagggttatttgaaaatatggtacaagtcttgtactgcctccctgtgacacaacctctttgacttcagatccactatctgtcccagtcaaagcttcctcatcctggctagccataggctgccaaggcacaggtttttcaacctggtcatcccttggctcaacaagctgagtttattcagcctcctcaa

SEQ ID NO: 105345 - DNA, 743 bp, Cannabis sativa
acatatgtggatagatatgtagtaaatgtgttgtgtataatttgattatacatgactggaccgatatataataatatctttcactaacatgtcatttaccatgaaggagttattcatatcacaatgataatcattagtagatcagtctaaatcgtgagtatacatgaactcctatttgtatttattgagtttttttattcactcgttaaagtttctcaaagaagatgattcttataacttctattttgggagctatgagtggctggaaatatgtaatacaataatataatccaagctttcctaacggttcgaatattagttcctttatagtgttaattttgggagtgctaacagttggatccaaatctataataagttatagattaattgttcacattgaattaatgctacataagaaatcaagagataattaaaaaagtaaatcaataattttaactaactctaattatgaactaataattagagggtgaactacttatattgattacatcaatagactacaagtaagaattttgttaatataattctatattgtcaaatagtgcaatttcatatttatactggggtaataatagaattaataaactagatcattctattgataagaaatgccttctggcagcagtttgttggtcaatttagggggcccgggataatctcatttggaacagtaaaccctatgaggcttgagaacattgttgcttctgtaaaagagtaccttg

SEQ ID NO: 105346 - DNA, 583 bp, Cannabis sativa
  modified_base (189)..(197): a, c, t, g, unknown or other
ctaacatactcctaatcttataattttaattaataaatatattttgaaaataacaaatttgaaaaagatatgatatggttagaaaaattttgaaatttaaacgagattattttcaaaaaataatattttaataccaaaattagatcattcatatttaataaaaaaatgtaatatctgatcttataattnnnnnnnnnaaaataatctaaaatttcaaaatcaactataaggctctttttgtgagaaaatcaaattttcaaaatttaaagtctactaatatctaaagctaattttaattaattaaagaaaaattaataaaattaattttattctgacaattagatttttaattgaaaattaagattctacacaaaattctaccaaaatttgacttttttttttttttcaatgaaaaaggattttttaatcaaaaaatatgaagaaaacaagtttggtgcataggggtatgcattggtatgcaatgcatacccctgcgcgcacggaagtgtgcatctgaccgagacaggaggctacgtgcagcctccagggctgagaaacatcggcgtgagtgggggcaagcttc

SEQ ID NO: 105347 - DNA, 2072 bp, Cannabis sativa
  modified_base (2008)..(2032): a, c, t, g, unknown or other
aagatgaaggatgtccaagcctcacatgcctcaatgaacattatttgagacatacaaagtatgggaattacaactgagtttgatttctggtttggcaccaaatgaggaatgagatgtttgagaagtgaaggccaataaattgagttgagtggaatcgaatttgtaaaggcctttgtcaagcttcctaagcattaaagtcttctgtaaaacctggtctttgacaacacaaaagggtgaaattcaaagaaggcattgttgtctaaagtaaactgagaaacttgagtaaaattttagttatagaggcacataaagtaattgattgagaacaagatgctgagactcatatggagaaagaaaagaggaatgatcaatgttactaatatgtaaacctactctattgccaatatgtatttgttggtctctaagaaattcagaacttgtggtcaaactctgagcattggggtgagatgatttgtggcacctggatcagggtactaattgggatcaagaacactttctggtgcagcaaagtatgcctgcatttcagcaatgttagcactaacattattagagaaattttgattagattcaggtccaagaaagctcttatcaaactgatattaacactgttgaattgtgtgatcaactttgtgacaaagttggcattgaatcttttgatcccagacaacgaatagacccatttactagagagaccgcctctgaaattgccataggaaccacgaaaggaggcaaggtcacttctgaagtagccatatgcaaaggaagaaccatactgaggagtggagggaaaacctagtggaccatttgttgcagacaaattgtttccaaagttagttcgaggtcgaaacccaacagatgaagatccacaccctggaaaagatttggtatgatctagatttgcttcattcttggttatatctagctcccttccagccttgccaatatagacctcctaagccattagtaaaccttcaatctctataactgtgtaagcatctgttctggtattgatagatgtgatgaatacattatattcactggttagtccataaagatttcctctatgtgatcttgagtagaggtttagtgtcatattgaggctaaactgtcgattaggcttttgatcttgagcagatagtcattgagagggttgtattgcaaagtaaggttttgtaatgaccaatattagctcgattcagagtagtgtagtgttctctcaagatagtccagatttgtgcagcactaagagctcattcaaacatggaaaaaagtaaccatgacacaagaacattgtcttgttgctctcaatcttcaaaatctggattaagacgatttactctttgatcttcatctgtaaggaactgctgaggcacactatttggataaagagatttctggagatgactcctttttattattgcaataacttgctgtttccatggtagtttgtttcatccaaatgaacagactaagaataagaaaaagctatacaagattggtttcaggaagatgatgagctcctagttgttgaaataaagtggtaggattcaaagaaccacaaatgatatgttgaggcaagatccatagaaaaaatgatgatgctctgataccatgtaaggatattagattcaaagaatgagaagaaatgaaagaataatagaagaagagaaactgtttgtattattgaattgaaaagagtgttataattttatatacaatgctcaataacagaaagagaacaacaaaatcccaagagtgttataactttatgtacaatgctcaataataagaaagagaataacaaaatcccaattggtattagattgacctaggtcaaattctctctcatcgattcttgacgaaatatcctcttctttctctgcaatgacagcacctccaaaaaacccttgcctaaatactcagcctaatcctgattcaaacctagctccagtcctagtcatcccaacaaacactacaagaaatgtcnnnnnnnnnnnnnnnnnnnnnnnnnggcaaaagttggtattgcgttggtaaaatagaatttactt

SEQ ID NO: 105348 - DNA, 565 bp, Cannabis sativa
aatggaacaaatccctaatggattgtcatccataaaacaaacatgctaatgttagatctcgatagataaatattgtaaatgcaacttctagctatttatcatttgaggagaccttagactagtatttacaatatgaaagaagaagattgtataaataagaataactctgactcttgctaatcggagcatcgttggattcttatttaaattcgatattatccttattcctcttagcttattcattttgaattagctcaataatatatcattggatgaatgggttaaaaatcatacaatgtcattctaaatctcgtcataaattgaatgacgcatatgattatattcccatattctatcctgcaatgatataaatcctctatcttagaaatctcctacttatatatgcttactttaggaaaattagacttagagttagattagtagtggtggtcaaagctagaatcaaaactcattgtatatttggtttaagtctttaactttaaattttagaatccaaatacaaattttttatttctatttccagaatacaatacagttaaacttt

SEQ ID NO: 105349 - DNA, 515 bp, Cannabis sativa
  modified_base (430)..(430): a, c, t, g, unknown or other
gaatggggcaactccaatgtgatttatataatctttgaagtagtctcgaagaggaagcgtggcccctgcattgatatgctcaaggctttaggcatccatactagtcgaaccactagtactagtctcaccactagtccccgggttgctgtttgtaaagcgcatagggcgggtaacaactgaactcaccctcccgtactgatctaacttggcatgattgcccaagtttgattctgtaggtcttcagcatctcgcccgtgtagcatgagatagaccgcaccttcgattctatcaactcaacctcgaaggtgacattggggtcctgaggagtctttgatgtacgtggcttgggaggtaatgagtgggagatctaaaaacaacctacatatcgcctcaccttagtatgaacctagtgttggaattattttaccangatctatttactatcatgtatgttggattaacaacctaatatgaattgtaaaacaatgaaaataaacacatataaagttagaaaa

SEQ ID NO: 105350 - DNA, 747 bp, Cannabis sativa
tagtaaaatatttatcctagtgtatttttgttgttttctaaatttctaatggtgaatttgttcatattaaatcataaagagacatggtgaattttggtaattaaaatcacacaaaaggtataaatattgtgttgtctacaccgtatggaggtatttttataaataaagtgtcaatttatattttctatgtaataattctttttttgatttgtttctttttactagctattaaaatagtattattatatattttaagtatatatgagactacacaggttattacactatttttttttataggttttgacaccttttaaaagcttttgtgccttttatagtttttgcgccatttattatggcttgtccttacttgtttagagtaattgtgtggtatggtcaatgggcaagagaattgatctattttgtactcataatttctacttcaacgattttttataacagataagtatttcaaatctttataagtcttctttatattttatatttatatttaatatggattgtttattgttttaccatttaccatcgaccatcgttctttcacattatcttttttcattatattgtgtggtaatagaaattctttttgttattttgtaggttattttgtggagggcctataattatagagaatttaccgataagtttaattttaaatataatctatttgatattgattttcagcagttttaaattgaggtgctagtatgttgttactagccaaag

SEQ ID NO: 105351 - DNA, 540 bp, Cannabis sativa
cgatacaaccaagttaactatattgccctgatgtatactaataattctaaaccataaagaaacgtgactctcaaatggtccaacgtcgtgtcccacggctaccgaacacacatagaaaaaaaaaataagaaaatcacatatagcataattaatacattctgaatttaaataaatctccacaaacatgtaaatcataattaataaatcaatatcataattaaccctaattatttaataatccaatatattgaacttaagcggtctttccaattatcctccagttaaaaagatttcatcctcaaaatctaacctgaatagctctagatgttgtcctcatatcagactccagctcccaagtggcttcttccactttgttattcctccaaagtaccataaacaatggtatggttttattccgaagggctttctcttttttatccaagattttcactggttgttcatcataagaaaactctggttgtaactccaatgcttcataactcaagacatgcattagatcagatacgtattttctcaaca

SEQ ID NO: 105352 - DNA, 690 bp, Cannabis sativa
taataataataataaggatttattcctctattaaattgtgcctcctaaatattttaggacatttaaaattctcttcaaattattgaaattggagggcacaatttgatagatgttacaatttaagagataatttggtacatgttaaaatttaaggggtaatttggtaaatgttaaaatttaaggggtaatttggtagatgtcaaagtttaggatacgatttgatacatagacaatcgccatgttaagcgtctgctaataaaattgaacgaatttgataaaaatccttaaatctaataataaaaattagttgtcaaaaaattttaatatacatgggaaaaatatgctaattaaccttaaaaaaaagggggtaaaatctaggagtgctgaggaggtgatagcgcctctcataaagtatagtatatatatacgttgtgaaaattcggttttgaccgagtaaaaatgttttacgcacatatagtaataaataataataataataataataataataaatatataatataataaataaataaataaataaacaaatatatataatataaataacttttttctccatcactggtatatgagcactctctctctttctctttctctctcttcaagcttcaaagaagccataaccaccatcaccaccgctctccgacgacccatctctggccaccgccc

SEQ ID NO: 105353 - DNA, 517 bp, Cannabis sativa
tataggtccatgtcagcaggtcaccatcaggttgcccttccaaacgtttgaaaagtcaaaaagtgaacttagcctagtcagcaattatcaaccattagattaagcatttagtttctgatattgaaaatattaagttttaatataaaataaaaataaatgtaatgtatctgaaccctccatgtgtccatatttatgagttaacggaagtggtagtaacggtgtaagagaattataacattaggtatttttgcctccaaaaataaatattatgtatttaagtgtaaaaaatctgaaacattaagtatttatgccgcaatttactctttttttatccacgatttcattttacattgagatgaattaaattaattagtttatccttaatttttttctttaagttctttgcttgaaaagtagtttttggagttttcttttaaaaaaaatatgtagttaaatgttattaaatataaaatacattagtagtatgttgttgctatagttgtactgcatatgtgtc

SEQ ID NO: 105354 - DNA, 5145 bp, Cannabis sativa
  modified_base (54)..(62): a, c, t, g, unknown or other
  modified_base (147)..(159): a, c, t, g, unknown or other
  modified_base (954)..(967): a, c, t, g, unknown or other
  modified_base (1323)..(1330): a, c, t, g, unknown or other
  modified_base (2498)..(2500): a, c, t, g, unknown or other
  modified_base (2626)..(2633): a, c, t, g, unknown or other
tgttttcgtgttattttttggaaaaccgtaaaaaatgtaaaaaaacattctttnnnnnnnnnaatgtaaatattttacaaaaaaaggtacattatgtaattattccaacttttaatggcatactttctctcttctctctctctctcnnnnnnnnnnnnnttttgaaacaaagattgcaactttattaatgcaaatcagctattaaaatagcttccaaaccagtagggacaaaccccctacgggaaagacggtcaggacatgaaccagaagaacgagctaaccaattagccgcttggttcccagaccgtttaacaaactgaactgaaatatgaaacatcgaaagagattgtataagactaatacaatatgacataattaaaccaagaggagaaagaatttgcctactattattaatagcattcaccaacactagacaatcagtctccaaacgcaccccagcagggacccaaccttcaaccgaaccaccatcaccccaagtttgtttaaggcaacttaaagcttcctctttctcttttttgttaactttaaatataaatttttgattttgtcgttacccgattgaccctagaaaaatactattataatctacttttcaatgtgaatatttcaaaatgtgggaaacatatatatatatatatatatattttgttatttccataaaaaaaaaaactatttaattttgattagttactgttttataatttttttttaaatcttcttttattattcatttaaaaattctgttaattaaattatattatactatacaataactaattaatttttataataacaaaagatacataaaataattggtatgtaaaaatggtaatttattatattacacgacaactcattagttttgaaaataatttttaaagttacctaaatatattttaaattataagctactataatataacttaaaaatannnnnnnnnnnnnnaagatgtatacaaataagttttggaggtaaccaaaatgcatatcaaattatatgatacaaaaataaatttttttatataaaggtaactaattggttctttataaacactattagtaactaaaaagttacttttaaaaatgcaggaaaaaaaaaacaaaaaacgttagatttatttgatgtggtacgtcaataatagtatagtaataatactattataaattaggtacaaatattataatcagggccggctctaggcatagccaggttaggcccgtgcttaagactcactcattttaggggcctaaataaaaaaaaaaatacattttacaatatatacatatttttttaataatttnnnnnnnnaccatttatctttatagtaaaggtaatttttttttttttttttttgcctataactcatttcaactcaagacagaccgtgattataaactcccttaagtaaaatataacaagaagagttaagtacttgctagcttcacctaatttagtaaaaataacatgtgaggataacacattagataattatagtctattgatattcgttttaaaaagaaaaatactattgagatgcaatttagaataaaacttggggctttatgttatccaaacaacatgtggaatgttgatttatttatttattttgtattgctttacatattttaattaaattaaactttaacctgaaattattccgaaaaaatatatcatagaaaaaatcactaataataatggtgtcttatagaagtgaaaaaaaaaaacattttctttttgcttgaatagaagtgagaatttcatttaaaaaaagaagtcttttacttttaatattagtcattagagaacagctagttaggaggacttcctgtctactgaatgttttccccttttatttttgtttttactttcttaatttgtttgcatttgacaattatgtatgtagtttaactaaggacataatttttcaaaaatcctggaaaagcttgataattattctcttcttcctttattcggtcaaaacaaaattttaggcttcatcccataaaaatggcttcggcccaaacgcactaggccactgctgaataagattatgaaggcccaaactagagggttctattataatatatattgatcacagaaataacatcaaaaatctaaaaataatattagtgtgaaaactaatttcaaacttaaaaacaatttaataaaaagaaatttaaataaaaaaatatataataacatcatagagtaatcctattatatatgctttaaaattaccaatttcaaacctgtgaatcctataaaattaatttcgaccatatgaaaaattacaacaaagcacaaataataaataatgaagttacctaaaactaatttcatcagtcaacctaaaagaaaaaactgacacataataacactttaattaggataaataccatattggatcttgtgttttgcaaaaattaccaattggaccttctattttgttaaataacaaaatagaccctgtattttnnnaaattgtacaaatagaactctgaactgttttttttgtcaaaataaaacttaataataatcgatctagagatgttatgacaaaactggttatatttatagtatgtgttcgtgttagaaattgtcttnnnnnnnnttatattaaaaaataaaatttttgaaaattgagctcaaggtcctatgtttactattttggaaaatatagggtttattttgtcatttaacaaaataaaggatgcaattggtaacttttgtaaaacacaagatccaaaataatatttacccaattaattaaaacaatataaatatttttatcatgaaatttagagttatgaaactcacacttaaattgataatttacaaacaaggcactacaaacaataatttgtcaaaaattttgccacaaagtcacctcaattggatgacttttctggctaataaattagtcagagatttttggtggggtttcgagaaaaagaatcatgatctacatctaaaagcttgggataaactctgccttcctaagtctttgggtagattaggctttaggaaaacagaagaaatgaatcgggctttcctggccaagtgggggtaaaacatgttgaaaggctgttaattgttatgctgtaaaatattggaagccaagtatctaaaagggaaagattttctcagttgtaactacaaagactcggactcctagttttggaaaaatgttgtgaaagctaaagaaattttgaggaaaggagcctgtaaagtggtggctaatggaagggagactagtatttggagggatccatggattcctcactatattcggttttgtcccaaaaccgaatggcgttggctcgaccaataataactgtgtggctgatctcttgagttctaatggcgactgggatgtcacaaagctaaacaccctttttgaccaagaaactgtatctgcaattgtgaaaggtggcaaacctcgggccaaggagaagatagatgggtttggaccttggaaaataatgggtaattcacgtgcaaatcggcttacgtgtcacaagctttggaaagagcccctcactgtgaggttgctccggcgctctggaataagttatggaatagcaaaattttggagcggcataaaattctttggtggtgcatcctctctaatgcgctacctgttagaaccgtgattggaaaaagatttcacatagaggatacaaattgtcctttctgtgggatgggggaggaatccatggaacatcttttcctctcttgtgatatggcgatgcatctttggtgtgcttcaccgtggggcatttatcctatctgtaacaatggaattcgagtttgggattgggtcaaatttatatggaatctcactaataggggtatccgagtagaagaagtctttctgtatgcttcgattgttgttcaaaaccatctggaggatgcgcaacgatttgatacataataactcacctccggatgtattgaccagatttgtacttcttatgcagagttacatgatgctttcttgccttgcccaactccaacctcgagggtgtcctggagtcctcctcctcaggattggataaaatttaactgtgatgttagggtgggccttgaaagcatgtgcacaacggtcgtagcaagaaatcatctgggtgatgtgattcgaattcacatggctcggttgaaatttttggatgtgttatgtggagaagcagtggatttttgtttagctgtttcggtggctctagagttaggctttaagtttattttggtggagagtgactcgaggatagttatcaatgctctcaatgggacagaggcacattgggcgcttgagaactatgtctccttttgtattaagtccgctccctcttttaattgctgtaattttatgtatatcagtagaacttataattttgttgcccataatatggctaattggtcttttacccacaagttgtacagatgtattctggtctcatctattccggaagatctcttatgtaatgactgggaggtctaatgttatttaatcgaatgcatgaacacgcttatcacgcttatttccaaaaaaaaaaaaaaaaattggttgataaaacataaccaatgatctctcaaataaggagtcatgtaacgtaatatatctgagaaaaaaataattaagtagataaattagtttattttaaattaaaaaataaaaaaaaaatgttaattaggatttttctccgttgaattttaacatgtatcaaatcatgcgccttgaactttttaagccgttaaaaaatcccccgaactattgaaattgttagatttaaggacttctgtctaatttcattcaattttactaatatgacgattgtccatatactaaatcatgtcccttgaactttgatatctagtaaatcatgcccttcaatctttcaaaagtataaaattgtgccccccaaaagtataaaatcaggggaaatttttaacgtcctaaaatgttcagggagcatgatttagtacatatcaaagttcagaggccaaaaatccaaattagccttaaaaaaatgataagcctggagaaggactagaggctagaaatgagtttctaacaaagacgatcatgaaaataacaattcgtttccacatatccaagcaccctt

SEQ ID NO: 105355 - DNA, 838 bp, Cannabis sativa
  modified_base (50)..(58): a, c, t, g, unknown or other
  modified_base (264)..(281): a, c, t, g, unknown or other
  modified_base (570)..(586): a, c, t, g, unknown or other
  modified_base (692)..(707): a, c, t, g, unknown or other
atgaaatattctagatagtgatttatagtaactaatttatattttctaannnnnnnnnaagtagaaaaatatatttaagttgcaaattaatattaatcaatttcagaccaacttaaattagaatatttttcttataacatagaatttaaatagaattaataattaagttgattttatttaagatacttaattatttctattttaatgaatttaattatatagaaaattatatttaagttggaaatttttcaatttcagatcaannnnnnnnnnnnnnnnnntcagaatatattttattttatttaaataatcattttcccacgtaattttgaattgcatttgtttattttaaatgcaaatatttcgaaatttttcaattttgaaaattagagtaagttggaaattaattttagatctacttaaatcaagtaatttttattaatgatttatttaaaataaatagaataaaatatattatattttaattagaaaatcaataattagtttattaattatctagatagatattttctaggtaaactttttgatatttttctagatatatttaannnnnnnnnnnnnnnnntatttaagttgattttatttaagacacttaaagatttgaaatttttcttaagagatttaattaaattgaaaaattatatttatgttgaaaattaatttatttaatnnnnnnnnnnnnnnnnttagaataatttttctagttttattttatttaatgtaattttcaaaaatgtatttcttaatacattggattttgaaattcagttgtatatttatagaaaattaaatttgagttgaaaattaatttaattaa

SEQ ID NO: 105356 - DNA, 605 bp, Cannabis sativa
ggaccagaacccagacgaagaaccattccctaacccaaacgtagacctgggacccaaaattagaacctgaacaagaatcgccgaaccaggaccctagaataagactacgaccgtgatctggactcggacccagacctagaaccgaacacagacctagcctcagaccaaaattgagactggaactcaggcctggacacggtcgtgaacccagaccgcaatagagacccgaacctggacctaaatctggtacctatcccaaacaaaaacctggacttagacaaagatccagactgggatcgaaatgctagacctcgatctggaccgagatcttgaccgagacccaaacttggacccgctctcgggacccgaacttggacattgacccgaacttagacccagatcggggtctaagcctggacacaaacccagacacagactcggacacgaactcaaacccacacctggaatcagacccaatgctagaccctgaccaaaactcgaacccatagcaagatcagaacaaaggacttagaccaagaactgaatccagactcagatcgggattggaacttgggactatgagccaacctagagcaagacccagg

SEQ ID NO: 105357 - DNA, 551 bp, Cannabis sativa
ctttcagatgagcgatttatcggatagccagcagcccggctcaggaggccacgcatttgacagtgagtcggaccaggaaagagacagttttctcccaacggacatttttgaaatggaggctgcgcaaatagaattaggttcgatgtcttctgtagacatcgagaggatggtacaagaactcgctgaacctgggacaattgatatccgggacagcgagtccacagtgtcggcacgcgactatcttatatatacgaggcatgctcctgacatcgaggtcgaggagatggacgaggaatggacgactccagcccgcgagtcaggttgggaagaggaggaagcagaagggagtgggacagattcggtcgacgactcccaactgaacgagcccttcgcgtgcgaggatttaatctcgatggttgccaaatcagactttaccacctttgtaaggttgaatttttttgcgactcgcgtttcaacgtcctaaaccatctcagagagcgcaccttctattcactaaccctgcgatcattcccacagaggatgtggtaatc

SEQ ID NO: 105358 - DNA, 1210 bp, Cannabis sativa
  modified_base (193)..(199): a, c, t, g, unknown or other
ggacttatacccttcttgggccacagggaccccgcatgacctcctctagggtggccaagcgtacttttcctttccttgaagacttggaaccggatgcggaagtggacatcttttggttttgagaaagattgaaaaaatccagctgttaggccccaaacccaaccccaattcaaaaagggaatgggggtccccnnnnnnntggaaagaggccccctccggacacttgccaaaaaagaaagccccaaaaggttttccttgacaagaatcgggtgcaagaaatccccacaggtagtgacgtttgcaaaaaaagtaaaaagaaaaagaaaagaggggtcaaaccgaaaaggcaaggtttactctaaaccctaaagtggtcattacatggaatgaggacgatgccccagcaaaaacatgaaagttaatctaaacggcaaaaaaggaggattttaatgcatcatacagaaactcacacaaaactattcccagaagttcaacatccaacccagaaacagtaaagcatgctatgtaaacaaacagtaagcaagtgtacaagatacgaagaacttacatgaagtttgagggctgcgagttggtgttgatcgccggtaaaacgtagactagcagtgtcgaaggaataagagcagcaaatcaatggtgtttgaagtttcttttctctctggaaaactttgaggaattttggtgaaatcctaaaagtaaccaaatgaagttagaaggctggcttttataggccagaacaggtgtaagacagctgtgatcagccaccatcgtatggtcaggatggcaatcgattctaattttacagatccaacagttggattaaattgtcatcaaggaggtagaaaacatttgagtgcccgtctgacacccatttaatgcgccgtatcaattaatggacaagaaacgaatcgacgcctgcaaaaagcaaataactacagtaatgatggtcattaatatatccccacgcgcccaaagcacgtgccgggaagctgataaggtaaccggaggtagctaagcaagccttgttcacttcatcaccaaacaaggcttggggggtaaatgttgcccccgattttgcctaaaatacgtggaccaatcggatgatgacacgtagataaaaagggttgagagtgtaaatatttcagctaagtcttcttaggcgcacggatcaaccttagacatgcctcccgga

SEQ ID NO: 105359 - DNA, 669 bp, Cannabis sativa
ttttttgtaaatttctatgttaactttaactagatatcctattaattaacaaaatattctttaattttataatattattatatatatttcaaaataaaaattgtatagatattttatataaagaagttttaatttcaatttaaaatacttaaaatgttatagatattttttaatcatatttttaaatttattagtttgactttcaattaaaataaataaaaaaaaatatatgtaaatattttatataaagaaatttaaattcaaaatattataaatatatttaaccatatttttaactttattattattatttattttatattttaaattgaaatggttctactaaggaattgattacttttcatttaattagttttatgtttttcgtaaagtttaggaatataaaatttttatatcaaatttacgaatccaatctatatataaacgcactcaaatttgattatgtgagttttggttaagaatataataaattacaatatatgcattatcagatacattacctaattaagaaaattttaaaaattttaaaaatacgtatatataatcatatccaaatgacattctaatatagcaatagctaaattttttttcttaaagatcaaaatctcaaaccccatttaaaaattaaaaaaaatacattacctaatt

SEQ ID NO: 105360 - DNA, 555 bp, Cannabis sativa
  modified_base (36)..(55): a, c, t, g, unknown or other
tatcagcacagctccgattttgtcaaatcttcaaannnnnnnnnnnnnnnnnnnnaaaatccaaattgagttctgtacatagtagcgatttctgttgccattgaataataaaatttaactaaggtttcaaatttgtaaaaaaaagtaaaattaaggagatatcgccaccaaaacaaaagatcaagatcaaattgattccaaaaaaaaaaaaaataggagttaagtgtctaaaaattaaaagaaatatttgtgacggaattcttttaatattatgattgttacacaccacaattaaaaaaaataataataataaaaccctctttcattattattttgttgcagttttgacttttgggttgttaaatactacataattctattaagtgctaattagagtacacatggcgatacattagtttatcatatgttaaactagaaaataaaatcgctcagcatgatttaaatatatatatttaatatcatatttatttgattaattataattttttaaaatatatatttatatataaaaaaaaaacatataatgaaagtgag

SEQ ID NO: 105361 - DNA, 600 bp, Cannabis sativa
actacccatagagaaaagggtctgtctaatatccacagcatcaggtacgattaccagatccgtttggtcctcaagagaaaggggattcgggaccaggccattcaagctctctaaaggaccaagcactgggtttttaaaaatgctccccaagtaaatcaagaattcttttccaatatccgacctgccagtcaaccacatcccatcattatttaggattttctcaattgcatttctcctattctttatggtggccgtagtgaagaagaatttcgaacacttatcaccatcctcgatccaagacacccgggatctttgctgccagtacacagctctttgtctcaaggcttcgttaagagactctcgagctttcatctcttcagccaaagccctagttcccgccggccgaccttgaattaggttcaggtgtcgttcaagctgagtaattcgagaatctaatttcccaaactggttcctgctccaattactaagcgccattcgagtagctcccacctttttgaaaattcttgccgatggccgactatgagagagagagccccaggcactctccacaacaagcgtactacgggaatccctcgtcca

SEQ ID NO: 105362 - DNA, 521 bp, Cannabis sativa
aacccaaaacaccgtctttttcatttcgactgctgcccagtttccatcatctggccattccttaattattaacagcttcccattaatgatccacggccttctgagaagaatttctacgcaatcctcttcaaggtcaaagaaaattccccacagcccaggtttaagggttttaaatcgccactggcccttgaccctctgtttccatatattacctaagatttcttttagcttcgtcctcgagagtccattgccgtcaaagaaactcaccaataccccagttcttattaactcaccattaatttcaaagtccggctccaaatcaagagccatagactggaaaaaagtgtttctgagcttctccagttcttcatcactgccctcttgagggggcttttggaccatctcacagtcctcagaggcttcatctcctctctcttcctgagaaacctgatgcacctcatcgttttgagactcctcccgccttccttcattatgaatctctggggaagtagtaaatgccc

SEQ ID NO: 105363 - DNA, 614 bp, Cannabis sativa
cgaatggctcaattagaagatcctaaaatgtttaagattcgagaagatttcttagcaggcaaagctaaggacttttcaatctctgacagtggaatgctgctgtttaaagcacgagtgtgtgtccctaataataccgagcttaagaaagagattctggatgaagctcatactaccccttactcattgcatccaggaaccaccaagatgtatcaagatttaaagccctatttctggtggtatgggatgaaaagggatgttgtagactatgtcactaaatgcttaacctgccaacaaattaaaacagaacatcagcgaccagcaggattacttcaaccgctagcgcttccagaatggaagtgggaagacattgcaatggattttgtggttggtttgcccagaaccacaggaatgtacgactcagtttgggtcgtggtggatcgttttacaaagtcagcacatttcttgcctgttaaggtaacctatacagtagattagtatgctgatctgtttgtgaaggaggttgttcgcctccatggggtaccaaagtctatcgtttcagatagagaccctaaatttacctcgaagttctgggtgagtttgtagaaggccatggg

SEQ ID NO: 105364 - DNA, 885 bp, Cannabis sativa
  modified_base (213)..(223): a, c, t, g, unknown or other
ttgtaatgagaacttttccaacaatatatcgaaatatttttttttcaattttgttttcaaaactgtattcattatagttacagtatcattcctgtaaatttttgaaaaattccaaatagttacagtaccgaaaacagagttcctgatattctagtttaattaccacatgtcttcaaaaaacttcaaacgtattttcggcactgtaaactattnnnnnnnnnnnaaaaatttacagggatgatattgtaagcataacgaataccgccgtgaaaaaaaattgaaaaaaatattcctacgtgtattttcgggcgtggaggttgactaaaaaattgtaacaagaggttaacggtagcactcctcatctttaaattataaagaaaaagttataaaattaaactttcaacaattgaaataaatcttaattaatttatatatatattttaacttaataaatagtgtttagctaaatatagaaataattattcattagacttaacctattaatattattttcttaacttttttatatatgtgtaatattatatgttttatttttataatatgactaaaatatattaaaaatataatattcaaataatacaaaaaaaaaaaataaaaaaaaaattgatgtgtggtgtgatgtaaaaatttgagtaaaataaataaggtagagttttagtaagttagtttaaagaatagagtagagaagttgttgagagtgctattaccactcctaatagatgctctaaacttgtatttctttaatagagaagaaaaataatacaaatttccatatataaaaaaaaaatcatgacatataacaaatgctctattttacgtaaatttttagagcaatgaacaatattatttattgtggacattgtc

SEQ ID NO: 105365 - DNA, 1265 bp, Cannabis sativa
ttatttatatttttttttttttaaaaaaaaatatgtgaaaaatgtatttttataatttttattagataatttattatatttggtcattttcttaattttttaaaaatgaaacatttactaatttagtttttaaatttaaggtcattttgcatctcaactcatttaaattcctactttaatgaatattatcattaagtagagtgtgacgttaattgaattttatatattttttataggtagaatttacttcactcacttgattattcaaggatctaagaaatttcaatgagataaattttttattataattcatttttaaaaaattattatatcattaacttatatatgtcataaattctaaattacttattttaacatcttaagaaattactaattttatctatctttggtgattttgcaaaagctcttgctttattggtaggattaagatgggctcaaggtactttttttttccaaacattaaagatttattatctggttttcctaaagcatctctctcttatgttagtcgtaattgtatgttgcaatgagttttcttggatgaaagaaaccactcttctttatggttgttttctttgtcctgatcaattgaagtgatcataataaaaaaataataaaaataaataaatgcttagaccgtttatggtaaattaataattcttcatttgaaaaagtttagtaaataacagtttaatcgtctccacaatagatcaagatcatataatatgagcaatatactacatcaagtaacagtataaatatatcattactctcactgatctttcatgtagtattgactaacgataatgttttaaaccttgaaactaatattttgagctcgtttgaaacgtagtattagattatattgtattgtattatatagaatcggattatatatcaaatttttatataatactatgttgaactttaatttatactaaaacattaaatatttagatgtccataaaagttaatattagttctgcggttccgcattatcatattcagtgagaaagagataaaatgttgtttcaaaggagtttgatccaatttgttaactaaggcatgttgttttcactcattgtagaaaaagctattgcaatacttgacaatccatttagctgtgcttattattgctggcaaaattattgaaggtcattgcaacaaaaaattatcagtttctagctttacctcaattaatattattatttgttttttaagctattttgcaagggtctttctca

SEQ ID NO: 105366 - DNA, 502 bp, Cannabis sativa
gttcgtgttagtagcatgattatcaatgtcaatgttcatatttgaaaggttctcaaattttgtttgttaatggtgtagatatggccaacttgggttcaggattagattaagtcccagaggcagagtgtccaacagtaatacctacacgagggcctactcaaatgaatgaaatatccaagctaatggatcaaggcaaaagagtggccctcgaggttaatgacaaagatcaatactgcggcaaaagctacaccaagctcgtatcaactttaggagtcagatgccgtcagacgataggattgtcgtataaaaattgtaaagaagtcaaccctactctgaaaaataaagtttggacagatatccaagtaagcggttatttgtgcgaattttgatttgtttattgttaattcaaatgttaactctaaccgtgtttgttttccttcaaactagacgtgtttcattgtgccggattccttcaaacatgattgtctcatccttgctggga

SEQ ID NO: 105367 - DNA, 603 bp, Cannabis sativa
aggcctcgatatcgacatgggagacctttgtcgacttattcctcacacactttcaggccacgatgacttataggcctccctatacaactctggtcaccatcaaacaagaacccggtgagtctttgcaagactattttaaaagatttaatgcagaagtaacaaaagtcgagaaggctcccgagtcttcgcttgtttgtatgttgataacaggtgttttgccgagaatcgatttttggaaggagttacaagctcgaagaccagaatcactagtcgaattcttcgctatggccgaacctcataagagaattgataattctctagcagagttggaaaaaggcaaggataagcgtaaatcaccagtgctgcgatcaaggtcttgcagtccccgagggaaaaactccagaggtcaaagcccaagaagacgcagcccacggagacaacgaagtctgaagttggccaaatctcctctaaagaaggagtcctcgccgaaaaggaaaggtggactgcgtttcgttaactataccgatctcgcggtgccacgagaccacatctatgcaattgaggaaaggaataaagtcttcaagaagccgccccctatcaggg

SEQ ID NO: 105368 - DNA, 755 bp, Cannabis sativa
  modified_base (726)..(727): a, c, t, g, unknown or other
gggtccttttcatgttactagtattgaaggttaccgatatttcttaactattgttgatgatttttctcgctatacttgggtatacatgctcacttctaaatttgatctttctttcattattcctcgattttttctctcattgccactcaattttcagtcaacattgaagttgttcattgtgacaatgataaagagctaaatttaatagccttctacgctaccaagggaattttaatcaataatgcttgtgttggctatcctgaacaaaattctgtcattgagcgaaaacatcaacacatataaaatgttggtagagcattattacttcaatctcacttatccttaccttatttgagtcatgtcattaatactgttgtttatcttataaatcgtactccatctaaattacttaacaaaaaaacttcctttgaaatactttataactaagctcccacctacgatcacctcaaagtctttggttgtcttgtctttgcttcattattagaaaccaaatggcacaagttctccacgagatctcaaccttaaatattcgtaggttatccctcttgtatgaaagcttataatcttttatatattgaaactcaagaaatcattcaatctagagatgtttactttcctgaagatattttccacattccgaaactacatctcccacatctataaatgaattattctcacattatttgtgtaaagcccgcttagttnntttggaaattagcagttgtttatgatta

SEQ ID NO: 105369 - DNA, 2630 bp, Cannabis sativa
ttaaccagatgagcattttcattaattccgaagataaatttaagacgaataataatttttgttaattactattacaaagtataatggtaatttttgtttttcaatgattattaatacattgaatattattaattttaaaattatgatattaaaaaaaaaattaaaataaaattaatatacgtgacttgacacgtaaatttatctagtatatatatatgtatgtgtatatattaatttaatataaggaaaaaattattcactagaaaactgttaataattttttgttttattattattattattattattattatcgaacttaattataaagttcatcatttaagtggtagtgcttccattaaaaaaagtgttaataatttatgtgggaaaattacgattaaatgtacagaatcaaaatgtcaatactttaaacagtcaaacgattagcaatgacaaattatcaaaccgaaaataataatcggataaaaataggcaaacagagtaatgaaaaccaaaaaacaataaatgtaagaaataaagaaatcaacaccaagatatatactggttcaagtccaatagatcgatgtgatctatggctctactccagttttgaaataccaccgaaatctttctttattgattgagcaagaataggtacaatacagtcgagacgagattctctgttgagtcctcactaagtgtttcaactctcacacttacacctaagaatcttcttcatctacaaaatattcttctacaaaacccaaacccaatctctctcttttctctgcacctctctctctacctctcaatcttttttctctcaaactctcaatctcttctctctgagttcttaatctcgtatctccgatctcttcctaaaatgataagtgaatgtggtatttttaggcttaggatcaagatcctaaagtcggtggctgcaagaaacaaggttgttaagttagttagaaataactaacttaaccaactcctctttgaacgaagtctccactgcagcttcaagaatcagagcctcctgagtcgactatccagaactaccattccaggaggaataactagccaactagaactccatcctggagtgaggctagctaggctagctatctaaaagattggacccggagtggacatgatagtcatccaggaactctcttctagactcgactatcattccacaagactccttcccaaaaggacaagttagttgactgggaacaaagtccgagagacacctaacttttttaggaccactttccaggagtgatagtggagacttttttatttggaggaactataccacaaattctacctagttacttcaaattaaaagaatgacgatgatgaagaaagaatgcaaccatcattggttggtgttctaagaatctcagtatactaacttctaagattgattaagatcaagcactgcttgaatttgtttaaggttaagaccttagtcccaacatcaacaggattatcttcagtaccgaccttctctaaatcaatcaaaccttcttctatcttctctctaatccagtagagtcttacatctatatgcttgctcttttcatgataaacccaattcttacaaagatagatgaatgactggctattcgaatacacaatcacttatcctttaatttgtttcaactcacaaagaatttcttgaaggcataaagcttccttgaatgcttttgtagtcgccatgaaatcttctttcttggtggaaagagcaaccacggactgtaactaagccttccaacttatacaattctggtttgtcaagaaaacgtaagaagtggttgattttctggtatctctattcgaggcatagtctgcatccacaaatcctttcaattttaattctccttttgctttctcataggtaagaccataattccaagtgcccttcaaatatctcaataactatttaagggatttctaatgttccatgcctagattggacatgaccggcttaggatgcttaaagcgtgagctatgtcaggtctcttgctcaccattacgtacattaaacatccaagaaccactgcattaggtacattcttcatctcttctttctctttcgtactattaagacattgttcctttgacaaaatgaactatccccctaacagaactgatgtactctttgcatcttccatgttgaacttctgaataattttcttgatgtacctagactacttcaagctaatagtcctttccatccagttacccgagacttcgatacccagtatcttttgaacaggtccaaacttcttcatctcaaattctttcttgagcttggctttaatacttttgatcactcatttatctttgctaatgatgagcaaatcacccacatagagaaatatgaacacggctgtagattgctctagattcttgaaatacaggcagtaattgtatgcgaataatttgaacccgatttgatgcatatacgtatcgaatcttttattccattatcttgggaactgtttcaaaccatacagagatctattaagtttgcacactgattcaactcctttccctaccacctctataatacccgaaattaagaaatggattagcaaaaccctaactagataattatgtat

SEQ ID NO: 105370 - DNA, 567 bp, Cannabis sativa
cctaaattgtcttatgtgaatataagcagtgttttgggataaacacttatttgtttatcgttgttgtgacatagggccgagaccatcgaggatagttctcacttgggttggccgaaatgtatgaacctggattaaaataagaaaagtatattgtattgcatagtacgttgtatgtaataaaattagtattgttatgaattgattaatattgagatatagttaatatttttatataatgaaaagactaattggttgagtaatgataatgtgataatattatgcatgtgatgtatgagctcacctgattaggtgatgcaattttcctggcgatgtactggcgtaagtacgggtgtcagtgatatatgatgagtatcgagtgtaggtacgactcacctgattagatgatgcgattttcctggtgacgtactgggcataagtaagggtgtcagtgatatatgatgagtaccgagtgtaggtacgtgctcacctgattaggtgatccaatttttcttacgacgtactgggcgtaagtacgtgcgtcagtgatatatgatgagtaccgagtgt

SEQ ID NO: 105371 - DNA, 691 bp, Cannabis sativa
tagatttttatccgatggcgaataatacaagagaaatttgaatttctacgcttaaattagctatttaattaaagaaaatatcaaaaaatacatctttttacactatatcaaaaataagtttatatgaaaaatatttaaataaaattcaatatttttttatcatttttttgctgatttttttttattattattttcttttctgccgatgtaacaacctcaactcatatactgaaaaaatgagagatttttctaattaaagagaaaaattaagcataaaaactcaactttttttaatattatctattcatgggtaatacccattaagagtgcacatatatatatctttatctttatatattaaaagtggctatgtaacgacaattctttgtttaaggtattttttatttttattctgttaactttaacggaggctaaccttctgttaactcttgttattcaatttagacgcacggtagattcctctttcttctccctcaaactctcaaaatcaaaactattttatgcgatattcatgatcctcatttgttgcgattatttctttccttttttcaaaacctatattgccgttgcgatttttttcttcttataaaaaaaaacttataaaaacaaaaaaaacacagaggtgcgaaaaagaagaatattgtggaataagttggaaatggctcttctc

SEQ ID NO: 105372 - DNA, 582 bp, Cannabis sativa
  modified_base (342)..(356): a, c, t, g, unknown or other
tttaccgtaacttatcgaagaagaaaatggatcgctaaatccaatcacattggtccctcgagcatcagtaggaccactaatatcattggtctctctagcattattgggacatgtactttcagtggttcctctagcattactggttttgcctggacgactactactagtaccaggtgtttggcgattttctctacggagcattcttttccgtgtcggtggcctcagtggtatttggtacgatagtggagtcaagttcaaagctacagcagcagggacctctgtaccttggtcgtctcttacgtcatcattgccctcaacataacatttagggtctggaccatnnnnnnnnnnnnnnntgaagggcatttgtgctacaatattagcacttagcattatagtgtttaattcaggtaatacatcgacaaccaacacctctggatttgtttctagaacaaaactcccaacctagctacgattgcccttaatagaacttagtgtgggactaggatcgacgcaaacattcttctttaacaaagtcacaaataagggagtaaatttatctggctttttcgcaagtgtaga

SEQ ID NO: 105373 - DNA, 600 bp, Cannabis sativa
gattaatattgagatataattaatggtgttatgtaattaaaagattgattggttgagtatcgataatgtgatgatattatgcatgtgaggtacgggctcacctgattaggtaatgcaattttcctggcaacgtactgggcgtaagtatgggcatcaatgatatataatgagtactgagcgtaggtacaggctcacctgattaggtgatgcgatttttcttgggacgtactgggcgtaagtacgggtgtcagtgatatataatgagtaccgagcgtaggtacgggctcacctgataaggtgatgcgattactcctggcgacgtgtagatacgacgttagtgatatgaaaaatcaccaggtaatggcatagaatgaaaccgttgtagggtttcctcctagggacatgtagatatgggcatcagtgacatatgataagtaccgggtgtaggtacgagttcgtttgattaggcgattactcctggcgacgtgtagatacggcgttactgatatgaaaattgtcaggttatggcataaaatgaaaccgttgtagggtttcctcctggcgacgtgtagatacggacgtcagtgacatatgataagt

SEQ ID NO: 105374 - DNA, 576 bp, Cannabis sativa
ttttactgtggagcagatttttttcaaaaaatactgtgcaagttttatactgtgtactgtgtaaagtttttactgttgtttcacggttattttttagttgttctactattgttttaattgttctgttttgttgttttacggttgctttataaaaaggcattatttttgtaaaagattccatgtaccagtaaaattgtaaacttttgcctaaaatctaatattttggtaaaaatccctttaaaattccttattttcgtgtatttctaaaataattctttatatattggattatttacaccacatactgaaatttctaattttttttatttttttaccatggtgcagaatttttttcaaaaatacagtgtaagttttatactatgtactatgttaaacttttactgttgttctactattgttttttagttttccactattatttttagttgttctattatctgtttcactgtagttatataaaaacatagtatttttaaaaaaatttagtgtgataatatttttgtaaaaattaacctaaattctattatttttataaatttccttatatatttggag

SEQ ID NO: 105375 - DNA, 699 bp, Cannabis sativa
cagtatctgctgcccctgctatgccggccgaactagttgttgcagtgaatcggatggaacccctgtatgaaaggttccgtgagccggcacctccagttttcctgggaggtcccgatgttatgaaagtcgagcaatggctaactatgatcaccaggatcttgaactttatgggcgtcactggtaatgatagggtggcttgtgccattttttagtttaaagaagacgctctggtctggtgggacatggtgtccatgattcatggcgtttccacaatgacctgggataaattctaggagctgtttaatgccaagtattataacgaggcagtcagaagtgccaaaagaaaggagttcactcaattgacccagaaagaaaacatgagtgttactgagtacacaacgcaatttgaccgtttggtgaggttggcctcggggattgtgccaactgacttcaataagaaagagaagtatatggatgggttaaatgcgaagatcagacatgacttgatgattactaactgacgaaaagaaccacctctaaaatggtggataaggcactgcgagttgagggcacagtgggatgcatagcagagtcacgttggactccagttcttggcggggctcctaccccttctgcatcaggctttagcaggggaggtagtggctcggccactgatcagaaaagaaaggcatctactgc

SEQ ID NO: 105376 - DNA, 783 bp, Cannabis sativa
ataccaattaaaattctgtattttaatattcccagttttattatttaattaaatacttaattaaatgcagaataattaatgaagctggttctaaaacagtttttttgtagttacagaagacaactctgtaactccagaagaaaccagaaaaacaaacagtgcagaaaagtaaaaacacacaaggtttttgtatgtggtttcaacaatcctttcagattgttactagtttacggggccacgcctagagataaaattcattagatagatctcaaaaatacaaagtaattgacttgcataaatagactgtattccaccttctaattgaatcttgttgaaacttcaagtgctcgaactctcttcaatttccttgaagagtgcttgcttcctcccgaggtaagacttgaaaagaaatctcccgaaagctttgtaaaagcttctcctaaaggtagcactgttgttcttcttctttgcaggcttgaatacagactcaagacaatacaaaatacaaatgaacgagttgaacaagctcttcacttcaaaacaaagactctcttttctaaagatatgagtgaaaatcaaagatacaaaagaggtacatgacctagctgctataaggtgtatttataatcactatacaccttattgacagctcatacacggcctgaacaagaccacaatctactagaaaaatccccaaaatagaccttcaaacagcccaaaaatttccatttctgtacctacaaaatcgtgagcagtaactacgactttccttttatagaaaag

SEQ ID NO: 105377 - DNA, 520 bp, Cannabis sativa
atatccgtctagagttcccaggttgcctcttccactttactgtttctccataatacttttactagttcaatcgtcttgtttctcaagactttctcccttctgtctaatactcgcaccgtttgttcctcatatgataaatctggctgtagttccaatgcttcataactcaggatatgggacgaatctgagacatatttctgaagcattgaaacatggaacacatcatgtacagctgccagcgctgggggcataaccaacctgtacgctacttgccctatcctctcgaggatttcaaaaggtccaatgaacctcaggctaagcttccctttcttaccaaagcgtttaatgtctttcatcggcgatattaggagaaatatcatgtccccgatctgaaaatcaatatcccgacattttggatcagcataactcttctgtttggttttagccgcgagcattcgcgctctgattttatcaactgcctcacttgttctctgaacagcttcgggacccaagaactttc

SEQ ID NO: 105378 - DNA, 806 bp, Cannabis sativa
  modified_base (230)..(231): a, c, t, g, unknown or other
atgaaaaaaaattatatgtataatgaaatgtttaattttgttctaaattgcatattgaaaaaaaattatatatatcaatggaatatacatttgatcttttaagttttgaaatataattgtattatatgtattagacttttaaattattattttctttacattttaattatatataattttttaattttttttttataaatatgtgtagattgaattggatcggttacttnnacatgtcaatcaacatccaatccacacaaccaatctaacccgcacaagtgtgcggatatctgcactttgcagatttcattggattggatcgtgcaaattggattggatcgattattttatgaacacccctaaaagtaacaaggttaaataatcagtgaagaattttcttttatttataaaaatttattatctattctaagaacatgtagagaatagatacctaagagaactaaccaataaaaatttaatatcagaaaagaaaatatcaaaactaaaagttttgacttccaacacactaataaaaattgtaacatattgattttatgtattggtctttatttatttattggtatttttctagaagtatatatactttaatcataggaaataaagagtatggttgttgaaaatttatagaaagactaactatactagacaacactcgaagtgatattattattgatacaatgaaatatcgaattcaacatgatttaatataaattatataataatttttttcgttagattgatttaatatataaaaattctaccgttaacaatttttaagatgtcat

SEQ ID NO: 105379 - DNA, 1249 bp, Cannabis sativa
ataaattgtatgattaatgtttatagtctgtgagtagatgttagatttagggtcgaaaatagtcagattaatttgagttttgggcaaaaactagtttttttgttaggcccgatggtggtccgatagtggtttgatgccttcctgttgttaaaatgagtaaaggttgaagatgaacttccgatggtagcccgatgatatggtctgatgggatccgatggtggtctgatgttggcccgatgccttcctcacgagcttaatgaatggagcttaacatctataaatgtagatatggtctgatggtggtccgatggtcacctgatgctactttttatgtacaaaaatatataaaaaaaaaatagtagcagatatggtccgatggtggtctgatagtggttcgatggtcacctgatgctacttttttttatgtacaaaaacattaaaaaaaaaattggtagtagatatggtctgatggtagtctgatagtggtctgatggttacctgatgctactttttttatgtacaaaaatataaaaaaaaaataaaaaaaataggtagcatcgggccaccatcggaccactatcggacccccatcagacccgactgctttttgtgtattatttatttttggtccgatgtgatgtaaatggggagggtaatttggggataacattaaagttggcctagattacaaatatttgtaattataagtttagaggaaaaattttaaagttatgtaagcatatttagtcaaatttcccttttgtagctgctatagtgtaatcaaaatttaggggtgggcatcatcaatccaattcaattgaaccgaattgatctaatccaatccaattataaaaaattgaatattcaattacaactggattggacgctaaaagttagattctaattggatttgatcggttattgaatgtcaatctcaaaatccaattaaaaaccgatctaatccaattacatttatatatgttacaaaattatttatataataaaaaatattaaaaaatataatatacatttattatatttttattagatttttttgtatgttgaatttataacacttggttatattgtgtatttattttcataatgttttgttctattttattacttagaaaaattattttttaattatttaaaaattttgcctacattacacttgtaacgataatatgtttatgatgtattaaacttaaataaaatgtgataattagtttttaagtatttttttttc

SEQ ID NO: 105380 - DNA, 538 bp, Cannabis sativa
  modified_base (68)..(78): a, c, t, g, unknown or other
  modified_base (358)..(360): a, c, t, g, unknown or other
taacatacagtttttgaatccattgatagaagatggatattaattacttgtgaaagtgtaactgtatnnnnnnnnnnnaatagaaatataaaatctctatttagaatacaaaaattagagtcaaagacttaaatttataccaattatacatgagtaattcttcttttttggaccaccactactaatctaactttaagtttaatttgcctaaagtaagcatatacaagtaggagattttaagattgagaatttatatcatttcgggatagaatctcaggaatataatcaaatgcgccattcaatttcttaagagaaaatagaatgacattataggcaaatgatttataaaccattcatnnnatgatatattatttaagctaattccaaatgaataagctaagaggaataaagaataatttcaaatttaaaaaaagaatccaactgtgtctcgattagcgagagcaaagttattcttacttttataaacttcttgtttcatattgtaaatactggcctaaggtgtcatctattgatgaac

SEQ ID NO: 105381 - DNA, 631 bp, Cannabis sativa
  modified_base (302)..(313): a, c, t, g, unknown or other
tttaacttgttcagtgtaccaacctttctggcaaacattaacacatggtgttttcttctttaactcttactgcattattcagggttcacagaacaagaggtgtaatgaccgctttagtaatttaattagtaaaggcaattagcactaatttctgatatttttaaaattatttatgaatttatttatctgtgggtcccattattagaaatgggcattagagttataatttctcgattctagatattttattaaactctatgggtattatttgacttatatgtgaattatgttatttttgtaannnnnnnnnnnngacaacagaaaatgcgatggatggctagtttgatcacatgggtaagtctagaatcttatttcttagagggaaataaattagagaaaataaaatatcaagctaaggcggggttatggaatttgaccattttacccctagtcttaaaaatgcttaagttgtaagctaaggggaattttagtctttttgtttattggagggttaggtggctgcctagtcatgggacacctaagtaaatattcagcaaggttaattcaattaaccttagttttattttagggaaaatatagagaaattaagaaaagtcaagagagactcttt

SEQ ID NO: 105382 - DNA, 749 bp, Cannabis sativa
  modified_base (464)..(473): a, c, t, g, unknown or other
  modified_base (664)..(677): a, c, t, g, unknown or other
caatatgaaggtggggttgtaaatttctaactgtaacttttccaatgaaaaaaatagaaaaagtgtaacccaaccaataatttttgtcagtttggtcggattaactcatttaaaccgatctttatttttttatttttttttttcattattgttagtttttgatgttcaaataattaatttgaaaaaaataaatatacagtatatgtatttcaagattaaaaggattatagtttaaattaatattaaaaaataaatataaattgaataaatattaatattaaacaatatttttcaaaaaatagaataaaaaatatatactcatatgtaaattctaaatttcaaatttaatattcaaatacaatcaaaattatcaaatataaattctaaatttcaaattaaacactataaaatataaactttaaacgtaaaatagtttaactattaaacgtaatttacatattatnnnnnnnnnnattttagcaaaaaatatgtaaatctatttattcagtttattcaggttatttaggcacgttagaataatattcaacccgcccaatatatttattgagcagtttaaatttttcgaaaagttattcgggttgtgtatttttcggtttattcaatttggtttgggcgatttctgtgttaattccatttttggcannnnnnnnnnnnnnaaatattttattatttattgtatatttcggctggtatatattgatatggtttccctatttgtgtatatctaa

SEQ ID NO: 105383 - DNA, 505 bp, Cannabis sativa
  modified_base (217)..(232): a, c, t, g, unknown or other
tagtattttataaaaacacagtattttttaaaacttttccgtgttataatatttttgtaaaaattaacccaaattctaatgtttttgtaagttgcttattagtaatttttttccccaaactttaacatgtaccaaattataccttgaatttttttggccgttaaaaattttcccttaactattgagattgttagatttaaggatttttgtctaattnnnnnnnnnnnnnnnntaacatggatgaaagttcaagggcatggtttggtagatatgaaagtgtaaagattatggtttagtacataaataatcactgaaacattaaaattgaatgaaatgagaaaaaaatacttaaatctaacaatttcaataattcggaagaatttttaattcataaaaaaattcaaaaaatacgatttagtacatgtaaaaagtttttggaaaaaaaattagtaattagccttactgatactatactcaatgtcgcgggaaaattggcgttgactct

SEQ ID NO: 105384 - DNA, 4320 bp, Cannabis sativa
  modified_base (45)..(53): a, c, t, g, unknown or other
aaaggagagaaatttaaccattaattaaataattgttattcattnnnnnnnnncaatactaattgggcctaaataaaactatcttatgtgatattttattttagctaccaagtccatttaattaactaaacttaaatggacttctatatgcatctaagcccaaaagcaaacatataagctcacacaggtcaaatgatttggatgagccctatcatatttctaagtttatcatagatgaaagaaattacaaaaatttacctgttacaaattatttataaggtctattgacgattggacgataattaaaatcaaatcattagatttgtcaacaagttaattatagcaatttagatataataaatataggtttgtttaaaaaattgaataaataaataaacaaacataacaaacatgtaacagatatctggaaagtaggttacgatatttctatttaaaatatatcttaactagaaattaaaatttaagttgctagagaatatttaaaaatatttaaaatctaataaatctcctaaatatctaaaattctaactgaagatcaaatatccaactaatttttaaattttcagtttatttaaataatttaaattaattaaacattcaataatatagtatagtataatatttgaatttgaaaattgaaatatttctaatattatatttctaatcttataatttaataaaataaatttagcaaaaataaacaaaattgaaaataagattttttttttatcaaggaacaacttcattaatcaacaagcaactacaaacaaagccaagctgaaaaaaaccagctactaacgaaacaactaattacaaaataaatgctctataaatttcctctcatgcctattcaagctctctcttttagctattgttaatctatagaacatgattctttttaatatcatgtacaatgctagtggttgtgctcgagtaaccattgaaaatacaatcatttctgtttaaccacaatctataaatcatggcagccatgacaacaataaaaattctgcatattctgtttttgctgataaacaccaatcagattttccaagcttgatactctttcggccaagccccaactcccagccaagtctgcaccagatctgccaccttttgagagagtctacaatcaaagaaaagatgttgatttgattcagcaacttcaacacaaataggacactctgtgttgtccaataagacctgaaactgaagcattttatccattgttaacagctgagcatttacaacttgccacaagatgaatcgatgcttcgggacattaatcgaactccaaacactcttcctataaatgaaaggaacctggggtagtttactattatataataggtgcggtttaaacttacccgaggcccctgcattttgtatctccaagctgtcaaatttgtctctcacatggcaaagcttctgccaataccaacttgagtcaagctttagaacataggtccatattgaagtgttctttagatatatgttattgatccatttcacccaaagagaatcacttttttttttttgaaatggcctaaatatatttagcaagaacaacttgattccatttggcaccatctttgaaccccaacgcatcatagttcttcagaagacaaactttttcccaactagccacatgaagtttactcctatttccactccaaccccaaagaaaacctcgacagattttttcaatctccttcgttatactttgaaggagaataaagatgctcatccagtagttacagagatcaagtaatacagaatgaataagttgcgtttcttcctgcaaaggagagatgtctactagcccaactatggagtctttgcttgattttctttaggatcacatcacagtctttcgctctccattttgttggtctcaacgggactcccaagtatttcagcgagaacttgccttcagagaggtgttgatagctaggcccgaagtagcatagaattcattcatgatatccttcgaaaataagatatttgatggttaagatattatcaattttatctacatcggtgctcttctgataatatagtcatacatctcgtcacggtaactcttctaagaccatgtcatgtgttagttggtctaaaccaccatctaaggtggtgaaattcaactgtgatgaaaggtgaattctgagttgggtaagcccgaggttaggttgttgtttcgtgatgataatagtttcgtcctatagcttctggtacttggacttaaaatgattgtttctctcatgacgttgctttgggtatctatttcggggtcatgcttgcttgttgtcttgcctacaagagagtggtgttggaatctaactgtctaattgttatcaatgctattcttcatactaaaattgatcaatcttatcaacgttgtattgttagagatatccttttttattgtaatcattttattaatatttctttcttatattgtcctacaactgttaatactgtggctcactctttaactaagttagcattttctttgaatgatcattatgtttagcggtctgcttattcagattgtattgttgctattttgcacacaaattcttatgattaatattattatcactctttttttttcttcgagattttcctgacttggtttactcttgaggttttaaggagattatttttttttaaaataaaataaataaataaattaaatgcaaggatgaaatgaattgactcatcataaatataacataaatttgtaccaaataatgtacccaccttataagtagccgtaagggaaatctggtgatctgaacagaattggagattggagtagtgtgtttgtctaacttaaaccatgcaatctcatcagaaatggggtagctctacctcatcaatattattattaattctatatataccacccttaccaacatatcaacccaaacattacttgccctagtcctaattttctcgagaaaatcaaattttcacgagaaaatgatggaaaaaatttaagattcctctttctcatacataccacacgtgtgctttatatcaaatccatttctctacacacccgcacgagctgacatttcattggattctcttgatattattattattattattacatgcaataataataatattcacaactagctacttctgacaaacacatatacacatatacatgtaattatatatatatctataatataataagtacctgaattcaacatcttagtggttagctttttcctagaggatataatactaatctaaagaaattttcagtgaaaattctttttctatgtgtatatatcaataataataataataataataataataataataaaaagaagaagaaaatgaaaaaaggtaaagaatccaaagttttctctttgatagtaagacaaaacaatctttgaaatattttatgagatcattaatattgtagtaattactatagcaaatatatatatgggcataatattactattattattatactttgtttggattgacagaattggaatactatgaatttaagtgtacttttaaaaaagttgtcggtgtttaaatatatttcaaggataatatataagagagatctagattctagatagaacacatgactatataatattatatatatagcttaattgaaagtcaaattaatattatttataaagtgaaaaaattcttgaaatattattgcaaagctaccatttttgtggaaagagacattaatgatacttttcaaacctatatgaaaatgaaaattttagagtaaaatgataataaattaaattgattttattcaatatttatccaagtgataagattattaactaacaaaacttatgaaaattatctaaaatacataattaattaatagattttactttatatgataccttgagaaagacttgagtagagaagtcaatattaattttatgaaagggaaatttaattaagtttaatattaatgatccatcaataaatacctatctcaacgttcaaaactcaaaagtatacctaaaaggcatgcaaaaccttttacacctaattaataaaaaaaaatcaaaagaaagaaagttgttcatttaaaaaaaaaaaaaaaaaaacattttttcacttttctctattctattatggttgaccctaggattctttaacattaaaattatatcaaagaaaatttgaactaaaaagatataccatttgcaactgatgagctatagttcatacaaattcaaaataaagtcaatattgatcttactgcatggattttaattttaacacatt

SEQ ID NO: 105385 - DNA, 759 bp, Cannabis sativa
cgtagttacaaagtgcatttctaagacttaaacaaggtctcaaggatgagattacagcgagcactcccctaggatacacctaaagagctggaaacttcacaagggaagagactataaggcataagcgaaaatcttacaacaacactctccattctctcattaaatctgagaaagaaacattttcaaaaagcttagtcttgtacacccaagaagcagtccaaaatttaattttatcccatagggcctctgctgagttctccgaaccttcaaagattctattattacgttctaaccaaactacccatagaactgccatcactgccgttctccataaacatgtgcttcttttactgccccccgccttgctcactatcatttgagagaccacacagggcataacccattgggtgtcaaattcgttaaataggtttgtccaaagattacacgcaaggcgacacattaaaaacaaatgcgtcacgtcttccccacttgacttacaacaaacacaccaccccggtgacaagcacataaatgggcgctttttttgcaatctgtcatgtacgttcaatttatctagggacaccaaccacccgaacaccttaactttagaaggtcctctgcttttccataaagtctttgtccaaaacacctcaccagactgcatggacgacaaaaaccagtagaacgcagatttagaggaaaagatcccactgggatccggaatccactgacggttatcatcaaggatgttgagtactc

SEQ ID NO: 105386 - DNA, 523 bp, Cannabis sativa
cagttcccgaggctgcccgaaacgataaaccaattggccagaaccggttgaccggttccaaactggttgatcagtttttcaagggtaagaaatgtgatttttcaactttacgcactcaccgaaatgctaccgaacctgtccaaaccaccccaaacttcatagggcacatatataccatacatactaccatacttgcataatagaaattaaaattgagcccttaattggcaaatgccactaatatttagacttaagctataaaaaactctaaactcaatttttaacccaaaatcacctcaatttcagcaagaaaacatcagaactagccccatgactacccaataacaattctataaggtcagaactttcataactattctaattcacaaaacccttatacgaaactaattgttttaaacttaaaacaaaattaaaccttatcttaaattttcctataacccatttcaacttagggtcggccctgcataacatgtgtacactgtattcatatagatgtataggt

SEQ ID NO: 105387 - DNA, 699 bp, Cannabis sativa
accacctgcacaacttcaagcaatcaataaccagaatttcaactcgataactctaagaactaacttggatgcacaattcagaagtaagcaattcatttagacacaaaacatcgcattggacattcatatcacaaccattctacactctccgacatttcgctaacccatgttcaataagcttgagtgacatacctctctccactaatgttgacaactcttgctcagaatcaataggtttttttcggttataatagcatggcttaggtaaacaggttgatgagaagtcatttaagctctattataccataagcacaattataccaaacaagcacccacacttatccatttttcatcccaaagaagatagtaagagattgcatatttttttctatgtgcgtacctcattgttcacatttgattctcaagaagaaatcatcacatttactttttttttttcttttgtttgttttttttctcttttttttttttttttttacaatagaggcacatcaaataacaactattattttccaatctcttactttcaaaattattcccccacttacaacctttcccccccccccccaaacttgattagaagcttatggcataataaggtatgttgagaataaaaatagttaaagataacaaattcagcttagttaagtggtgaaatttttttgaaataggctaaggctc

SEQ ID NO: 105388 - DNA, 634 bp, Cannabis sativa
  modified_base (378)..(383): a, c, t, g, unknown or other
aattggggtccaaggggaaggtttataatttgagtgcatgggaccctaaggattgtttttgacgtaagaaaataaagctttaacgtcaaaaataaaagaatacgattttgactccattaaagacggtacaccgccaacgagggagacaaccccgatctgccaacttaggcctcttttcttgggttgagcttgattgttttgaggtcctaagcactgtgaatagattcccaaattgaaaagacgagtcaagagcaatcggggacaagttacattttgccggcgacaaaactgacgtgaatgccgccgaccacgttctgggctattctgaggatcttgttctcaacaaggaaacccattgaggtgctcgaggtagcaagnnnnnncttagcaactgaggtaagaagagtgggcatctgtgtacagggtgtatgtttatgcatacaactcggtttggtttgctatttaatttgattatgtgttgtgatgatttccttacacaattagcatcgttagcatgagaatagtgttagggtcttattgcttgtgtgagtataatacttgcaggttataactttatcatgggtgagtacaacttatggtaaatgattgccctattggatgccaagtgtgagaa

SEQ ID NO: 105389 - DNA, 3599 bp, Cannabis sativa
atgacaaaattggtgatggttatgcttactaatttaaaaccgatttagggtgtaaaataagttgttcagagcttgtgattgtatgtctgatgctccattgttgttcctgtttgcagtcctatggaataaaagttgggtatggtggaatccctggaccatcgggaggcagagatggagcctcttcccaagctggaggctgttgcagttaaagtttacgaagcggaaatctcatagattacgttaaaagacagtctgtttacctgtgtcattttcattctttatttctttcctttttctagtttcctgtctgaataacattgtgactgattttataatgcttctgcaaaaccgacaaagctgtacaattctctttgatgtgtctattctgtatttatttgattgtaaattcaacactcgttttattcgtacttagtattacttaaatggaagaatcaccactgcagcttgtgaatatacatggatagggagcgcctgtaagtgcaacctttgcattttctttgctgattttgggccttttaaacttaaataagtatgtcccaatcccaaaatagctaaataccaataatgttgaaaaagttgagttgtgtgtaatataattgccttaaaaggagtagtagtagtagtacttgtagtacttgccacttggctacttgctttccagctcaggtgaaggattatgtcctgaaatatctgtaatcacatgcatgtgttattgtgttgtgtggggtttcaatccagagctttagcgtttgagcattgagaatcagcaggaacaaacgacctttttcttaagaaacaaccttgacagtgagagagtgtgtgtgcactcttgtgatattaccatatctttattcccttttttgaataaaatattcctttgcatatttgattgaaccttcttctcttttggaatataaggaattgatacttgatatgctgactgagaatattgtgatgactgatgacatttaacagtattcatttgttttctaaaatatgatattattctaaatgagtttgtaaaatgtgatgagaataaaaataatttttttttaattttattttcaatatttttctcatttttattttatttattgtttgtctgagattggaaaatttataaatcagtttcatgaaggatcactaggttatgtaacacgcatgatatggattatgcttatgaaaccaaattgaagaggaggtattttttttttaatgttagaagaggaggtattttcaagaaccctaattttcccctcaaaaaagaaaataaaaatgaattacatgaatattttgtaaatggttattttatttaatagttagtaaaataatagtgtccacttttttttgtcatctattgggagacaaagatgagaaaggagaggaaaaggttttatatttccattacatagaaagtagaaaagattgttgttttttttacaactctatcagtattactacttggccatcaccattcacaactgtggtgtgttctattaataagtttctaaagtttggatctttgattcaaattcttaattatcaaatctcatgttctcaatccagaaaaggaaaaaaaaaagaataataccaaaagttgtaatctaaaacccatcattggattggatttgcttttgattggaggatatcttcttctattctaaagtaaaagcttcttattcattcttaatattaacaataataggtgtacttaatcgtatacttaagaagaaaatcactcatttcattactctttttatttttctttcttatttctttcatggcttccccaactggggttaacaacaacctaaatccaaacttgacctataatcagaatcagaaccagaaccagagccaccttcaaccaccaccgccactctttgatattcatcaactctttaaaccctcttccggttcgaacttccctattcccaatatcccttctctttctccagcttcttaccctccacccactggcgcctccactcacccatttcataacctccccaacctcaatatgccgcagcctcccagccccggacccatctcatacgccgccgccatagccactgctccctcacccgccgcttctccaccacctcctccttcttcttcttcttcttcttcccctaaccccaatattactagcggggctcgcttgatggctctattgaataacacccaaaaatctccctctggttctaatctcgatttgcctcctccgaccatgattccttttgattcttctccttcttcgtcgtcgtcggctgcagcagtgtccggtaacgctatggtggcgcctactactccgatgagaatgcccagcaggaaacttcccaagggacgccatttaatcggcgaccaagctatttatgatatcgatgtgagattgcagggtgaggtgcagcctcaattggaggtcactcccatcaccaagtacggttctgatcccacccttgtcgttggccgtcaaattgcggtgaatagatcttatatatgttatggactgaagcccggtgcgataagggttcttgatattaatactgctttgagagctttgcttcgaggccacactcaggttggttgattatgtctttgaatccacttgtgatcctttttttttttgttgacattttcgacggtttgattttaaaagggcagtttatgttgaccttcaattcttgattgatgtttgaatcacaactaaacaagtttagttcttgtaattgttgcaatgatctttgttaattttagtttctttttatgatttggtgagagttctcgagactgtagttgctttcgaacctgaagtggtggaagtactattagcaatgacaactatcagaatatgattactttgatctctctttctctccctcctcgtctgtttatctatttatgtatctgaagtatgtttactctgttttttattatcagagagttactgacatggctttctttgctgaggatgttcaccttttagccaggtagatctttgtctttctgttaccactttgcttttagaattagttttatttaagtcaactaactttctattgtcaccagtgtaagtgttgatggacgggttttcatatggaagattcatgaaggcccggatgaggatgacaagcctcaaattattgggaaaattgttgttgcaatccaaatagtaggactgggaaaagcagtccatccaaggctgtgttggcatcctcacaaacaagtaaattgtagtttgcaaattatattattctacttgagtttttactgcattgctggttgtggattttcgtttcttgctttattgtgatacactttaataaattaatcttttttacaggaaattttaattgtggcaattggaaattacatcctgaaagttgatttattgagagtcggaaaggggaaaacattttctgcagaggaaccacttcaatgtcctattgataaactggttgagggggtcttgttagttggtaagcatgatagtgaaattactgaattatctatgtgccaatggatgaccacccggttggcttcagcatcattggatggcacggttggtatttaccttc

SEQ ID NO: 105390 - DNA, 528 bp, Cannabis sativa
tttttagtattttaatttttttttctagtgtaattctatttagttctaacctctcaattagaatataatttacttagtctcaattatattcttatataaaaattttactgtctattgaaacttgaacgttatatttaggggtgtgcataaatcgatccaatccaataagaattgaccgccaaacattagatattcaattgtgaccagatcaaattggatgttatttttaaatatccaattgcatcatatcggatggtggatggggtgtccaaaaatccaatacatctaacatccaatcaaattaattagtatttttatttagtttagataagtaattgaattttatattattatacgtaaaatctctatatatataaaagttaatcacctaattctataatacactccttaaggggacgcaccaatatatttttatccgttttagtatctgaaataattttttccttatagtcatgtaaattatagttatttaagacatcttgcaaaaatttaagaaattcagaaaag

SEQ ID NO: 105391 - DNA, 927 bp, Cannabis sativa
  modified_base (184)..(192): a, c, t, g, unknown or other
aaaaaaacagaaaaaaaaatatattttttttattatttactatttttaattttaaaaaattattgtttaaagttaacattacgtagataactaaaaaatttctacgtgtacaagtgagtacacgtggacagtccaccgtgacccttaattgtgatttttggacggagatgtgcagagcaaaacnnnnnnnnngtttaggtagtttagccgctaaaaattcaggttttataattaagtgttacaaaccgtaaaattcaagtggtttagccgcaaatatctctaataaaaataataataaatgaaagattagagggtagggtacacgcaatattggtgagtggtagcattagcagcatgtactgtcctgttctgataatccatcagtggtacgtacatatacaaactgtgccaccaccacaccacatacccttatctatacactactttactacttcccttttgtccctcccattcactgggccccactctccctctctctttatctctctcttacatgtgttaatttgtgtataactatatggctacgtacgtactatccattatatatgatcatcatcaccacatcatacatactatactttctaaactacccctcacattttctggaaattgcaccattatgcccttaataattatgttatgtatgtgtgtcttggtacgttgtaattggagtagatatatatagggtaattgagagcacaaaaagtaattgtattctgacctactcataataatgtttagaatgaaacatttatggcatttatatatactccactcgattatataaaatctatatatactcatcatcatttgagaaacatgatttgtataatatatatagagtaatttgcggtaaaaccccattaactatcaatttacttacaaaaaatcatccaacctcatatt

SEQ ID NO: 105392 - DNA, 511 bp, Cannabis sativa
tagggagagcatctctctcatggtgtattatattagggagactatcctttgaaaaataaaattaaatcaagcagttgtttgctacatctacatgaaaaaataatcatgcgatcctaaataatcaagcagttgttcatggtgtattttcagtaatataaataatacaattttttaaaaattttaatagcgatcctaaataatttatagtgaatacgttcataaaaaaaaaatattaacaaaaatacttccagatttaaatatcaaaacaaatataaaatttactgaaacatcaattaaagcaatgtactgatagacttactttatattaatatagtataagaatatatattatctccagatccaattattaaagttgttttttttttaaaaaaaaaaaatagttcaaatttttttatatctactctttttttttatccattcagtagttataatataccattagtaaaacaaataaaattaaataatttataaatttctatctcaaattaat

SEQ ID NO: 105393 - DNA, 761 bp, Cannabis sativa
tcttaagtgaggatcattccccccactctatttatttttaagattgttacagcaacattacttctgaagattcttgtaaaatagtcttctactatttgtaatgctgtttgaactttaaagtcttaactataaatttgactagcttgcgatcaaaaacttcaacttgacatcattagatgctcttatatgtacaaagtaattaaataggtagcctcattagatgtggctaaagaaccagggaaaaacaaattagttcattaaaaatacataggcaatggtgtgaatcctaaaaccattgaatcttgttttagtaagtgttctaaagtaataactcctagttacacggtgagtaccaaaagtggacaagcattatgtggagggattgttatgttttaatgtgttacctagttataggcatgaaccttactaaacggtacatgggaatttattacacatttgtttcatgagggttattgcaactgcaagaacttaggtgatctaatcggtcaacaattttttctttgttttacaaggcatagggttaacttgggtcctattttgtatcatgtgtatttcatggccaaagggattctatcttttcacatatacgttgttttgcatgctcatcaactctgaagtcagaagtttcttatgtttggttgagagtaatgaacacactagaacgggattgagaataagaataagaacacgaatagaataaaatttaatatgttaaaaagtattgtgtcatggagtggact

SEQ ID NO: 105394 - DNA, 615 bp, Cannabis sativa
  modified_base (309)..(311): a, c, t, g, unknown or other
  modified_base (564)..(590): a, c, t, g, unknown or other
aatatctaatacaaaggctaaaaggtataagtggtgcttaagcatatggaggcgtttggttgggaggaatgaaaatataggaataagaatgagaatgggaatgagaataggaataagaatggaatggaataaaatttaaaatgcataaaaaatataattgataaaaaaatcattaaattttttttcttattacattagaatggtcattcctttctttttaaaatggaatagtcattctactaaaatggtggaaagagcattccattgaaatgccattccaatagtactttaaaatgcaaccaaacaaannnatggaatgaaaattgtttccttttcattccattccatttcattacttccaatcaaacgccacctaagtgttatattattattaatacgattagatatattgaattctttgacattattactgctcaatagcaatacttaaatttaaatataggctaattagaatttttgcctcctaaactttaacatgcatcaaatcgtgccccttaagtttttctgaccattaaaaattctccatgaactattgagattgtnnnnnnnnnnnnnnnnnnnnnnnnnnnattcaattttactatttcagtgatt

SEQ ID NO: 105395 - DNA, 904 bp, Cannabis sativa
tatatatatctttaaactttagctaagggtatcatttttatttatactttgataagaaagtacaaacaccaataacaaaataaaatgacaagtagccctaatgttgaaaccaagggaacacactataacagcagtgacaactttgaaaacaagataacaacttcataaagattgcactaatacacagtaattaatactaagcagaattaatcaactttctttacaccacccctcaatcgagagggtgagtgtttcacaccaagtttggaaactaaatagtgaaatctggaatgagaaagagacttagtcatgcagtctgcaaatggatttgttgaaagaatgtatctgacttttagagacttattcagaaccttgtctctaacaaagtgtatatctaactctatatgcttggtacgggtatggtacactggatttgaggccagggcactagcacttatattatcacaccaagtgacaggagctgtaggaacatggaacttaattttattgagcagggattcaacccaggatatttcagcactgacatgagcaagtgccctctattagaattctatgttggatcttgataccactacttatttttcggaggatcgggatataagggactatccaaggtaaacacagtagcatcctacagatcttctgtcatcgacattacttgcccaatctgcatcagaaaagccattgagatttagtctatcaccgcagcagagatggagtccttgagtaccagttcctttaaggtatcaacatagctgatatcaggtctggtgtgatttaagtattgcatggctccatgtaacaccccgatatttgccttactttacaaaaataccattttaaatgcataatttgaaaagaaaaaaaaaaatcctttaaatac

SEQ ID NO: 105396 - DNA, 630 bp, Cannabis sativa
ctttatggattacacttagaaaaatttggagttattttaattattaaatgatattatttagtgatattataatatgtggcataaggtaagaattggggatgaggagaccatttcattaatttcaacgtgttcattttaggagtagatgatgtaactcaactaattatagtaaagcatttcaaatgaagtcttgaacgtatgatagtaatagtcaagattagttatagtctagattttataatgtacacgtgtaagcttcaatgattttgttacacaacaaatgtgacttgagtccatgatttgttgtgtttcggttagtatatgagtgatttcaaacttgattaaacaagttggccgactaataagtggagtttggcattttgaattgtgtatctatttacttcattatttattaatttaaaaatagttaatcatagttaactaagtgctgtaatttaggtgagtgtggttacttcttaggctataaataagtgccattattttcctatttactcacacacacacacaaagccaactctctctcgtcttttgctataagctctcataaccttatacactcttcaacactcccctaaaccaagttcctaatatatatttatatatagaaaa

SEQ ID NO: 105397 - DNA, 1097 bp, Cannabis sativa
  modified_base (147)..(149): a, c, t, g, unknown or other
  modified_base (234)..(237): a, c, t, g, unknown or other
  modified_base (1035)..(1037): a, c, t, g, unknown or other
tataataggcccaaattgagacttaattttttttataacaaattagaggttatttttgaatagggtattcttaaatagaggttctaatgtactaataaagtggtgtatgtacacactacaacaaatcttatttttagtcacaacaannnttgtgactaaaagtaaaaaattgtgactaattataaaacatcattcttatgttgagactaaaggtctgtggctaaaagtattagnnnnaaaaattacaatttattgtgactaaattatgtgcttgttgtgactaaaactaaattagtgatgacttgtaactaaattctatgttttagtcacaaataacattttgttgtaactaaaagtcatatttagtcataaaaaatttatgttctgactaaaaggttgtcactaaaagtagctgttttttgtagtgtgtgtatgtgtaatttttactttttgaggatgatcgtatttttatttgaataatttaccttatattgttgcatccttagtgttagatgatctttatgggcaagcttcgagtcaacgagtgaattttgagaaatcatctgttctcttcagttctaatactgaagttgttgtgagagattcgatctgtggacagttagggatttatgaagccgatgataacaccacctatctgggtctgccaaatattatgggccgaaagaagactgccattttaggttttcttaaggaaaaattacaaaagtgtactcaagggtgggaaggtcgtttactctcttgtgcaaggaaggaggtccttctcaaaacggttgcatacgctactcctagctatgcaatgagtgtctttctgcttcttctggaaacttgtaaggctctagaaggtattatggctaaattctggtggaaaacaggctcttcgtctacaaggagtattagttggatgagctgggggcgcatgtgtagacacaaacatgcgggtggactaggcttccgaagccttcatgattttaatttgtctctactgggaagtggcggctccttacaaatgaatcnnntctgattggaaaggtgtttaaggctcgttactatccaaatggaacatttttggatgctag

SEQ ID NO: 105398 - DNA, 503 bp, Cannabis sativa
tggcgctcattgattggaattctctatgcttgcctcttgataggggtgggctaaacttcaaaaagtttgaggatattaaccttgccctcttgtccaaactcgggtggaaacttgcatcggatgaggactccttatggtgtaaaattttcaaagctaagtattggggtaatggggacaagtccttttggtcggcgaaagtttctaaacaggcctccttcggtgcaaaagggattatggctacgagggagttgattaggaatgaaacctgttggttactagcgaatgggagaagggcggatgtgtggaattctccgtggatcccttggcttgattggaatatgtttagagctgcctttaatccattaatagagcaaaattcggtcaaggtatcgacgttgattggtgcagatggtgagtggagaacgagctctatcaatcgttggtttgtccctagtgttgctagttctctgaatcttattaagcggctgcctagctctagggaa

SEQ ID NO: 105399 - DNA, 1385 bp, Cannabis sativa
  modified_base (123)..(125): a, c, t, g, unknown or other
  modified_base (435)..(439): a, c, t, g, unknown or other
  modified_base (1343)..(1345): a, c, t, g, unknown or other
tatttgaataccaagaacattactggcttcacctaaatctttccatttcaaatttagtgtttagtcattccttaatgtcagacattttcttgatattgttaccaataatcaaaatgtcatcannntaaaggaccaggaatactaccacttgattatccttaagttggataattttatcaaaccttttgttctaagaacgagaagcttgcttaagtccataaatggacttgttgagcttgcaaactttttcttcttgtcctaaaagtttataaccttctggttgctccatataaattgtcacgtcaagaattctattaaggaaaattgtcttgacatctatttgctaaatttcataatctaaagtgacagctatggagagaagtattttgatggatttgagcatggcgaccggactaaaagtatcctcatagtccnnnnnttctctttgggtataaccctttgctacaagtctagctttaaaagtttggacttctccaccaacacctcttttctttttgtaaacccatttacatccaattggatgataaccatcaggtacatctacatattctcagactttatttcttttcatggaatccatttctgaatccatcctggctgaccattgtttccgttctagacttgtcattgcttattaatagcttaatagatcgccatcaataccgttaccaatgaccatattaattttatcatccaagatataacgagctagttttctataaaccctctcactacgacgatctcatttaaaatcccttaaacatttatagctgcctaacatttgtaaatcaccatcgtaaaacataaaaactagcaaatcaaaactcttgttgtaacataaaaaagaacttataagctagctttacaaacttttagtccatagcattaattatagtttgtggattaagtttcattaacatccaaccctcattacaagcaccttgtttaattaactaattaattatcttaataatcatctctcatatttctcattaacgaaaaacttgcatcgataacattaaaaagttttttaaaaactatcttgacaaaacaaaaatattttgtaataaaccaacattatccttagttggtattaatagctatttttatttatgtatatttatatataattaattttatagatatgctattcaaagaaaaaaaaaatacgtaaaccacttttttgaaaatacactaacttaaggcatggtgatacatcattcccttcaacgtattttgaagggtttctttatcatttttataggaaaatttacatagtatattaacttttgatatgtttttacaaaaatactgtcaggcgnnnttttttacttttttactgtgtttgcagtatactgtgttaa

SEQ ID NO: 105400 - DNA, 1558 bp, Cannabis sativa
  modified_base (1220)..(1222): a, c, t, g, unknown or other
  modified_base (1328)..(1339): a, c, t, g, unknown or other
ataattggccatgatatcactcttaacaagtacgatgcctgtactactgaaccgaaaaaatggttgtgtcagtatgatagtaccaattcatactttttggggtgaatatcactcttaaccagtacgatgcctgtactgctaaaccgacacaatggttatgtcactatgatatcacccaaacatatacaatgatacacacatcatgcatatatatcatacatatacatacatccagatattcatatcatacgttatattcagttctaacctgattttcgaattcaaatgtgctggccgacctgaacggaaatcttgtgctagatggatgccctattcacattttaaaaccgggtaagttacatgattaaaaccctaatcctggaaaacccaaaaccttaaccttaggttctgttatactttctataggttattctaactctggaaatggggaaacacccaaccaaggcaccgcaaagacaaaaattgagaaaatgaaaggcccgaggaaccctgccaaaactggctagccagttttagaggctctgcaaatcggctagccggtttgcaccagtttccccaaaacttttcattccttgctcaattttccaccaaatgctaccaaactttccagagtacctaatgagggtatacccaacatattccaaccaataaaccaaagaaaaactcagtgtaaacaaatattccattaaaaatcaaagctttgaactcaaagctcaaagttgcatcaaacctaatccaaccatcaaaaccagccacaagaagctaataccaactcaattgaaccctatgattcgaaccctaagcaagcctaaacctaacagccactaaatctcaaaattacaagttcaaactaaagaaaaacttcaaaaacatgctcaagggttctagggttttaccttagcttcaagagtgcttgattccctagttgaatttccagaaaaataatgaagaaaagaggtgatctcctctggttgcttcagccgaaagagaaaaagagagaaaactctctattttgaatttttccttccaatttccttgttttctaaaatgagacttaaggaaaaagtaattaattcttgctaaaaacttatcttgctaggtgtcactcacctagggcagccacctatcctttaccaaataaaatgactaaaatgccctttaacctaaaattaaggtttttctaaagctaggggtaaaannntcaaattccataaccccgcttaaatccgatatattattttctctaaaatatttcccactaaaaaataaggttctaaacttactcatgtgatcaaactagccatccnnnnnnnnnnnngttgtcgccgagcaaaattacaaaaattacatatttcacatataagtcgaataatacccctagagtttgataaaatctccgtaattaagaaattataactctaatatttatttctaaacattggggtccacaacttaataaattcataaataattataaaataacaaaaattagtgctaattgcctttactaatcaaaattactaaagcggtcattaca

SEQ ID NO: 105401 - DNA, 810 bp, Cannabis sativa
  modified_base (743)..(754): a, c, t, g, unknown or other
tcactgattaacgagagggctcaggtatttgtttgaaaggaagaagctcgaaaagagatgaacttgttaaaaactagctcgggaagcaaactcagcactgtttcaacaagtactgtcttgactcaagctaataacctaggggcctctagctcaaagaggaaagacgactctaaggggtcatctaaagaaaagaagaaataaaagaagcacaataagtacgtgccagtttacgccatttatactgagcttaatgaaattcgagaaaacatttatctcgcgcatgagcacaaggttgcctttagcaagcctgagcccatgaggcacgcaaggcataaaagagatccaactagatactgtaagtaccacaaagacattgggcacacaacagacgagtgtcgtcagttgaaggatgagatagagagtctcatcgcacgaggccacttcaagcaatatgtgaaaagacatggaagtttacataaccagcccaatccacccaataaccctaaccaccagggattacaacctcctcctatcaaaggagaggatatcctggttatctcgggagggccacatattgcaggagagagcaataatgcccaaaagaggtacatgaaggaagtgaagaacgagcagtcagcctttgctccaaaaccttctaagaaagtaaaaattgaggaacctctgattctatttttggaggaagatgaaaaatatgtgaggtacctgttgggttttatgccctnnnnnnnnnnnntttcaatataatcagatttactaactagtaatgatcaaaaactgcattttatgttg

SEQ ID NO: 105402 - DNA, 615 bp, Cannabis sativa
cccgcgtctggtgggatatagtggatcaaactcgagatgtcagtgtaatgacatgggaagagttcaagaaactttttgagaaaaagttttataatgttgatgtaaggacttcacatcacgaagattttgtgaagttgactcaggggaagatgtctgtggccgagtatactctggagtttgaccggttatctagatttgttggagatctggtgcctacagatttcaccagaaagcagaagtatgttcgaggactgagtgctacaatcagtcgggacttgaaaattaccacatcacatgacactctgtataagagagtggtaaacttggccttaattgctgagaaggccgagcagcaagtaattaagagcaggctgcaagggatgccgtcacggtatcaaatcctcctgctagtggtaatatcagtaaggggaccaacagtggcaacccagagcacaaacggaaggctaaggcttccagagcatcaggggtaatagaaagcttcgggaaattaaagtggccgtcaaggtcacggattcttttccagatcatatctagagtattcaaaatgcaagaataccatcagggtgaatgacgggccaaggctgcatactatat

SEQ ID NO: 105403 - DNA, 713 bp, Cannabis sativa
ctctcacgaacaaaactggtgcaccccatggcaaagtacttggtcttgtaaattttaaatccatcattccttgtaattgtacttttaactcttttagctccgcaagttccatcctatagggagctcttgatactggctctgcccctggtattagatcaatctcaaaatcaatttcacgttttggtcccggtaactcctctagaaaaacatctagaaattcttgaactactgggacatgctccagtcgcgctggtggttccctggtagtatccactacatttgctaagaaaccaacgcacccctcacacaaaaaatctcttgccttaagcgctaaaattaagggaattcgggatccctgcatcttacccacaaatacaaaggggtctttgccctgaggctgaaaagttaccatctttcttttgcaatcaacagttgtgttgtatttctcaagccaatccatacccaaaataacatcaaagtcctccaaatttagttctatcagatcaactaataacacccttccttccacaaatactagaaggggttcacccacctactggagataaccaactctcctgtaggaaataaagttccaaagtctctagcaagtacatcactaggcctattcaatttctcaattattctacttgaaatataagaatgtgtcgcaccagaatcaatcagaacactcaataaagtgttggaaattattt

SEQ ID NO: 105404 - DNA, 648 bp, Cannabis sativa
agaagggggcagaaatgtcctcccattgatctgagaaatcagattaacgggaaccaaggtgacctccgggatcatcttgaccaaaagaaatacggacctgcgttctccatggggacgttgaacgaaggaatcatggcagaacttgccatactccgaaaagacatcacccgagtctccctgagacagaaaggcgacgactccgactctaattgtgaggactgagagccatgtgccagacatatcctggaagcagagctccccaaaaattttaagatgctagagatggcagcttatactgggaactctaatccaagtgatcacagtcatgagggtcagcaatgacgccaagtgtttgtgcttcccgcttactctaagcgaatatgcggaggaatagtttaagaaactggagccaggatccgtggattgctggaataagttgcaaaccagcttccggagacagtttgtcgcagcaaggaaagtcaatctggaggtcagcgccttgactaacatcaagcagctacctacggagacactggaaaatttcatcaagaggttcatggaagaagcctctaaaacaaagaaagtagatgacggacaacagcttgctctcctccaagcaggcatccgtacggggactccattctggaa

SEQ ID NO: 105405 - DNA, 1016 bp, Cannabis sativa
ataaatatctaacaagtaagtttcaaaagaatatttaattctctatacaattaaaaattactcaacatagtcttatctaattctctcaattaaaattaataaaaatatagttatatacaattttaaatcaaaagttaaaactaacactaaatttaattgtatctcaaatcaaagatttattaattgtataatttaagaatttaaaaaaatttaaaaaaaaaccttaaatatctatataaaatcattcacttatgtataaaaaagttagtagttaattaactcaagtatatgatttattttatgtacatagcaaacttattttgatcaatagtgataactacaaataagatatgataatgataacgactttgaatgtagtggcgactacaagtgagatacggtgataacatcggctttaaatgacaacagttttaaaatcatatgagttttctatagatttatcaattgattttttagatctctattttgtgtgagaattttccaacctcttttttttttttttttttactataacgtttgaaaatatgtctttgttgctgtattttttaggtaagaaattatatgattattttttttttaactatattaatttaatttctgtataaaaattatgaaaaaatttagtagaataattaaaatatcaactttaatatatttttataatttaattatcaataaataaaatataaccgcacgcgaagcgcggtttgtttcctagtttataaataaagcgggttcaagagtgatactgcccatcccatatctggctccaatatatagtttttatataattttctaaatatttattcatattaaaattattgactaaaaagttgattattaatctttcttctcataataaatattttttttaaatatagtgttttaagtatcgatttcaattttcaatgtcttatttaatatgtatgtaatgaccgctctagtaatgtggattagtaaaggcaattagcactattttttattattttattatt

SEQ ID NO: 105406 - DNA, 657 bp, Cannabis sativa
gcaggaggcctcgtcttccaccccacattgattaagccaactgttaaccactactgctattatcactatctcttctttttttttctttattttatttacatttacagttctttttcccctccctaacaatttatatttttttcttaaagggagacaatttaaggcccgtccccaggcccttaatatattttttagagcttttcgctgggtttgaacactttatatttatgcttaaatacatactttactttttagcttcgttaaacttttggtttgttttgcttttgtccgcgtggtatgccttactaccccctgagtgtcatgaaaattatttttagggcactcagttttacaaacattaatttaaaggttgcacatacttgtccagtacaaatttactttacagagcatagacttatattttttgactattggtaatacttttgtaggtgatcagtattttaagccctaggcaccatggttccgtctattcttttaagcttgtaagtcccgaagctgatttcgtcctcgatttcgtatggtccttcttaattagttccaagtacccccactccgggttcctgagtggctgggaagacccgtcttaggaccagatcactaatagtaaattttctatttttaaccttcgagttgaag

SEQ ID NO: 105407 - DNA, 617 bp, Cannabis sativa
  modified_base (574)..(584): a, c, t, g, unknown or other
tattcacatagacacatacacataaatttaaatatatatactaacttatttattttaataatgaatatatatatattagtataaatttaaaaatgcgtacatatatattgacatatttgtatattggtttggtgtatatataaatggagatgtaaatagattattattggagattaagaaacaatagtcttttttttaatttttttctataaaatattaaataatttatcattaaaaaaagcaatcgatccaatctgcactattacggattggattggattggatttaaactattatgcggaccggattggatccaaaatatgaaatccgcatttagtgcggattgaatgttgttggaccaaaaaagtacggattggatcggatgaacacccttagggtctggggttcgggtccgggtctgggtcccggtccccgatccgaggtccagggtttgggtcggggtccgggtcccggtctgggtcctaggttcgaattggagattggtgttgatcctaaatcctttgtaaatattaaaatacaagctaatacggactatttgttatgtattaaatannnnnnnnnnnattgtattaaaaattttggtcgtaataattaat

SEQ ID NO: 105408 - DNA, 3044 bp, Cannabis sativa
  modified_base (41)..(52): a, c, t, g, unknown or other
  modified_base (483)..(486): a, c, t, g, unknown or other
  modified_base (2637)..(2645): a, c, t, g, unknown or other
tatagaacgctctataagttccacgatatagatacgctatnnnnnnnnnnnnatcgttctaatcccaataatcaaatatcctctatagatgattttcatagagtatggataaatttaacgtttcacccctcaatgtattttatctttaaaaaacttagcttcctataaatgatatttcagtaagataatataattactgaaataagagctcttccagttatctctattaagccaagctagaaggaaataatcttttcacttctatgtccagatacaagttatagattccatatctatgttgagcactcccactcaattgtattatcatgttcccaaaatgtacgtattacccgaagcaaaaggtaggcttaattaacaaatcaaagaacacaaataacactcctgagagcgaacctaaccatgtcaggattgagatcttttgatctaaaatcaaccaatgatattgacttagaaagatacaannnnaagattataatatctttaccaagatcaatatcggtcgcagtccaatgtatactcaatacatccaaaactggcatactttgccaatgttctagaaagagcataacacttatccaaggtgtaagtatactttatcgctgacaatcacatcattataaatctagtgcactgatgaatcaagggacattatctgttgaagcatataatcacaattaccttctaatgtgttgacaacactgtaattttgaataactatatgttctggatttaacagatattgtacacattaaaccataaacataaaaactacatgtaaatataaatgacttctaaacttctattgataacaaatcagattaaattgaaatgggttttatttaaggcataaaatcccaataggttgtacatgtcatggcggcgtgacctgagtgttatgtcgcgagacatctgggattattattttgtagtcattgtgcgacctggattatgtattttgcttattttgcaaaaaaattagaaacgggatcccggtacttgtaaatgattatgtaaagttataaagtttaatattcaatataaaagttttaatttgatacgatttttcgagaaagttctttgattagcaaagatagcactgtaattaacaagtcactgtagcatgccttagcattagagcgttagaccttcagattatagtgttatcctagatatacttaataagaagttgggtaactagaaacttctttttttgttggtagagcttaaataattcattctatcctcttaggtgttcaaaactattggatgaccctcatcattttgcctcaaaaaattacaaaagcattagacaaatgctgcagggactttctctgaggtgttattggaaatagaagcaaactccagctcacatcatgggagaaggtgtgccttcctaaaagcgtaggtggaatttggttttgaaaagggaagaaatggaatctagctttgatggcaaagtacctttagtcaatttctagcaagcaagataacctttgggataaatggatcaataccttacttgaatgaccaagacttatgggaaattcctattaagcaggttatgagttggtacttcaaaaagcttcttaagcttaaaagtttgacagatgaaggtaccttgaatcttattgacaacaagggaaaattcaaggcaaataattctataaatcatttactgtggcgaccaaatctgtgtatgctagagcattttggaataaactgttagtgccaaagtttagattcatcttattgtaggccctcaacaatcggtcttaaatagggatcacatgagcaagtttatgaatatttcctctagcttatgttcggtgtgcgagagagaaatagaacatcacaatcatgtgttcgtggactgtatctacaccggaaatgttgtagcaaaaattggaaaatggctgggcgggtttcaatggccgagggatttcaaggagctgattgattggggttctaagacaaagcgaggcttgaagttctatgtcacaattatgatgtctttgcagcaggaatctatatgattttgtgtaatagaaactactacatttttgaattgtattgtaagtctgttatgacaattggtagggaaattaaaattgctgtcagagctagaataatctagcttaacgaggctaaaggtatgaaaagggttaagtatatattaagtattatagagggctgataagggttggtagttgtagccttagtttgcattttgttgtatctttgctctgtttttgaataaaagtattcctattgttcaaaaaaaaaaaaaaaaccttcttatattgattacatcaatgcactacaactaagaattctttaaatataattctatgttgtcaaatagtacaattcaatatttagagcggagtaataatggaattaataaataatattattccactaaacagttctgtaatatcctgataagcgtaatggtaaataattagagtttatatttatattatgggttaatcaggtaataagtgggattatgatcctactaatctagttcaacataaactttaaattttctataagtgaataaataagcgtaatttaaaaattacagaaattttatatatcatgtgtgaatgtaannnnnnnnntatgtggaataaaaatatttttaagtttggcgatcttggagactcaattaggggctagaaatgtcattacaagtttaatcgatagaattgatgggaatattgtgaaaagttgttaatgtaggtattagggtaattaagagtatgtgagatttgacttagcgccctaaaaatatagatttcttaatggctaagaaattataatataattatgaataataaaatttttattaatattattattatattattaataatattatttttattaatatttttattgaaatctaaacaataagattatatataataggctaattaggatttttaccccatgaactttgacatgtaccaaatgatgccccctgaacttttaaggttgttaaaaatgccccttgaact

SEQ ID NO: 105409 - DNA, 986 bp, Cannabis sativa
  modified_base (942)..(946): a, c, t, g, unknown or other
ttattgatctttccgaggagctgactgctgtaaatccttctactcccaaatctgccaagtctaaggagtttggaccaccaacgactgggtccgaactggtaaagagggtccctgagccggtgcaggcaccaactctacctttgcccgtgctgctagaggctaagaagggcaaggagatgctggctcactacatgaaccggctgtttcctgaggtcagtgagcaactggctggtgctgataacgactcatctctggatgtgttggtgggtggagtcttaaaggagctcaccagggttagtctttttttatacttcccttttaacttttcacacttagctccatatgctgacttttccctttgtacaggccggtttgaagttagcttacacttactcccgggctaaatctgctacttccaagagtacggctctgtgtgacaccttgagggcggaggcagatctggccaagaaggaagctgaggaggccagggcggaaactggagctgttcggcatgagctgggtgaagccaacaagaagttgttttctgccgagaaaaagatctccgtgctaacaaaggacctcgaggctgctgatcgctttgaggaaaccatcgagatcttatctgctgaagttaatagtcttcaagatgagaggagttttctgcggcaagttcttcttcggctaaaggaggagagggacgctaaggtgaccgaggcggaccatttgaaggagaaggtcaatgctttggagactggcggcctcgagctcttcttcgatttctggaaggctaatccccaggccaatttcgactactcgggtgacactaaggacatgtaccttaagtactgcgcggcccaagttgcttatggtgggaaagaggcggcagcttcaacttgcggccaagcttctgaccaggttgctgatgcttctcctgctcgaacnnnnnatcctcctgctccagttggctcagaagaaccgaaccaaga

SEQ ID NO: 105410 - DNA, 777 bp, Cannabis sativa
  modified_base (59)..(59): a, c, t, g, unknown or other
tgtttttaatcagcataatgtttctgctggtttcaagtctattgtaatggctgaaagtntttaaataaaattttcactttgactcaaaaaaaattataatctccaagttaattaagttggaatattgtatcatcattatcaagatattaacccttaattataccaaattaattaaactataattgttttgtgttggttgttaagacaacattatcatgtatacaaatttcctctatttatgaaagcacatttgagctttgagctgtaaaccaccaataattaaaattaaaataaataaataaaataaaacaattgtgggtggtcctatcctatacctatattatatatgtatataattatttataaaaaaaattcaagatattttatcttaaatatttatatatcaaaatggttaaaagggttaatatgtatacatgggaatatgaaatcatgatagttatttgtgaatgatgttaaattagattgcaataattttataattttatgttaaatttagatgttgagattgatcattggcatcattcaaggaaattgatttgtcacttttctttttttacattatttgtatattggtacttgtaccctttttttaattgcaagttaacccctatattttatataatggtgtatttttttatttatttgtttatatttgaaaataagttagtggtgtgtctaaattatatgtaaatatattgagtaatttgtggttaaattttttatgtttttatttttatatagttaagttattggtgt

SEQ ID NO: 105411 - DNA, 554 bp, Cannabis sativa
tgtgtgagtttactacttgattgcgtatacttgcgtagtgtttataggtggtctttgggacacattttgagatctggtttagggtggtgttttggatggtgtttctcttactcttttttggtttggggtggtgttcgagatacacttctagatatggtgcagggtggtgtttgggctactatgtgactggtttatggtgttttagaaggtgtttggaatctggtttgtggtgttttggaacaaccttctccttttctggttttggatattgtttgagatctgttttggggtgatttgttgagatttgactggcctttgttttttctggtttgaggtggtgttttggatggatttttagactcggtttggggtgattggaatagttctatatggaaagtttttttcttggtttggggtggtgttttggttgttatgtgggacttggttttgggtgatggtgttgggctttgtgccctaaataaaattctatttcaatgtaatcttttctattcaatcatcaataaagaaacagatttaattccattacttgttta

SEQ ID NO: 105412 - DNA, 694 bp, Cannabis sativa
tgtctagaaatgacacaagggttctcatcagaaatcagccaagggacattaagcacaggggtagacacaccagacccgattctccttccagcaccatccagaaccagttgctgtgattcaaacacactccgccaaataaaacttgggttaggacctatctcagccgtaaggaaattaccgtttggaaagtagcgggccttgtaaatacgacccacaagagagtcctcatacagaagaagacgccacccttgctttcctaataaggaaagattgatcccaaattacgaaaaccaagccctcctgaattcgtgcttctacaaagtcgccgccaactataccaactgacaccttttgttctattattagaggatccccactaatagtttgacattaagctctccaggtgcgaaacaataaccggaagaagaaacatagacatcgcataggtaggcaaagcttgagcaaccattttgagcaaaaccttacgaccagcctttgataacagacgaccttcccaactctaaactcgcttgagcattttatctttgagaaaacccaaaattgcatctttattcttccccatagaacaaggaagacccaagtaagtactttgttcatcagccataggcattctcaacatggagcacattcgttcacgaataacaagaggagtattagaactgaagaaaattga

SEQ ID NO: 105413 - DNA, 1526 bp, Cannabis sativa
ttggattcactgttgctccaactgtagaggtgcgaaataaaagacgatgcctataagcttggactgatcgctttcattgaaggtgtattagtatttaaagagtgcaatgtccatgtttggccttacatgttaatatttgttaacgatcttgaattcttcttcaagtattcgtgggcaagcgtgcttttcgtaagttgatgcagacattgaataaggttaatgttgacaagaagaaggggaagaaggttgctcaggaggcaaagtaaactattagtggcaatgtacctgccatccagtactgggcatacgaagccatagagaaagtgggcaagaagtatgctcaatgcaatgggaccaagttccctgaaatggtaaactggaaaactctggagggccacaagaaataagatgtgaaggcaatcgacatcgcactattattcaacacttgggtatgtttcttttctggtctgtaatatttttttgttaattcagtaaaaatacttgtttaaaagttaaaatagttatttgcgacttatttcgagacgtattgtgatttcattagcgatgatttatagatgtatagtgttatttaaaaaaattcttttgatttgcaacttgtttcgcggcattttgcaatgtcatctttttataattttatgtttatgcttactttaatttgcgatttgtatcacggtagtttgcgatttcattcgcgatttgggtacatgtatttcttttaaaatgctagacttgttttaacgacacgttatcgacgatagtttgcaaaatattttgcaacatttttcgatagtttttaatttctttttgtttttttatttttccattggtcgtaaagaagtgtttgtttctccagcctagtgaagaagaatatttcaagtccattaataagggtaaagcccctctttgtcttgagatggacatcgatcaaacggtggagggagatggtacacaagagtctgtgtttcaaagccaaacgaagaccattaacgaggtcgtgacaaaggcaaagttagttcctccaccaccatctccagaagcaaacgagcctccgtctgctttagcctacacatctatggataatgacctagcaaagaggttggataaacttgaggcccaataagataaacttgaggcccaacaagctaccatcatattgtcagagatggaggtacttaatagccatctcaatgtgaggcgatcctttttggacagtcagaaaaaatctaaaggagactcttttggccaagatggccattttgatggcattgttgaagttgaaggagggggaaccacaacctacccaagtagcaaatgaccaaccagaatgccaatttgtggagagtgataatgaagatgtactcccaaaagattgggaaccaaatgataatgtggcaccgtctactccatggtgatacacaatcacaagatgatatcctaatccaaattggacccccaaagatgtaccatttgggaggaagaagaagttgttggattttatgccctaa

SEQ ID NO: 105414 - DNA, 730 bp, Cannabis sativa
ttttccttgagtccaccatacttttttgacactcaaaccgaaaacacgattaatatacatctattttttctactttattggattattgttcataagaaccttaaatccaccaactttgatcagatttatgaatattggatctcccatgagtcttgtgttcataagcctcgattaagatttcacctagaaatcctttgttgtatttttatccacacactcttgagatcataactctggtgtgtcagatctaatcaataaaaacagaagtagacatagcctcattaccattacgacatgggggtgaactactataaatctctagtgtccactttatctattacagttttgtttagtcaaattaattcattgcagtcctctttcttttttacgttcgtgttatatcaattaactaaaactgcatcaacaccttggagctttcattaagaggattaaaaagcgctctcaatgtagtttggtactttcattgagagcgctgaggtgaaagtttggctattttcccttttgaaaactcattaatttatctttctcacaataatggtgtttagtactaggatgattaattttgaagaaggtgtcgaagtcctaaggagagaagttaatcagtcccttgatgaaggaacctttgtccctccacaaccacatggataggagacttttcgacaataagaaaactgttccatgccacctatgtcagatgatgaggggaaag

SEQ ID NO: 105415 - DNA, 514 bp, Cannabis sativa
aaaaaaattgaaaaatttttaaaaggtccttcaccaaacctttttgacgaaagaggggtcgaactgttataactccctgagcaaacctttttgacgagagaggggtcgaatcgttataactccctgatcaaaactttccgatgagaaagggatcaaacaactataatatttgatttaaaacctatatgacgagaaaggaaaataaaaagttataaagaacatataactcataactcgtgcataaagctgaatgctaacgactcgcgctaaaggaaagtattaaacgagacatcaaagggtctggaaaaagtacttaaacctaacacgtgggtaaaatatctaactactcatgtaagcaataaagatatatacaaagtgacaaggtcattaaaaatatatttgagtttgctaggaataagatcaattctgatgatcacgaggcgatatcaatgactgctcacaaattgagggtagggcaaaagataagctactcacgcgtaaagtaggttattaa

SEQ ID NO: 105416 - DNA, 1061 bp, Cannabis sativa
  modified_base (47)..(49): a, c, t, g, unknown or other
agagacaaaagagacgacccttggattctgagagacaaggggcactnnngcaggaagtggataagttgttgataaaggacttcatccgcgaggaattttatccctcgtggatatccaaccctgtccttatcccaaaaccaatggaacttagagaacttgtattaacttttcagacttaaacaaggtgtgttcaaagaattgcttcccactaccaaggatcgaccaattattggatgcaactcctggacatgagcttatgtcatttatggacgcatattctagatataaccagattaaaatgcatgtaggaacacacaagcttcgtaaccaacatgggactttattgttataaagtcatgccttttactttgaagaatgctggggcaacatatcaacaactagtgaatgaaatggttgtgagacagatagggagaaacatggaggtctacgtcgatgatatgttggtaaagtcgataaaaagaggagatcacacaaaagacctcgtggagtactttgaaatactgagaaagtacaatatgaaacttaatccaaaaaagtgttcctttggagtttcctcaggaaactttatggaattcatagtcaatgcgaggggcattgaagcaaatcttgagaagataacgactttgatagagatgccatcaccaacaaaatcgaatgaagttcaggccttaatgggaagaatggaaaatcttaacagattcatttcaaagtcaactgataagtgcctaccatttttcaatgtattgtgaggcaacaaaaagttcgagtggacagaagagtgcgatgagatctttaaaagaataaaaaggcacttgtcaacacattcagttttggcgaaaccaataattagagaaactttactcgccacttggctatctcggaaaatgcgattagtgcagcaatagtgcaagaggagggaaagcaccaacaactgatttactatgttagtaaaaggttactagggttagaatcatggtatccccctcttaaaaaacttgcttacgcctaatccacgcatctcgcaaattaaggccttactt

SEQ ID NO: 105417 - DNA, 543 bp, Cannabis sativa
  modified_base (113)..(113): a, c, t, g, unknown or other
acaagttttttccttcctcttataatcgctagtgttctgttaaaatctcaccctacacatctcaaaaaatagtgaaacttctcaaggatgaagccaagactgttgtgcatcanttttctattggacacgttgagagatatagtagttttcatgcactaaaaatcattttaattgaaattgtgaaaatctcacatttctgatagtagtacccctttgtgaaatgtggctcggacccatctcagaatattttttgccactagtaacaatgaactcgtactactaagacgtgaatatgaagattggattcgcattaaatttggttaaaatgaccccctaattcaaaaattaaaaatatttttcttttcaaggtaagttttaacaagttttttccttactcttacactcgttagtgttattctaaaatctcacctacacatctcgaaaaatagtgaaattttacaaggacgaatccaagactattgtgcataacttttctattggatgtacacgttgagatataaagtaattttcatgcactaacaa

SEQ ID NO: 105418 - DNA, 590 bp, Cannabis sativa
gatgaaatcctataattcttatcaaaataaatatgtaacaaaaaaaattctttggcaatatataaagataatcaaaagttaaataggagagcagacttatttctttgattctataattttttttttttttttgacaaaactttgattctataatttggccttgaattaataaagaatgaattgtcatggctctctaaacaatgaataatattacaattgaagtgagaggaggaaaaaaaatgtttcttatctaaaattattcaaaccatatatgtagtgtcaaatactacgaacaagtaaaaaagatttaattattgtacaagctgcttaatttacacctttgtagtttcaacactgaagtgaattattcaaactaagtaaagtgaaaaactcacaagagtctggtgttgtatgaggcacagaaagagcatttatgatagagccaatgaaagggagcttctcctcttttctcacagtcattgcatagtatgatttgagtttggcctgagtattcctctgggattttctcttcagccaataaggcatctaacattttgaaatacacctgcaacacaatagcattacaattt

SEQ ID NO: 105419 - DNA, 626 bp, Cannabis sativa
acgatcttaagctcttaagtcccgagctccaattgtttagtccaatcttacgtattactctcacctataccaccaaatggttaaataattataattatcgcattctacattaaaaatcgagtccaacgacatataatatgactatatttaaaatgtaaggttctgaaacctcacctaagcggtgcacattaacaatcggtggcagtaaaaatcggtgtaccggaaacatcgcccaaaataggagtagtgtatatcgaaacgaccacctcgacgagtagatcatacccatgccaaccgtttgtcaaaacggtacacgatgtcactagaaagtcgccggaaaggggcaaagctacaaaatttcaccagaaaaagtagcgaacctggaaaaatggtttagtgtaggttgttctcctcgacgacctgagtttactggtgaaagcgtctcgtgaaacgcacgccagaggtgaccgaaaaattcgtttaaagttttaattcccaaactttgacttgcgatcccaagctaacggcagtgagagaagcggcgccgcttggggggtgaggtcgccggcacttgggcttccgatttgtctggcgcgtgaggcggggcggtggccggaggtgggtcg

SEQ ID NO: 105420 - DNA, 809 bp, Cannabis sativa
  modified_base (49)..(55): a, c, t, g, unknown or other
  modified_base (586)..(594): a, c, t, g, unknown or other
catgttagtgaagtaggttcagtgataaaattgactgctgttggatggnnnnnnnatttttttgtttatatattgtcttaaattatttgtttgtgttatttatagcttttggaaattttgggtttagactttttaagctgttatgctgccgaaattttagtagagaaaatgtaaaattaattaaatatttaaatgaaataaaattgatttactattaagaataaattaatatgttcataaaagaaaataaataaggtaaaacataaaattgaaattgaaacatgtaattaaaaagttagtaaaataatactttttttttaaaaaaaaaatatattctcaatttaaataataattaatttgaaaaatatttaattatgacatgtaatataaaattttaaatatttttaaatggatattattaattttaataagatagtaattttaatttaattaataaatgattaaaaaataataaatgattaaaaaataaaaatattaaaaaatgtaatatataatttaaaatgtaataatgtggtattaaaatttttcaaaaagatagtaattttaatttaaataataaatgatnnnnnnnnnataaaagtgaaaaataatgtaatatatatataatttataatttaaaatataataaaatgagattataaattttaaaaagttagtaatttaaatttaaataataaatgattcaaaaaataaaagtgaaaaataatgtaattgtttacccaaattttgacgatgatgacgtgtcaagaataatgccacgtggcacaaaaataccgggactaaattaa

SEQ ID NO: 105421 - DNA, 601 bp, Cannabis sativa
aagttcagattgaggtggagcaaattgagaaggttcagatggtagatgacactgttgaacaagaaattgaagaacaagctggtaaataatctgagcatgatgatgagtgtcaaggttatcagttaaccagagatagggaaaggatagatatcagaccaccaaacaggtttggatatgctgacttaatcttctatgctctaaatatatcagaatttgatggtgaggaaccttgctcctatgaagaagctatggtgtccatttacaagctagaatggaactcaacaatgaaacaagaaacgatattttttttgaggaagaaaagcacatggataatagtgaaaaaaccagtagggtgtaaggtgataagttataaatgggtgtataagtacaaagaaggtattcctgggattgaggaagtaagattcaaggctacattagtagctagaggcttcacacagagagagggaattgattataatgaagctttctctcctattgtgaaacacacctccatcagattacttttaagcattgttactactgaggatcttgaatcggaacaactagatgttaaaacagcttttctccatggaagaggaaa

SEQ ID NO: 105422 - DNA, 833 bp, Cannabis sativa
ataaaaccttacaagaagattattaatgatgaaaggtgcagtgataagttgataacccacctaagtcccccacaccacacaagtgttcaactttctaaatggagctactacaagcaaggccatattgtatgcaatagaaaggcttaatggaatctacaatcatgtccagtttgtcacaatttccatatttgccaatagcagcatcaattccaaatatgattgtaaaattgaatttcacaacaaattgtagtcgactttttttttttttcttgaaagacaaattgtagtcgacttgatcatttacatatgatgaaaaatcaaacaaattgatcatgacttgaagcttcttattccataataaatatttaaattccttagtaataactaatacttaaatgagtaacattttatcttagtgaaaaaataagttactcatttaatatttctataagtcgtaaatatctcctactacttgctttagtcacaagcaatactctttatctcataaaagctgaaacaagataaatatatatatatatggtatgacctaacaaaagtttcctatcggtagagaactttttttttacttttattataggactgcttatatataattaaaactttatacatattataataatatatttgttgtggcttacgacacgcaccaacaacacacttttatattacttcatacatcatcttcttaaaaatacatcactaaaatgtcacttttaaaaaaatttaatatattttatttatttcaaactagagaactaagccgcgcttcgcacggtgttgttcatctcttatattttttttattatatagat

SEQ ID NO: 105423 - DNA, 2423 bp, Cannabis sativa
cccgccgagaaaaatgagtctttgcagttggaatgctcgaggtttagggacctcgagcattccgtaatctctccatgcttgtcaagcaacactagccaatgttgttgtttgtcatggagactaagctgccttcaggccgtggactgcacctcaagcacaaacttcattttcataatgttttagaagtgcctaggcaaggtttagagggggggtcttttacttttttggaataattgcattgatgtaactgttacttcttactcccttaatcacatagactgtattataaataattttaatgatatgaactggcacttttctgggtattatggttcttcgtattctgatcaaaaactgttacttggactctacttaatcttttatttgatactgctcctcttttgccttggttagttattggtgattttaatgactatctttctgttagtcataggaattcgactaattctccacctcctcatgctatgcatcattttcactcgtttttggataggtttaatcacatccccctccatcattctggtcctaaatttacttggagacatggccaatctttagagcgtcttgactggtgtacttctaatcaactttggcaaaatcttttccctcaggctgctctcttccatttgggattttatggctctgatcatagggcccttaaagttaagttcgatgatataggttcccatcaccgtaaatcatcccgttttcatatggaaaaccactgacccttcttttgtcacccttattcaatcgtcttggactcttccttcttctttgatttcacctcctcttcaaaatttcttgactaagaaatccatatgtctttcggatattaagacttggagtagatctcagtatcctctccagcttcaaatttctcgaactcaagctgagctccatagggtcttgaatgattcccagcctactccccagtctttaactcatgctgcttatctccaatctgagttagatggtttgctccataaggatgaagtctactggaagaaaagagcctgagtcgactggctccgtgctggagacaagaacacgaaattttttcatcgaaaagcttccattcgaaggaagaataatttcattcgtaatatcagttctccctgatggttccatttctcatgactctcctaccattatttcccaattcctaactttttatactaatcttttcagttctcaaggagtctgtgaaatggctatcaattccattctccaagggatttctcccagactctgtcctgagcaatcggcgttccttgatggaaacttcactgaggctgagatcaagcaggctttattcagcctttcaggagataaagctccgggtcctgatggtttaaaccctcttttttaccacaaaaattggtctatctttggctcggatctctgtcatgctatgcttcacatcctcaatcatcagggtgacatttccttgatcaatgatactattttagttctcatacccaagaagaaaaatcccaaaactgtctgagacttcagaccaataagtctttgtaacacattgtacaaatgcatctccaaggttcttgctaatcgcattaaaagtgtcctgcactcaattattagcactaaccaaagtgcttttctcaagggttgtcaaatcactgataacatccttatagccaatgagatcattcatgccatacactcaaggcgttcaggtaaacttggttgggctgccataagctcgacgaggaaaaggcttttgatagagttgaatggaaactcattcatcatctgctcactcatgttggttttccttcacttttacctctcttatcatgaaatgccttctactgtcatttatcgtttatctctcaatggtatcctctctgacccctttcgatcctcccgtggaattcgacaaggggatcctttatctccgtacctttttctcctggttgataagggcctttctgctgctatccgtttacacgaggctaatggtagctttgcgggcattcaaatttgtaggggagccccctccctatctcatcttctttttgctgacgatagcatgttgttctctcctgttactcctcactccagtgaagctcttaatgctatccttcttctctataatcaagccactggccagttagttaatagagataagtcttctattcttttctcccctaatacttcaactgagtctcagcatgaatttagttcgtccttgcatctaactggggaaggctttattagcaaatatctaggagtccctcactgtgtgggcagggttactaattcggttttccattatcttatccaaagtgtttccccccatttgatgtttggaatgataaacttttttccggagctggtaaggaaacctttattaaggcagttgtccaagccattcc

SEQ ID NO: 105424 - DNA, 874 bp, Cannabis sativa
tttttttttttatttcacatctttgtattttcattcttattttgtaagaaagagtgtctttgatttgtagaggtgagtgtgttcgaccctaccttagtttatatgtctttataattgttttgagtctgtaaacaagtcaacaaagaagaagaacaaaagtgcaagccttcggaagaaggttcttcaagctttcaggagaaagtgtttcaagtcttgcctcgagagaaagcaagcactcttaaagtaggtcgaagggagttcgagcacttgaagtttcagcaagattcatttagaaatataaaaagtttgcggcatataataagagagagtctatatatgcataagtcaattactttgttattttgaggtctatctaatgaatatttttctgggcgtgaccccgtggactagtaacaattgtaaggattgttgataccacgtataaaaattttgtgtgctttgatttttttggagttacagaatcgtgttctgtagctacagattatttatttttgtatctactttattattctgcatttaattaattgattaattaaataataagttggtaattatgaaatacgaaatttcaatattaataaaatatatgtgtttaaatgataagatatacaattaggggtattcattggaccacatttaatatttttaggcctattcagatccgatccaattatatattggatgttaaattttaccatctgattcgattcaattaatttcagtcatctaatcgatcaaatatccattggatattggattagatcgattatatctgttggatgtatttcatatatagttattggtttaatttgggtttatttaatattttagacctagtattttttagatcgga

SEQ ID NO: 105425 - DNA, 558 bp, Cannabis sativa
ctccactaatcattaataattaatttataagagaagttacctcagatgttacaattaagtgtttaggccaaggaaggaacatgtgtggtgcgtccctaacatatcagcacccttcaattgggattgggattttagcgtcctcttgcagcatttttgaaatcagagcccgggcatgtgaatcatcgtatggcgtgcagtgaacagtgatgtcaccctcatgctcgtacagatatggtcgggccacaatgttgtcgatgttgtcagagtagagatatacttgctgatcatctctcgcatggtcatcaaaattgtaccggagcgctggctcgttgagggaaataaactcctcagcatataattgaccctcatcctcaccagtgtatggttgtggaacatacgcctcaccagccacctctcgttcttcctcttgttcgacagtgtttctcttctgtttaagggattgaacttcgacactttccttttcttcttgtcgaacagtttagatgccctggtcaggaacctgcaaatcataaaatgcaaattagctacgattttatt

SEQ ID NO: 105426 - DNA, 567 bp, Cannabis sativa
gcgcagttcgctactgcgctggtacttttactagcgcatttcacaaactgcgctggcaaaaaggtcaaagttttaccagcgtacatttgtagtggaatgcgttgggaaaaattatttttaccagcgcttttcattttatgctggcaaaagttataataccaacattgatttgccaacccccttttgccaacacatcacaagtaaattctattttatcagcacaatagtacttttgccaacacaaaaatatgctgacaaaagtgacattttttgtagtgtagtgtaaccaaataaaaccaaaatagaccatacgtataatgctcaccaatgccacaaaatatatgttaaaatattcaattttctttacaataacataaaatataagaagacaacaactttaggattattactaaagtaaatgcattttttgtaactaaatcatatgcatatatgaaaaacacataaagaaataaagtacatattaaacaataaataaaaacaaaaaacaaagttaatagtgaagagtgttataaaataatataatataatataaagtagatgagaaga

SEQ ID NO: 105427 - DNA, 529 bp, Cannabis sativa
caagtctttctcgcggggagggtagatttatgcctataacattttctatttagttaacaaaatttaatatgtcaatcaattttattagttactaaaaaatagtttgatatttcatatttaaatttttttctagattatattatacctaagcttattttataacaattttgctaaatttctaaaataacttaaagaaaccacataatatcttataattcaagacgacaaccaacatcatacattacactaatttttgttatttcatgtttaaaagtcactaaaagatatactttgaagaaatctatttaataaagctattttaatatgtttttttttttatattaagtaaccaaatagtatttttttctaaaaaatatatatttatcacatattaaaatagttattttattatttacatatgtctaaaattctgaaataaaattttaatggaaaagtaaccaattaatatcttattcacatcaaaagcaattaaatagttacttttttcaaaactcccaaaaagcgaaaa

SEQ ID NO: 105428 - DNA, 723 bp, Cannabis sativa
atcacattgtatataataattcaagataattattttccacaactctatcaatataaattaaaatgtcttatttattttttgttttttttgttttcatttttcttgctatttattttaaagggtacatatataagcttttttttttcaataataataagttatacacacaactatattatatataataattatttaaggtagttatttttcacaactctattaattaatataaattaaaaaatcttatttattttttgtatttaaatttttttaaaaagacatataaagtttttattcatataataatagattatatgtaataatttatacacatgacatgatttttttttataacactaaaattaaaagttcacattgatttttattcaccatttcttcttcaaaaaaatatgtacttaagagtctcatattgtattaaatttattctccattttcaccaaaaagaaaaaaatgtatacttaaaaatttcacattatatgaaatttattaaatacaaagtaaatatatatatatattttgactctacaatttgaaacgtggttactgaagaataaataacatctaagactagaattatagagtgtttggtctttgttaatacataatatatacatgctattagtttaacttgtatcgaagaggtttaaaataaatttctatgcggtatcttttaataaaattaaagtccatcttaattttttt

SEQ ID NO: 105429 - DNA, 639 bp, Cannabis sativa
  modified_base (260)..(261): a, c, t, g, unknown or other
  modified_base (413)..(425): a, c, t, g, unknown or other
cgtaccatttcggtatacaacaatcgtcttaagaatataacgaaaactcatatccaccactgaatgtacatccatattcgaatatagatgatcttactttcaaatggatacaggcatatttactttttacagagaatgatcttgtcaaaaccactacgaacaagatgttaatgccatagatatataatacaatgtggttgtggtattttgatgactggtcaaaaaacacatattccatacattaacatacagtttgaatnnattgacagaaaatggatattaaaacttgtgaaagttgtactgtattgtccaatgtatcctaggaaactgaaaaaaaaattatttggaatctaaaatttaaagtcaaagacttaaatttttaccaaatatacatgagtaattattctttcttnnnnnnnnnnnnntaatctaactctaagtctaatttgattaaagtaaacatatacaagtaagagatttctaagatcgaggatttatatcatttcaggatagaatatcgggaatatagtcatttgcgtcattcaatttcataaatgagattagagtgacatcataagcagatgatttataaaccattcatccaatgacatactaattaagaaaattctaaatgaaaaa

SEQ ID NO: 105430 - DNA, 1030 bp, Cannabis sativa
aatccacattgattcatttactttgagtccaaaatttctcttccaatttatggctcatttcacaagtttagattaatttttgatcaatttgttcttgctatgacaagacaattctcataagtgtaactctcatagttgacttttcttaattcataaaatgagataattatcactttaaattctcaaagaatgtaacttctcacaagttacaatttcttttctcaaaattactattgaaaaagaaaaattcaaattctctttattcacaatatatatgataataatctccacatcaatagtaataaataatattatattactatcaatattattatcatatgcattatataatttgtatattaatgtacaaaattaatatatgactcccatacatgaattataactttcaaataatgattctatgccaactaatataatatgtatgtaacatacaaaatattaattatataaacatatatgttatatctttcatatacatataacatatatactttaatatacatgcataatatatattatatacacataatatatattatatatacatatttcatataaatacatagaactaattatttctatatatttaatctcacaatatatatgtatattatattatatctcatcatatatgcaatatacataacttatattcatgttatatattatatatctcatatatatactcatataaacatgttataaatttaaatatcatattttatggatgattttcatacaaaatttttatccttgtattctcaaaatcttgattcctcttccattgaaaatagataagcttttgattattagagattttattgcaatggaagaaaatcaagacattacaactctattgtaatacaatacaaagaccaacaaagagattaaataaatgttacaacaatattgcatgtatatatgaaatgtagaagaaaaagattataacacatgtaatataatatatgtatatatataacaagagaataatatatatatgtatacactc

SEQ ID NO: 105431 - DNA, 1734 bp, Cannabis sativa
tagtgaggcccacatgtgtggccggccactaaagtggattttagccatttattttatctttttttaatctatataattaaatcctaaagcctagaataaatactatagaaggaataagatactttcattttgatccacctaaaataagctagttttcattttttgtcaggcaactagtaaaagagagcctccttccttagtattttgacttcctctccttgttcttcatcaattaagcctttagtgatagagtaccatgcccactaatatcaagttaagtactcaatcatagtgtggaagactgtggttaaccaaactgaaggagagaaaatccaggttcaaatcttgataatgctctactatagaaaggaatcaagggttagagattgaacgaaaggagtcattattattctgttgccatcaatgtaaggttttctaaactttgtatgtgtttatttcatcgtataaagaaattcatatttagggtgttagattatagattataatcaacatacatgttagtaaatctagatcttggtaaaataacctccaacagatagtatgcggtctcataaccaacatttccactttgataatatttggttagctgagaatggctttgaggcttgccttcgtaagccttgggtcccctctccagaatcctatgatcacaatcatatctctaatcttgaaaacaaactttaacattgtgctctcatcctctttgagtggcagaaatcgattgggcctcttcttccacactaaattaaaaaagttcaatctcagctacaggctgctcacaatcatcctcaacccattgattcccatcttcttctttgttgtcaacttcaaggagaccttgatcggctcctctataaagaagaagagtactggcaacaacactctcaaattacctggctcggtgataagaacactcgatactttcatcaatttgcctcttcaagatgtgccaagaacaaaatacgctcacttacgcgatctgatggctcgactgtcaccgatactcaaagtattttaaccactattgaacaatacttcactcaactcttcaccagtcaaaatcctacctgtgaacaaatggatcatgttctttctagaatatctaaaaagcttacagctgcagaatccctgtgtttggaagctccattcacgtttgatgagattcagcaagcggcattccaactggtaggcgataaatcctctagagcagatggcttcaatggcacttttttccaaaagaactagaatctgctagggaatgatgtcatccaagcagctcttactttcttgaacgaaaacatagatttaacacctattaacaataccatcattgtccttatccgtaagaagattcaccaccattccgtcactgattatcatccaattatcctctgctctactttgtataaaatcatgtcccgcaccctggtcaatcgcctcaaaccaattctctgtcatattatttcaccagcccaaagtgctttcttacctaatcgcttaatttttaacaacatcattatagggcaagaagtcacacactctctgactcatcgcaagcacggtaaaatggtttggggctcttaaacttgacatggccaaggcttttgatcgcatggaatggaacttcctcaagaaggtcatggaaaaatttaatttcccatcaaagttcataaatcttattttgactttcctctcgactgcctcctttacttt

SEQ ID NO: 105432 - DNA, 510 bp, Cannabis sativa
ccatagcctgagaggaagaaatggttagagcttcagcgtttgacatctcggtttcagagtagagttatagaatttctatgtcaaatgcatgaaagtcgtgtttatgtaggtctctcaagatgttgctcatctgcaatagcaagaattcattcaatagttagccgccatatcaaatcctaaacaaacaaggaaatggaggtccctaaccgctgagaaaaggccctctttagatgctagcatgttcagaaactagaaatttcctatgctaagcatcaggtgctaattgcaccatgattaagaataatggtacaagaggcaccattgggtaccgtgggaccatagcctgagaggaagaaatggttagagcttcagcgtttgacatctcagtttcagagtagagttatagaatttctatgtcaaatgcatgaaagtcgtgtttatgtaagtctctcaagatgttgctcatctgaaatagcaagaattcactcaatagttagccgccatatcaaa

SEQ ID NO: 105433 - DNA, 587 bp, Cannabis sativa
aaataccatttttattcattaattggtcttaaatgtgtgttgttgctatgcaacgtacatttttttgtgtaacaaaagcttataaatcagagcctgcttttgaaaccacattttggctagccctacgtggcataccgcgcaagggccatcactgaagagtgatggtcatatagctctttaatttttggccacctctgcagggcataccttggaaaggccatcactgaagagtgatagaaacttagctattttttaaattcctagacggtgaagcattacaggaacgactactgaagagtagcgttttgtataagtgggctattggtagtacttaccgagatgttttccattccagtatcttggtaggagagctaactctatgtttttattgtacttgccaaacttgcatgcacctttacttgttatcttgtaacttggtgcagacttttttagtttagaattgactatgttgatgggaggcacgacctccttcacatgtgatcaggagccaaaaggttttccttttatcttcttggccatcttccgcacctcatcgatgcgagagtcaatgttctttacaaaagagt

SEQ ID NO: 105434 - DNA, 785 bp, Cannabis sativa
gaggtattaggatctcgcagtgttagtggtggatggcaccttactgcgatgtttttatccttcgcggacttattctcaccagcaggtgtgatggatgcaggttttccatcttggtgtgtatttcacaatttctcttcacgacggtggccctctcctcttgtttgagctacttagcttttctggccaacttcttcaaccatgggtgttggtggcttctttttggaggtgatcagttgagtgttatctagatgaatcttgatgccctgaagatgcccagagcgtctaggcatcttacagcatcggtaagtaaggaaacaacatgacttgagcttgtcattcccacaaacgacgctaaactattaacggtgaaaacttgtcaactaacttaaggtcggaaaatcaaaactcaaacataagacttagaatgaagacgaaaatatgaagattcaaaaacttaaagagttgttcagagcaacaatggaggaagagaaatgattttatttcttggagtgaagctttataatgatttttcaaccccatctcacatcttgaagaggggtatttataggctctaatagcctggggtatattagtggtcccaagggacatggtaacatccatgacctacagtttgtaagttgcaggtggtggtcttgcgccttgtacctttgtctggtgtcaggtggtcctgagttagtggggtagtggttgtgtgcgctcttggtcgggatgtcgatacttgcaggtgtggtgcctccactactcgtacctccttggcatcaaaa

SEQ ID NO: 105435 - DNA, 1463 bp, Cannabis sativa
ctacaatatttatcgttattagagatagagcagtccgatggtaataagaatcccttagttcattgtgaaaagagtaatatcgataggatccatttctattactctgtcgataatacttggttcctaataattagtattggcggctgactgaatcccctacagctaacaattagtattagcagcgaactggcactcccgccgctaataatagtgtctgattcgtaaattgatactattattagtggcggaaccagtcgaccactaatatttatattcttatttttatttaatatagattaaaattcatttttttgaataataatataaatatatttaaaactaaaaatattatttatttgaataacatttacttatcaataacactcaactatcagaccctccaccaccatctaatgtctcaaataaatacgaattcaataagcttctggttgggggagggttaggtgggtggtggcaaatggcaatggtagttgagcgaagccgaggaggaggaagagagaaagatttgggtaggtaagatttaggggttattggattaagttttgggtagatgaggaagttcggtggtggaggagaagaggttcagtggtggtggttggtggtctcggtgcctaggtttaagtgtctcgtgccgtgcgagaaagaggaagagaaagagacaaagagagaaggaaaatgaaagggagagtattttaggtagaaattgaaaacaataatatttaattgtataaattaattagtagtctaaattttgttagaggataatttttttaagcattaaaaataaattttcccatttttttttcaaaattataattattttacagaaagaaaatggttttcatcggatgcactaattataaattaaaaagaaaaaataggaaaagtattttctcaatttttgctttattttttttctctcacaatagttttctttagcaaaatttcacatctgaacaaaaatttcatttcaagttatctataaaattgtttgtgcttcagcttaagaacaaactatacccaccatcaaaacaattgtgtatctcctttattatttaaactctagctctaaaaattgtcacaaatatatttacttaaccttagatctcatatcatttaatgttgtcaacaaaattaagtatgtttaatagaaaattataaaagaaattacatgatgaccacagtgaaaaaagcattcactaaaacaaaatgaaacaattatttcattaaaattttattattaggataattgaccagcaaaggttctatggtgtagtggttagcactctggactttgaatccagcgacctgggttcgactcccggtaggacctcttttatcaaatatataaaagattgttacagaaaacttctttaaagttttgaatcttttgagaaaagtgaagcccatttaaagaaggttgggccaattttgaatcccct

SEQ ID NO: 105436 - DNA, 820 bp, Cannabis sativa
  modified_base (374)..(378): a, c, t, g, unknown or other
  modified_base (427)..(431): a, c, t, g, unknown or other
  modified_base (775)..(781): a, c, t, g, unknown or other
ctagctgagataatactgcttgtacactcaatcaattgattttaattaatcaattacaaatttaaaattagactatgtcttatttatgaaatttcattaagcaaggccctaattgtgaagaaaagagtttttagggttaatttgttagttaagaaacattgtatggtctaattaataaataatataaatggaaattttatttgataattaattataattagtaaataaatagttttggcatttataggattgaattggaaaatatggtattattgaaataagaataactagttgaaataaagtgtcaaaattataactagagaatggccctttactggccagccactctagtgatttttgtccaatattttatnnnnntttaatccatataattcaaccctaatccctaattgaaacactataaaannnnnatgatgctctcatctcatccaattgatcaatcaactacacttaaacctagttttttatgtcaaacaactagtagatgagagacaccttctataaagttttcaagccttcttcattgttcttcgtactcgagcctatagtaatagagttccatgcccacacatagcaagtcaagtactcagtcatagtgagtaagacgatggtaaccaaacctgaaggagagaaagagatccaggctcagatcttgataatactcagtgacagaaaggaacaacggttagagatttgagcgaaaagagttattatatttcgctgcaaccaatgtaagattttctaaactcttatnnnnnnnatttcattgttttagagatattcgtatttaggatgttaa

SEQ ID NO: 105437 - DNA, 529 bp, Cannabis sativa
ggttaaatagattgcatgcttcgttgatctattgcttagtaaaaagatttaattattgagcgcttcatcgtaattaattgtaatatgaagactaggataagtgattctctgcaaggttaatagttcaattctagaataaaatataatatttatcattgttgttcttgattgattgttggaggtagggaataattcttaactacttttaaaatcgtaattagcattcattatttattttctttttatgttatttaattgcaactcaaaattttcctttaatttatgtttgatagtgaataataattgatcatagtcctcgtgagatcgatccatacttgcttttatacttaaataattgaaagtattgaaataaaattaattagtaaatttgttgtggtaaacgacacgcacacttaaatatcttgaaaaacattaaaaccagggtacccctgggcttgtaaatatagtctctattgtatctagtggttgaggttgtgcataagatagttggtgtattttaatcattttt

SEQ ID NO: 105438 - DNA, 1024 bp, Cannabis sativa
gcatttttgtaaagacaagtttataactagtcttaggtttttcttatcttaaatgtcttgtactattttcatccgaacttaatacaattgtattttcttgcactaatattcacaatagaaacaattatattttgatcaaatatacagtacttttgggttcctccattgctcgtaatcttcctgtttaagtagttagtaatctaccatactttatgatttcgagaggttgtcaattctgccttgcaattgcagttataatctgccttaagcaaacttaaatatactttaaggattttatcactttgtatatttttaatttgcttgtatgaatagttatattatctatccattttctaggtttaagtacttctaccaaggcatagtgatgcctcgtttaatactttcctagctcgcgagaaccgttagtattcagttttatacgcgactcataacttttgattttcctctctcgtcagataggttataaatcaaaaattatagttgtttgatcccttctttgtcaaaaaggtttgatcaaggtgttataacgatttgacccctttctcgtcaaaaaggtttcgtcagggagttataacggttcgactccactttcgtcaaagaggtttagttgagaacctttgaatttaaaaaacaaaattgaaatggcaggtttgcattatataatgtatttccagatgaattccggttagtcatacataaataccccttaagtaatttaaagaattaaactttgtaattacttaatataaatgattctctttattcataattgaagtttaaagtttacctcaataatgcgagttacatcatttatttattgatagtagggtcgcaaatgttccacattctagttgttctttattagcgagctatcaaatcgaggcaatttatagactttgtctccaactactacttcaatgacatatggaccctcccagttcgggttgaacactcttaccgatgcatctctcgtatttgtaatgactcatcttaacaccaagtc

SEQ ID NO: 105439 - DNA, 595 bp, Cannabis sativa
cacaggttatgctattcaaatcatatcccaagggtatactgtcccaccagatgcaatcatctctacacatcatgtgaacgactcatctaaccaaaccattactcttaacccccatgaaatcaagaaatcggtattatcatgctcgtccattactccgccttgagtggatctacaccactcttaaacacaaacaaacttttctttctaaactgtgagccttatgcccgaaaagctcgcaattacccctaccagaccaccccgggtgcttactctaacacacctgcaatcctaactatttcaccgtttagtacagctcaaatcatgagcaatcctaataagcatttccttatatacacatactctttaaaccttactgtacttttccataactaacataattcagataaacaggcaattaacaaataatctaacaattagcacttactaaacaatgagtcgaatgagtcttcacagacaatgcacatagcatgccagtcttcaggatctttaaaccttggtagctctgataccatattgtaacgctctgactttcagggaagccacatgtgtgcttttacaaacttattatcactaa

SEQ ID NO: 105440 - DNA, 829 bp, Cannabis sativa
aataacacaaaaatgggaagaactagggttcccaaattttccccaaccggtagaccggttctacaactggaattccagttttggaaaaattcctagaagtcccaaccggtcgactagatcctacaggcctccctgaaccggaattccggttcagtgcaggaatttttcaaaatttcataactcgaccaattcaaccccaaacacctaaaactctccagacctgctaaataccccaaataacaattccaaaacaacaaaacaacccagcatgcacagaatcaaaatccaccattaatgagccaagcttgagttcaaaactccaaagcttgctcaaacaacaaaacaacaacaaaatcatgcatagatcaacataataactcataattagccctctgtaaacaacatctaacaactttagcaactacagcaactaaaaactcaattcaccattaaagctccaagctttgagtttaaaaactcaaacttggttaaacccaactaacatgcatcaaaacctgctttaatccattcaatttaaacatatataatctacagaaaacatcccataaacacagcaacaacaacatcaaattaccaagcatgcaactatcaattttttttttaaaattcaagaaaacttaggagagagctacaagaatcttaccaacaacttgagatcactaaatctttgctaaaaccagcttcaattaccaaggaagacaccagattggtgtttctcaaagaggggccgaaagagagagagagctagagagaaaaatggaattttgcttttctttgatttttcaataaaatgaataactaacatact

SEQ ID NO: 105441 - DNA, 739 bp, Cannabis sativa
aaaaaaaaacataaaaaacaagcataaaaaaagattagaactaaaataatgaaatcacacacctcaacaattattttctcaattatgtcatcaaacaaatcagttgattgaacaatcttcactggggatttaccctttccctaagagttaacaaaacaaaaccaaaacaacaacaagacacagagtcaaacaaacagaaaaccataaaataggaggactaacaaaaaaaacatgcaaaaaaaatatgcagaaaaaaaatgggaaatataatcaacttgaaacaaaccctaaaacaacacaagatcaatagaaaaaaaccttattaaatttgggagactttcgaactctggctccaactcaaaatcagagtcggagttctccaacacaggtcgagggtattttgatttagtgttcttcgaagtactagcacctagttttcttttagcaggaactagggaagtagttactaacaaaagcaagagaaaaaaaaaaagaaagaagaagaagaaactagaacaaaaatggaagaagcaaaaaaaaagatgaagaagaacaatggaacaataataatgttaagaaatattggcggctaaactacctaaactttatgttttgtaacacttaaccacaaaaattaaaattttggtagcaaaacctactgaactcccattccattttggtttgtacccatccgtccaaaaatcacagttaagtgtcacggtggactgtccacgtgtac

SEQ ID NO: 105442 - DNA, 678 bp, Cannabis sativa
aacatattttacatcatatattattaaattattcaaaactgaaaaaaaaaatgtgataaaataaacaaatattaaaaacttaattgctacaaaattaatatttctcagggattaaattgccaaagagaattaaacttaagagctatagatgctaaatatataatcgtattaatatatattgttgggaaaggtgctcattattgattatcttaaccattctatatatcattgcttagcacatgaaatttcccaaaggtacggtttatattttattgggtgactaatgtttgccctagctagctatataaagattttccttcataacataagtagtactttataatttatataattatttattttatgggtcacatgagtcccattacttaaatgaatattattgtattaaagcaagtgaatagattatatttgttttgaattagttaatgttatattaacaaagcatctcacatgtgcacatgcaacactgctaatacgtccgaaaaatgaaaaggatctaactcctactttgaaacaacaacaagtagttaattaattatttgatgagaatacataaattatataaatccattatatatataattaaattgaaccaatatgttatttttgcataagatcgtacacattcgagattgatcatcatcatcatcattatta

SEQ ID NO: 105443 - DNA, 1346 bp, Cannabis sativa
tgtatgtatatgttaagaaaagagaaaacaatctcaattgtaataaaatagttagaatttgaatagcaaaacaaattaaaattgttacactagcatttcttttaatttttttttatttacataagttcatgattgaatcttagattatcaattagattacttgataagtaaatagattagtttgaattttggggcacgggaaaaaaaaaaaaaagaataaagttaaagtggagcaaccgtttgttgaaaggtgaacaaaaggaggatgagactttcttttcctaattttctattcttttacttttcgaaattcatctcatggaccatttttctctctctttctttttctttttaaaaaaatgaaaataaaaattacttcgtaatatttaataataatggaactttaagtcccagcaaaataataataatactactgaaattattttaaaaaaatgaaataataataggaaagggtaaaggtaaaggaacggtttctgattattgatatggtgacatcagaaggaaagggctcgtggcgtttcgaaagccgtgaggcagaggcaatattgaattaattaaaataataattcggcaaaaaagaaaataataatatattaataaataaattcattagaaatgcgtgatattctcttcgtatttatttactatttttgggagtgctgaaaatacttattttggttttttttttaattttaaataaaataataataataaatataacagggatcgagatgacggtcttgaaaactccgttagaggtagattttgactgatggaaagaagaaacctaggtatatatttggagtcggtggatgtaattgagaagatctaaaatcaaacgacaatacgagtatacgacacgaaaaaatttgtgctttgggatgacaaattacgacatctattgagtcaaaaacaatcttcttcattttaatttgggcacagtatactagcccggcaagatacgacgaaacgaaacaaaataatatttttacaatacagcctcagtaaactaatgtaagaattttttaattaaatttcttttcgtacttacgcttaattgtttaattaaaattgttaaaattattattggtatttaatattttttttttaatatcatgtcattattagtataattaaatatttggtctaatataatttaaaaaaataacttttaaaaaatattacttataagaatttatctataaaaagtgttgaacagctattacctaatagcaatgttcttatttaataaattttgtaaaactttgagaatttaaaaaaaaaattaacatgacaaaaattaaaatttttgaatcttattttcg

SEQ ID NO: 105444 - DNA, 516 bp, Cannabis sativa
ggttggggatggtttatctattcggtttgctatggacccgtggctcccaagtgatgagtctccaattccaacttctgatctaagtgcttataatgatctaaaagtccaaaatttgttcaaggtgggggttagagagtgggatgaggaagtggttcgggacatctttaatgaaagggaagctgaaataatcctgggtattcctttagctataaatgatgctatagattcttggtattggttgaaggaaaattcgggttgttattctgtaaaatcagcttaccaacttctcatgaaccgtgatacaaatgttgatggaagggctggggattcaaagttttggaaagagttatgggaagtcaaagttccgcctactgtcaaagatgttctttggagggcagcggctaattgtctccctactaggaagagactttttgagagaaaggtgcctttggactatagctgtccattttgtttagtctctagcgaaactaccacacattgtctccttaattgtga

SEQ ID NO: 105445 - DNA, 608 bp, Cannabis sativa
ttgtgaaatattaagattcaagtatttctgggaattaaatagaactttctaaagacctaatggacctatcgcccaggttgacacctagcactaggcctagtgctcaggttgacatattgtcaacctgggctatttccaagcagttttccaaaaaagtattctggaattttttttttttttttgattataactaaagaagatacaagtaaatttggggagaaaatgacaattctaggggcatcaaaactgagcctaatgcctaagttgacaatcaacctggtgcgctagttttgatcactcaattataaattcttctttgagcattctttccaaaatggtcaaaaacgggtaggagacctcatcctccaattcaagaaccttggaagtatcaaaacatcaacccgaaagctccaaaaatagcactaagcgcccaagttgacatatggccaggtgcactgggttgtgctaatccaattcttattctgtctcgatcattcatctagtttttaatagtgactaagagctatcactactacaaaatacactatttacgtcggtcaacgctactattcacaacgttgaccgacgtaaatagtactcaaataatt

SEQ ID NO: 105446 - DNA, 535 bp, Cannabis sativa
agagatgtatagtcttccatttttatcaaggcatttatagcctttatggtttagactataaccaagaaaagtacatggagaggatctaaactcaagtttatgtctgttatatggccttatgttaggaaaacatttacaaccaaatgttttaaaggatttgtaatcgggttggatgttgaacaatgtttcaagtggagatttgtttcctaacacaggtgttggcaacctattatggatatacacagtggttctaaaggcttcatcccaaaacttgagaggtaaggatgcttgagcaagcaaagcaagaccattttcaacaatgtgtctatgcttgcgttcagcaagaccattttgttgatgtgtagtaggacaaggatgcctatggtgtatgccattatcagcaagataattggaaaaagatctaaattcacccccccaatcagtttgcaaaactttaaggggttttccaatttgaagttcagcttcagatttaaagttttggaatgccttgaaggcatcagatttgtttttcagc

SEQ ID NO: 105447 - DNA, 555 bp, Cannabis sativa
ggctgtaatttcttcattcatagcattgttccagcctttgtgtgcaagtgcttcaacaacacttgttggttccctagatcgagggttccaaactgcttctcccatgaacaccttgggcttgaagatgccagccttggctctggtgatcatcgggtgtccagcagtagcctgagtagtggaggcagtcgactgttcagcaggagttacagcagcttcagcaggatttaaggccaattcaggatcaaagaaggctgtagcaatgggactaggaggctgatgttcagataatcccctctcaccacctgaaggagagccagtagatgagcgagaagtgagaggagtgacagtaggatgtacctgagagttgtgagactgagaagttgaggattctgctccttgagtgcttaaggatggactttcagaagtgagccgagggcctgcaattggtataacagagggaaaaatagaccaagtagaactttgtataatcactggtttttcagattgatagttgttaagaaatcctgtttgaaagggaaattcaagttcattaaa

SEQ ID NO: 105448 - DNA, 766 bp, Cannabis sativa
gaagaatggcacacacttatcaatggacttcaaaataaatctgttaagtgcatccattcttcctgtcagggcttgtacttccttaggccttattggtgatggaatgtctattaatgacttgattttttttttcaggatttgctttaatacccctcgcgctaactatgaatcccaaaaattttcctgaattaactccaaaggaacattttttcaggttcagcttcatgttatacttctttaatatcttaaagcattccgcgaggtttgaggtatgatccctactctttattgattttaccaacatatcatcgacgtaaagttccatgttcctccctatttggtttgcaaatatttcatttaccaatcgctgatacgttgcccaagcgttcttcagtccaaacgacatggctttataacaatagagtcccatgtttgttacgaagcttgtatgttcttgatctgggacatacatttttatcttgttatatccagaatatgcatccataaaggacataagctcgtgcccaacagttgcatccactaactggtcgatcctaggtattggaaaggaatcttttgggcacgccttattcagatcagagaaatcaatacaagttctctatgttccgttaggcttcgggacgagaacaggattggctatccacgagggatagaacaactcgcgtataaagttgttgactaaaaacttttccacttcctgttttcgtgcccctagcctcttggattccaagggtctccttttctg

SEQ ID NO: 105449 - DNA, 1892 bp, Cannabis sativa
  modified_base (151)..(162): a, c, t, g, unknown or other
aatctagtgaactgacaaatcattaaaattaaacttttgaacatagaatcatgattatattctactgtgctgacgacactataatcataaacaaatatatatttgtatatgctctggacataatagaatttatacattaaatataatcatnnnnnnnnnnnngtgaaccatgcaacataaaagcaatttctgatcttttattaattagtaaatctgactatattgaaatggattttatttagggcacaaaaccaaacatgttgaacttccaaactcgagttcttctcatagttggccttctattttaacatgtccttttgaagcgagtgcataagtttagcgaatgagtgcttcttccaaggaatctagaagaagaactcgagatcttcgatatattcaagtatgtcagtcgtaatcaaagcgttagcctcgcaacctagtagcactacctcaataaacaagcacaagccaagcttgtacaagtctttcgggttctaacagtttgagaacctatcttggagtgcttatgtcttcacactatcagaccggttgaaatatttgttgggggataattgtaataaccgcttagctatattataaaaattaatagattattagggcttagttttagaaatagacttctatttattatttacacaattatggagatttatttgaattctaggtgtattaattatgatgtatgtgaaattttacaattttcattttttatgtctagtcatagtggaatgcgacgtatggcttgtatagtcacttagatatggtttgataccttagaaataatagggcaatatagttagatatttggaatatcgagggtatccggggttatagtgttggaccattttacccattagtgtgttgattacttcttgttcaagtacgggtaaaaaggtcattttaccctagattttttcattattgatttttcgtaagaatttttaattaatccctagttattgtttaattttttaagctgaaaagagatgagattaatcttatagtgacacttagcattttaaaacaaaaattaggaaaatctcaaactctctctctacctccttgttcggccatcaccaaagaaccaagaaactagattgttactctcaatttcaactagaaaattaaggatttcaactagagtttctataggttaagacagggatagctcaaggtaagcttctctccctttttatctttgaatttcaagaagaacaatttgatttttattgcataattttgggtttttgttgttgtttagtttggttgagtttataactattttttgaggttattttattgatgtttgagtaattctatgttgattctgaagctttttgttgagaaagacctaagcttgagcttttaagctcaaacttaggtcattcatcgtagatttgattccaggaggtttttcttgcaatttctagttgtattatgtttgttgtggcttaattaggtgttctataaagtttttctgagtttggggaaaatttgagtgagatttgcaatttttagggttttattacagagaattggttaaccggttctgtagaaccggttaactatctctccaggaaggaccctaagaactagtttactgttttggaaatgtagtttactgatataggaagtttctagagctttagttttgatgtttcctcgatatttaggataataccacactatttatcgatagtaaaacttttagttttaaatttaagtccacaagaagtgatttagcgtatcacttatcagttttacatatgttgttacataggggcctgtaaatcgttgagcagcagttttcactcatattgaccggcacacctgaattcagagtcaaggtaagattagtataataatatcat

SEQ ID NO: 105450 - DNA, 609 bp, Cannabis sativa
cgaggttgataatgtaaatctcttcacttctgcgctgaagacataacgctccatttgacaattgcaattcttggtgacaaggtgaacttcaacagtcaacacaacgctccatctgagagaactgactcgacaagatgtgaatctcattgaaagatgtctggagctgattagtgaaggtaccacgagcgtgccttcctatagcgagatggacacctcgctattagttgtttgggtttacccgactgttatacttagtttgtgtattgcgtattatacgctaagtgtcctaatagtcattatatcttgcctacgtctcttcatgcgtaacgaggttgatgccttgctttgcacattcaatgtcgtatggtttctcgttgatgcgcgaggtaatagtttgtatatctttatctcgcgtaagaccttatagtcagcaagttataaatatactctgtcaattccgcatttaatgagttatttcattttcaaatataattatcattatatttgttgattcgtattcttcctagtttgacacatatcctcctttgaagtgcagccgaatttcagatataacagaaagaatgcaagaaattaattatcgaaatcaaa

SEQ ID NO: 105451 - DNA, 654 bp, Cannabis sativa
taaagattatttttattcaaaaaaaatgttaattttttttttattttaatgttatgttgattttttaaattttttatgaattctcgtggattgctgatatataaattttgttgtatggtatattattattcttaaatatttattttttattgagttatttgcagcaaaacccataatactttcattttgctttcacttaaacccaaaactcaaattttagcgataaaacccccaatactcatattctgttagcactttactacttccatcaaattttgactgttaactgtcatgttggattgtccacatgtatgcactatacacgtggcacacttttattagtccacataaaatttataatttaattatttaaatattataaaatttattttaaaaaattaagcttttaataaataaataaaaactaaaatatatatttaaaccgttctctctcttaactctctctcttttgcaaatctcacgctctctcttctctctcttttttgatctgtgtgcaaagaaaattggaaaaagaggatgctttagcaaaaacaatggtgagatacagagctctgcagccagacgtcgccgccgataaaaccccatcggacacacctcatgctatccccaaccagcttctctctctctctctct

SEQ ID NO: 105452 - DNA, 786 bp, Cannabis sativa
  modified_base (62)..(68): a, c, t, g, unknown or other
ttatttaaataattgtattatgttaattatattagtctaaacctaattaaaattgaattagnnnnnnnattaacttttaaaatatatgaaaggttgctgcacaaagaaacacaaataaacacaaagacgtgcagagcctaaccagaaaagttgatgccctgagccgttttatctcccggtctacagataagtgcattcccttctttaacatcttgaaaaagtgtcagaagtttgaatggtctgacgagtgcgaggaggcattcaaaaaactaaaagaccacatggccaagcctccaatcctgtcaaagcccgttctcagagaggacttgtttctgtacttggccgtctccgagcacgcggtcagcgcggccttagtccgggaagaagagaagactcagcatgccgtgtactacgtcagcaagcgcatgataggggcggagacgcgataccccgtcattgaaaaactagtttttttgcctcctaatggcctcgagaaagttgagaccctatttccaagctcacccaatcaaggtgttgaccaaccacccactccgacaggtcctgcaaaacccagaggcgtccagaaggctcctcaaatgggcaatggagttaagtcaatttgacttacactatgttccccgtatttccataaagggacaagcgctagcagacttcatcacctaatgtaatgaagccgaagcaaccacgaacatactgacaccatcggtcccaacgtggaaagtatttgtggaaggagcctccaacgagaatggatccggagcgggg

SEQ ID NO: 105453 - DNA, 551 bp, Cannabis sativa
gtacccctacaaaaataacataatatttataccattacaatataactaaacaaaatataaccgaaagacttacgagtttgcaagaagagataaggatgaagcgttgagatatttagagcaagaaaatgagtggaatttggatgaacatcttcttagtaagattggaagtaattggagaagtctcattctaacactaatcacttggatgtgttgaaaatgaacatcatcaaacaactcatcaaagtctatgtcaagccagcaatcaggtgatgaggtaataactttgtaccatggcttgcatacaattggaatcgaatgaagtttgtcacgtaatgttaacttggaaatgattagtacaagtgcatctcctattaactcaccccaattacgatattcgtaagattgattttccattatgtataatattcactgaccatttgtatatatatagtccttattattcaaggagagtttaatagtcgcatgcagaagcctaatttaattatatagttaatgtgtatttacttttctcattgactcctcatctgtac

SEQ ID NO: 105454 - DNA, 1518 bp, Cannabis sativa
  modified_base (1177)..(1177): a, c, t, g, unknown or other
tttgtgtttctccttaagctgctggccaccaataaatggtgggtcacagccatataaaagcttcaaaaaaaaggtggctaatcacttagggcaaaaagactgaaatgcccttacttccctgctaagttatctcgtaaccctaggggtaaaatagtccaattttgttatttcgttaaatcccaatattataagatgtacaataatagttccctataaagtacttgatacaaatttgtatccatgtgactcaaattgccatctgacccatttccactattactgggcacaaaaatgtgaaaatatgaaaattcacatatagcatgcatatcacacctataatttaattaaatctctaaaattaaaaaataacaatcataacatctattttcataaaaatatggtttagaatgcaaaaaatatatataatcacatattcagattgattagtaataatgtttcactaatctcatgtctaagtataacaatcattagaattatccccgataaaaggattttgtctctgaaatctaacctgaataaatatggatattgagtcctcatttcaaactctaactcccaggtggcctcttccaccttgctattcttctagagtacattgactaatgatatagtcttgtgtagtaaaactttgtccttcctattaaggaactgaactggtcgctcctcatacgatagatctggtgccaactctagggcatcataactcaagacatgagttggatcaggcgcatactttctcaacattgatacatgaaaaacattatgcactactaacaatgctagaggtaaagctagctgatatgctacttgtccaactttctagagaatttcaaatggccctatgaacctaggacgtaacttgcccctctttctgaagcattttacacccttcattggtgaaatttgtaggaaaacatgttctccaacctgaaactctatgtctcggcacttaggatccgcataactcttttgcctactctgggaagtaagcattcatgccttggtcttttcgatggcctccctggtctttttaactaactcaggatccaaatactttctttctccagttcatccaagtgaataggagatcgacactgttggaaacttattttactaagatctagatttactaacatgtatgttgattataattctntaatctaacatcctaaatatgaaattcctaaaaataataaataaacaccttagggattaagtaatacttacagtgatggcagaataataatatgactccttccgttcagatttctaacccttgatcctttctgttgcagagtatgatcaagatttgaacgtgcattcttcttctaatgacgattgaactacatagtcttcctcattgtactgagtattgttttgatatgtatggacatattctcaacaccaagaagcacaaaaatttcatgaagaaattcaagagaaaatagcctctaagcatcatacctttcttggttttcttcgtattcctcgtcattt

SEQ ID NO: 105455 - DNA, 5636 bp, Cannabis sativa
caacctctttggggcaaaggagcagcttttccccaaaagggtttctttcctatcaatgaatttccacaccaaataaagttcaactctttcaagccttgcaaactttcccatgtcgaaggaagcttggtttcagggagaccctcttcctctccctcctctgtctccgttactgctccggatgttactggtaaccatgtgattttttgaacatccttttgggagctatctcaccctgataaatgtttatttattattctataatgtgttttgatacagaggatgatgggagtagctttattgactatagcctaagtgaggctgatcctgaggttcgtcaaattgttgataaggagaagcaacgtcagttcaaaagccttgagcttattgcttccgagaactttacttacagggcagttatggagacagttgggtcttgtctaacaaacaagtactctgaagggttacctgggaaaaggtaaaggcttttagtttagttccctctaagcttacaatttttaatggtgagttttagctcttatttttatttgttatatatgtttagatactatgggggcaatgagtttattgatgagcttgagattctttgccaaaagagagctttagatgcttttcacttggatgcaaaaaagtggggtgttaatgttcaacccttgtctggttctcctgctaattttgaggtttacactgcaattcttagccctcatgatcgaatcatggtatgattttttagtcttgttaacttttgttggtcattgaaattttgaacaactcttgagttatctaatatttttgcatttaacttagggattggacttgcctcatggagggcacttatcacatggattcatgacagctaaacgaagagtctcaggaacatcaatttattttgagtccatgccttacagacttgatgaagttacaggtttgtttgttatttgataatttcaactcggagtatacttgtgttgttgatcacttgttttgatggtgagtgttaattttgctccaaatttaaatcagggattgttgattatgatatgcttgagaaaacagcaactctctttcgaccgaaactcattattgctggtgccagtgcttatcctcgagattttgactatcctaggatgagaaaggttagagtttgttatcaagttgcacatatttgtactaaataatctgtttcttcatttcaacaaacttatttcattcatcaaagaaaaactactgattgcatttgttgtgccttggaagattgcggactctgttggtgcattcctcatgatggatatggctcacataagtggacttgtagcagcttctgtggttgcagatccttttgaatactgtgacattgtgactacaacaacacacaaggtaatctattccaaccatcctttgttttggcaagaaattttgtgctttgtttaaggtctaaggattagtgtcttttgatgttaatggaaacttcggaaaacagtttcttgtgatagttatttgcgtccaaaaaattatttccaatttatattgtaaaccttttttataatagtaaaatgtatgctttctgttcatttgttctgacaaagttggattttctctattcagtctctgagaggcccaagaggtggcatgattttcttcaggaaggaccccattcttggtgttgatttagaatctgcaatcaacaatgctgtatttccaggtctacaggtctgtattttttgctgacttgtcataacagttttgattattttgttaagcgagtcattagtaaaaatttggtttcgttctttatgcagggtggtcctcataaccacactattggggggctcgccgtgtgcttgaaatatgcacaatcaccagcctttaaggcttaccagaagaatgtactgcatatttttttcaagttttattttatcttgatcattctagacatgcctttattaatatggcttctctgtcttgtaggtggtctctaattgtagagctcttgcgagtcgattgacagaattggggtacaaacttgtttctggtggaagcgataaccatttagttcttgttgatcttaggccattagtaagtttctttttgtattcttgctggttaatcaataatctgtatttgatctttggcctttagatatatgaaatcttagtttgtactttataattttttgattgcaaatataaatcaacttcttcagggaatggatggagctcgtgtggagaaaattttggacatggcgtccatcactctcaacaagaactcagtacccggtaagtatatctttgttatccattcctcatactcttcccttttcttagtttatggtaatttctatgtcaatcttacactacaaatgtttgaatgaaaaaggcgataagagcgcactagtgccagggggtattcgaattggatcacctgcaatgacaacaagaggattcaaggagaaagacttcgtagcaattgcagatttcattcacgagggtgtggagataacccgagatgcgaaaaagctagcttcgggtacaaagctccaagattttatgaagtttgttacttcaccagatttcccattatcgaatagggtgttagatcttcaaacaagagttgaagctttgacaacccagttccccattcccggagtctgagaggtatgttaccaaacacttatcataggtgataggtctttgagattagaggtaaagaaagaaaatgtctgcatgaataatatagtcgtcagtcagtcgaagcatgatgatgacagattttgggacaccagggggggagtgagtgatcaagataatttattcaatgtggatgaggaatgtctcttctctacacatggttttgtatacaaaacacttatggaattttgtctcaagaagctgataaatcatttcattgtatttttggtgacattggtttgttgtgggagaacaacaatttcctctgcctttttctttgggagaatactatttatttaacttgaccctctcatttttagtctttatttttcaccaaatttctgctttttggtcaatgagcttgataagataacttgttttgttttattagatcaacataattttttttattgtatcagtgtgttgaaaattttattttttattacaatttttttcttcagaaattaaaaataatttaataattaattctttttttttttgttgataaaatctttaagtgatggtgcaaaggaatcttccttctcttctctcctttatggatcccatcagagaaggggctgtagcctcagtagtgtatttttttttaatatacaatttgataatttaatcacataaaaagttctcgttaatattctttttatatgaattaagtcactgtaaaattaaaaaaatttattataagtggttattttataatggctaacttagatttttgctccctgaactttgatatgtactaaattatacctttcaaatttttcaggtcgttaaaaattccttctaaattattgagattgttggatttaaggacttttgttcaattttactaaacaaagtctgatgtggatgaaaatttagggggcacaattttatacttttgaaagattgggggcgatatcaaagttcgaggggcatgatttactatataaacaaccgtcatattagtaaaattaaatgaaattggacaaatgttcttaaatttatgttcaagggaattttttaacggtctgaaaagttcaggggatatgattttatacatgtcaaagtttagtgggtaaaaattctaattaagctttttataaatcccaaacggtctaaaactgtatttttaggaagaagagcctaataaaactatacactaatacatggtttttgaacattttttgaagtagaaacatttcatagataaaaattatttagagcgtaactccttttagtaatattttgagcaataaaattaaaatttctaaaaaaattgcaacccaaaaagattacgaaaggtgagagttgccctgttgaatgtagctaccaatatcccacctacaaatttctcctttgataaccactttaaaattactctcaaagataaccatcttcgctgcttagtgactaacaactctcgattagaaaaataatttttttttgagataaattgagaattactattttttagtacacattaactaaatataattacaaaataattataattgataaataccttcttttataattagagtaccaaatataatttcacataaattatcaaagttagagtccctaatatacataatggagatatgacttataaaactgattataaatataaaagaaagataaaagttaaaatagaaaatgaaaagtgaatatacagtataattttttctttttttagccatttttataagaataaattacatttttaaaaattatgaaaaaacattatatatttattaaaagttttttttctttcatttaggcccctgaaatgagtgagacttaagcgcagacttagtccgccttagcttagggttgaccctatctctggtgagaggcttgtcaatcgattgttgctcggtacaagcccaccaaatcatccttgaagagtccttggcaactatagcaagacacatagacctactccccactatcacatcacaattaatttttacccagtccacaagtagaggggtagacacaagagagtaaccataatttgaataacaataagtaataaaattaatatagtaatctaaacagattattattacaaatcttgtcatttctagctctctaaattgtatctacaacaggcccgaccctgggcataggcggactaggcctgtgcctagggcccactcagcccaggggtccaaattgtttttttctcttttaaaattatacatttttttactaattttgaaaaatactatattttttctaacataagggcccaaaaattctttttttccctatgacccactttgtttcagggccggccctgatctacaataataactgtatataaaaatacctcatcaatattaaaccccttactaccgagattacaaagaaatttaacccaatcccaacaacgagtgccggtattatcaaacgggataagaccctaaggggaagcatgcaaaaaaaacatattaattaggaagaaactgtaattacattaaaataatataaaatgagatgatacagtcgaaaccatcacgtgtcacgtgacgaggaagaccatgatgatctgaaattaccatattagccctactcgtgtcactttctcactctcccaccaactctttgctcaatgggtttgttgacaaattgacccattaccttaagaaaatagattatgccaactttttttgtccttactattcttttaattacacatatatttttttaaaattttattttagatgataataaaaatattggatattatataatgtttgcaatattatatttagtatttactagaaatctccaacattaaaaataacaaaaataacacttataaattttgtaatgtctataaaaaaactggaaaattttatttttcacatttaaataattttaatttattttttatatagaaatacacattgtaattatttaaaa

SEQ ID NO: 105456 - DNA, 523 bp, Cannabis sativa
gcttacagttaatatcactgtccaaagacttgatattaatgtgtgtttggtatcttgagatgtgattaactaatttttgaatttattattttattatgcatatttatgtgagcgtgttttatatttgttctatattcagctagttcatcttttgttgcctcaatatctgctaatattaattctattcctatgattaaagggaccaatttcaaggattgaaaagggaacttacttaaagttctggggtgtatagatttagaccatgcactaaggaatgaacaacttgcacctcttactaagaaaagttcccatgatgataaaagggaatttgagaggtgggatcgttcaaatctcatgagtctaatgattatgaaacacagcattccaaaagccttttggggcatagaatccgaaggggttatttaacaccctaactattttaggcatgttaacgtgatttttaaacttactatgcagctcgttgctaatcaacaaggttatcaaaaattgtgattaattaaaa

SEQ ID NO: 105457 - DNA, 573 bp, Cannabis sativa
  modified_base (27)..(29): a, c, t, g, unknown or other
  modified_base (323)..(340): a, c, t, g, unknown or other
actaatcagattgtaaagagttttatnnngggcataaaacctaacaaataccatatactaagagatcatatagtagagagaggtgatgtggcagtcttaaagattatgttagaacataacctagttgatccatccacaaatacactaccagcaaaatcttttatgggtcatattacgaatatgggattaagggagatgccaagtttactttttggtcaagtgggagattgttaggttttatgctctgaaaagcctgtaaagacattttttgttataaatattagttgaacattttgatatatgcttgaatgttaaattattannnnnnnnnnnnnnnnnntttatatataaatataaaaaaaatatttattcatatatacgattgtgacttatattgtacagaaaattaagattacttagccataaataaaatagtcaacaacatattaaaattatgaaatctttaatcaacggttgttaatacggtttaatgatgcccgttattcggtacaagcaatctcaattcagattgttgatgtagtatgcacatctaagtgaaattatatgtatata

SEQ ID NO: 105458 - DNA, 1545 bp, Cannabis sativa
agtacatcctccgaaactttctcatccgggcaactagacaccgcggaagacgataaacaagaagtagatgaggcatcagtatcatcggcagtcccatgggtgggcctggacgagtctttcttggaggagagaatcaagcgggtcatggactcctccaaatcggcgacctcccatgactcgggggctccgccgagatccttcgccacagagccctccatggcccgattaaagaatatgttgacgcaacaataatacgaagtgaggaagaagcccccaaataatttcgtcgctagggtttgaggggcaacagtaaacaaatcatcaaatggagcttgggtgctgtgaaaccctggagagaattaggggccaggatttcatgtgaatttggatgaaagagggattagggtttggagaattagggaagagagaaagaaagactgtgattcaagatccccagagagagagaagagagatagggtttgacgatgttattgttgttttattgggaatagagagagagagatgcgtgtgaacctgatgatattctttgccacgtggctcccgctttgtattactctttccttttattcacgccattcgatattctagatttctatttacggaggatagtctccatcttttcattgttctgcagattggtacaaaaattattctaattttcatatttacagttttttaatggcacatttacaatcacatcctttgttttatgacatattaaaacaaaaatttatattaaaaaaatactacattgttggtataattttcatttttgtttattaagaaaggatttttttttctgaaaataaattcttcactaatagcaacattaaaaatattcaaagcgagtttaccatgcatccataactaatttacaagcaatcatataaaaaacgccttaaagatataattgaaaagcaaactagcaaaatttgagatcttaattcatttaaaaaaaccaatgaacactttgtaattgtaaaattttgtctatttttttataacataattatagcgcatttggaaagacacatgagaattgaattagatgtaattagaagtaattatacaatttgacgtatttgtctagtgacgtaataattatttaattactatgaaattattatcttaaattctcattccccataagaattaagcatcataattacactgtgtaatgacgtaataattatcgtaatgtttgtaaataaaaaaaaaactaatatacgaatatatgatatctaattttttttaattaacattatttcttaaagttctcttttaaattatatatttaatagatttattcatgattttacataaaaattgattgatgaaatgtttaaaatcattttattattaatttttaatctatataagagtaacaaatactcaaacttctaagtataaaaaaccatacaccgaataactcaatatatatagtcaacatataaaaattattttaaatttgttatgaaatttaatttaattttatgaaaagtttttatttattatttatttttt

SEQ ID NO: 105459 - DNA, 616 bp, Cannabis sativa
ccccaaaaggacataggtagagttaagtagctaagcatggacctaaccatttccaaaagcgtgcgatttcttctttctgctactccattttgctgtggattgctacgggcagtcaattgggattcaatgccaagttcaattaaatgatctttgaacttcatatcctatattctccacccctatcagttcgcaagatgcttttgcccatatatgcatcactggagaaggatctccatgcaagtgacaatgttcgttcataagcacgcaattcagcatccaacttgtctatgttggatgagttccaattgttaatcacaaattggttaaactcaggtgataagctgttgagaataaaatgaactctcttctcttcagataaaacaattcccagcatagctgagttcaggaatttgatgttcatcatgagcaagtgtgaagtgatactctgaccaggagtcatcttcacactttgaagttcattcctaaaggaatattctagatgaggattggggtgtgggctacacatttttgacactacaaatatcaataaacagaaataaattattggttcaataaattcatacacgagtttagaaaataacaagtaaagcaaata

SEQ ID NO: 105460 - DNA, 690 bp, Cannabis sativa
  modified_base (312)..(334): a, c, t, g, unknown or other
cagggtagttttgtttgaaacaaacccgagatacacttcttaccctacccagagtgccctagttgtaaaaggcatcatctgggggagtgtagagagaaagggtgctttcagtgtggtatgccagggcattacaagagggattgccctcaactcagaattgaagcactgaaggctccagcaaaacccactccagcaagggtgttcgccataactcaggctgatgaagaagccagtcgttgaatggtgacaggtcagctctcgatcaataactttctctgtactgtttcactctggggccacacattcttatgnnnnnnnnnnnnnnnnnnnnnnnttggatagaccgcatgatagttatgaattggcgaagagttagttatctccaaaaggtggattaggtctatgccgataaggattgatgatagggagttaagtgctgagctgataaaaatgagcttagcagattttgatatcatactcgaatggatttcttgtaaaaatatttagccagtattgactgtaggaggaagatgttaatcttccaacctgaaggtgaagaaccgtttgtttttgtcggttcggttcaggtatctcggatcccggtgatttcggctttatcaagtacataattattgtgtgatgaatgtctaggttttctagccgtggtattagacaccactcggccagact

SEQ ID NO: 105461 - DNA, 1274 bp, Cannabis sativa
  modified_base (400)..(402): a, c, t, g, unknown or other
  modified_base (523)..(525): a, c, t, g, unknown or other
  modified_base (1026)..(1034): a, c, t, g, unknown or other
tattatcaacaaaagaattatggatcatatgtgcatgagggggagacatattcatgttgcactctttttcccttagctcaggttttgccccacgtactgggttttccttgcaaggtttttaatgaggcaacttccaaataattatgaatatgaaatatatattgcactctttttttcttagttcagattatgtcccactgggttttcctgataaggtttttaacgaggcaactataaatcatgttaacatacttacactttatgaaataagtaaagaatgtgttgcagtgggattatcgacataacatattcagaaaatatatggattgcactcaataaataagtatcaacacaagcagttctctatgaagataattctattaggattttatgccctaannnaaactcatttcaatataatctgattttttatcaatagaagattaaaattcatttatgtttacatgtggtttttatgtttatggtttaaaatatacaatttctgttaaatccagaacatatnnntattcacaattacagtgatgtcattacagtgaaagataattgtgattatatgctttaaaagatcatttcccatgattcatcattgcaatggattatactgatgtgatagtcagtgataaagcttacttacaccttggataagtgttatgttctttcgagaacattggcaaagtatgctagtatcgaatgtatggattatacattgaacgggaaccgatattgagcttggtaaagatattataatcttgtcgttgtatctttctaagtcaatatcactggttgatctgagatcaaaagatcttaatcctgacatggttaggttcaatctcaagagtgttatttatgctcttagagtagttatttaaagcctaccatttggttcgggtcacgcgtaaaacatgggaacatgatagtacaattgagtgggagtgctaatcatagatatggattctatagcttctatttagacataaaagtgaaatgatgatttccttcgagctnnnnnnnnnagagataaatggaagagctcttatataagtgattatattagtttattgaaatatcatttataggaagctaagtgatttaaggataaaatacattgaggggtgaaacggtaaatatgtgtctaatcggtgtaaatcatctatagaggatctttggattttatgacgatggttaaattttcatagcgtatctatatcgtgaaacatatagagcgttctacataattgagagtgcaattccaa

SEQ ID NO: 105462 - DNA, 616 bp, Cannabis sativa
tcagttatggttaccgagtccaacgcgattatgccttgaacgcataaccctaaatctcaatataatcatatacttagcatggcatagcatttacttaacttatatcactagtgtaattaccctaggctattaatcgctcatattagggtaataaccctaatcccggttacaattactcacatatatcatattcaacataagcgccaccatgcatactctacgtgtaaactactgtcttacttgttgtcccgcaataacagagattccaaacccctgggttctcctgatcaggtgtgccgataatcctagtcacacaatccaggatttcacaaatagggttaatccctaattccactttcacaaaatataaagttggcattcaaaatacagatgatcataaagacctcggaacaagctttccaacgatataaagaacgtcaaaaatagagtcccgagtcaaaagttatggccaaaacaaaatcgggaaaaaggatggctctgctaggtttatggcaacgacgaccataaatctggccgcgaccactgggttcgaaaaacccaaaaaaccatattttaaggtctaaaaatgctcactttttcatatattcgaacctta

SEQ ID NO: 105463 - DNA, 1725 bp, Cannabis sativa
caccaatactgaggacaacaacacctttcttccccaattaagtgttgcccaatatcagcaacttctcaacctattagccaaccaacaatcgagtgttacacctgctgatccgagttcctctacaggtaactcaggtatgattctaacttacaacaccatctcagcttctaaacaatcttgaatacttgattcgggtgctacaagacacatttgcaataatgctagattatttcaatacatatgtcctgtaagttctactaatcttatattgcctaacaatgatgtccttattgttaatcattgtggtactgtcaaaattaatgacactctaacccttaaggatgttctttatgttcctaaattcaaatttaatatcatttcagtgagctgccttactcatgacagttctgcctctatttttttcaagactaatggttttcacattcaggaaaatctcaccaagagaatgattggcaagggtaatgtcaaagatggtctctacatgtataatcctatacctgaagatgctcatgtgtgcacaattcctgctgacatatggcattcaaggctaggacatccttctaagaatcgtctatctttactaagtaatactttgaattgtaattttgattctttgcacaaaaaactgccatgttatatctgtcccctagctaaacaaaagaaattgtctttttctaataatactactttctctactaataaatttgacttgatacattgtgatatttggggtccatatcatattccttcatattctaatcataaatactttcttactcttgttgatgatcatacccgatttacttggatatatttgcttcaacataagtctgatgttgtcaccatcatacctcaatttctatgttatgttcaaactcaattcaattgtgttttcaaaaaattcagatctgataatgctcttgaattggtttttaaggatctttttttaaaatatggcataatgcatgatttcacttgtgttgaaactcctgaacaaaacgctattgccgaaagaaaacatcaacatcttttgaatgttgcccgtgctctttattttcaatctaaagttcctatacgtttttggacagattgtttaatgacagctgtgtttctcatcaatcgaactcccactccaaaccttgcaaacaaaactccttatgaattactttttaatgagatacctgattacactaatatgagaaattttggttgtcttgtgtttgcttctactcttaccgctcatagaactaagtttgaaccaagagctaggacttgtgttttcataggctatcctaaaggaattaaaggatacaaactctatgacataaactctaaacaaatttttgtttcaagaaatgttgtctttcatgaaaatgtgtatccttttcataaattaaataatgacacaagcatgcttgatcctttttcgaatatggctttacccacatctcatgttactctaactcctattcaagattttcctcctacaggtactagtatttctgccactcatgattctgtgcaggaacttgcttcagccgagatgaacatctccacaccagtccatataacagattttgcttgcacaccaacatctgctcatatttccccaccagcaagtgatcaaacagacacaccagcccctcctgatccacctgctgctgtatcgtgtgacactacacatgttgactgccctcaatctca

SEQ ID NO: 105464 - DNA, 8157 bp, Cannabis sativa
  modified_base (7435)..(7446): a, c, t, g, unknown or other
ttttattgtcatattatttttcttagaattaatttaagtaactattgtttaattaataatattttgaattttgaaaacttatgtataaaataattcaaaattatacatttcactaattttaatgaataagtttttgataaaaaaaatgtataaataaaacttctatcactatccttgacagtgtttcaaggtggcaattagggaccattgacctataattctaagctccgataagctagattatttattgaatctcatcaaccaaagaatcatgtttattaatttcatgattattccactataaatatggaattgaactcttagtaattatagaactatatttctcctttgctctaatatgtcccataccaagaacattcttcacctgatctttgcacactctgttagtatttggtaaaaaaaccaaccctcttttcttgtaaataatcttttgaccaggtcacctttcatacttctgcaaacactccaaaagcacagaagcttcactaatcgaagaagaagaaaatgacatcatttgcatagaaaaggtgagacaaaggcgaagtaccacgagaaatcttaatcccaaagatctctcataactactcagctctcaaaaccagcttagagaggactttgctacaaagaatgaacagaacaggtgaaaggggatccctctgtctaagaccacgattaggattgaagggagccaacagagcaccattgaggaggatcgagaaactaactgaagtcacgcaagccataagaagaagaaaagccttttgattaaaaccatttgcctttaacatacgtcgaaggaaatacaattcaatacggtcattcatatccgttttaaccgccctaagacccttttttgcctttttacctataatgaaacgaagaacttcttatgccataagagagcactcaacaatccatctccaaggaataaaagcaaattgattaggagaaacaagtctatcaatgatttctttgagacgattcatgagaaatgattttgtaaccgaaattacataagcttatcagacggaattaatcaagcccaacaacattctccaccttcgggatcagatagaggaaggtgtgattcatttgtttttgcagcaaactagtcctaaaaatctccttgaccatgcattacacctagccacccacaatatgctaataatttggtaaaaaaataccagagaatccatccaagcttggggccttcaatgggtgcaacttgaacactattttatggatttattcatcgttttcctcctcataaataaaatctaagaataaaatctcgaaatcattgtcaatcactgggtttgatgtatggaaaacctcagcaaaattagctagaaaataatctccaatcattcttcgatctcaaatttagatccaggcaaagattcaatacaacaaattcgattacgccttcttcgaatcaaagttaaatggaaaaacttcgtgttcccatctccatatcgcagccaacattcttgagatttttatttccaaactcgctccattttattctccatatccaaaatatcaagttgtaaagtcacttcttcttccagacttgattgggaaaaagccacactctggcataaagataacttttgtttgagctctctcaattttctatcacaaaacctgaaacttcgttgattccaaatcttaagagccttcttcgtattgctaattttttcgattatgataacactatgattgccttgcactgttgagcaccaagcttctaatatgacctctcaacattgggggctagagatccacactttcatgaacctaagatgaaatttaagcttttccccaacatcccacagtttcacaagtaaaggcgcatgatttgagcttaagatcaaataataaataacttcaacctcaaaaaaaatctaagcaccattgtgtatccgtaactactctatcaaggcgctttcaaaccctttaattggaaattttggaattttgccatgcaaaagaccccttcaaatcccaagtcaacaccttctgtgttaaataagaagtctctaagtaagtccccttctctatagtgaaacttgcactcatcttctttttcagaatcatcaaggatgacgttaagatcttccatcatcatccagtgatcaaagtaatcttggatttttctgtgatcttcaaattgttgtaactggtctcgtacacacaaaagagattccatttagcatacctaagtgcaggggaaactttagctttgaaacctaactcaaaaacttcctccatttccaactataatcctgatctccacgataaataatagcctcccgcagtccccaaagctgaaatacaacaactattgataaagcctagtcgattcagaacttgaactattacctcgacacctaccttagtctccgaaaggaaaagaacgtccacttccgcttcccgaatcaaaccccgaagggttcgttctgccacaggccttcataacccacgatagttccaagataggtacctcattagagaggtgggggcatgcttctagccgcctcctcgccaacaccaaaattttgatcatagtgaactatgacatcaatacaacttgccaataaattagtgatattacctgagataccatcacctctgctactcgtcaatttcctacaacgacgagtctttacccctgatgatttccttctcaccgagctctcaacctcacctttaatcttttgtcttcgacctttaattttcgaatgatctcccgaatcagtgaaaccctgcgagaaaaccagattagcttctaggctttacagagcttcctcaactgggatagaattcacttcggcttccaatttctcagtgacttccgtgatcgaacacctgctaaagcttggtacatgggtataccaagtatgagctttgcagtttcgagtacctagtagatcaggtggatttgagataattgattattgagctttgtatttatccatagcctccggcctaatcaatttcataaacaagtcttgtttctcaggtttatcaataggccaacaaaccggagtaggttcaaggaaaagatggagcttacgggattgaaaaatccattcatgaggaatttctatagattagacaatagaaggcccaacatctgggatctcgccaagggcaaaatcagattgagaaagtccaaaaattgtaggactaaatttttattagtagtaattttgaacattttgttttctaaatcaggcactacttcccataaaaaaaaagtaagaacaaaaaaaagataaaaaaaaaaaactaaaaaactagactctacttaattcatcaatatttggcaagccgaaaagcatgcttagatggatccaaacttcaaactttgcgagaataaattatgtgccccatgagcttcctttctaggattaattttaaacaatactttgttcttgtagttttgcaaattcaaaattttagaagttacatacatatcacaacgtgacttttatctcctagctaaaagatgaaaccaactaaactctatgactaatctatcattatcatgataatctcaaaagacaacagcataagattaaaaaaaaaaatacaaattttattggtttttatactatctgataaaaaatatataaaaaaaaaatatatttaaaaaaaaaatcaagaaaaagttaaaaaaatatatataaaaaaaaaaaaaacataagtaggagtaactaattatcataagaataactagttactttatactatttttcccatttttttatttttgttctaaattttttccataaaataattttatcgaaaaaaactacatttttgtaaacttacaacttaaaaaccataaaaaatgaaaattcaaaaaaaaaataaaaattacacaacatctttgtttcaggtgttagtgtgaaaaagactaaaatgtgaataagttttcacaaataagctaccttaattttggaaggtgagttctatttgtcaactttgaataatgtatttttgtgatttagaaaattcagtatatatagcttaagcaagtacaacctataaaagcttttacaaaaagcatgaattgattattaagcaacccatattttttctttcttgacattagacttcctgtctaatctaaaactataaggacataaaaacaccataacaattattatataagtactcgaatctcagaccaagtttgacatttttggtgtatttgaaagtaattgtagaattaccaaacactataattacaaatattgtaaaatacaatgtgtatttggctgtaaactgtgattacatataaattcttattttcatattttataaataaatattaattatatagaaaaataacattaattatctaaaaatagtaatagttttgtacttagactcaattctcatgaaaatcataaaaattagaaaataattgacacccttcaattatccccaattacaaacacatcaaatctggtaactactccgaattacactcaattccaactaaacacttactttccaaacaatgtttaagttaagctacaatttaatgtcaatttatgataatttgaccttgcatagctgcatgtcttttgtcaaagttgtttggccaactacttctaatactaactaagatttcgttttttctttataaatgtaaattatgatcaaaacctatgaaaacaacattcaattttagaaattcacagttaattaagtggtaaacattgatgatgacaatgacaatactaggggaagaatttataaataaaagcgatatgagtagtttgacaatcaatttccctaattcaactatttaactaagaaaaataaacaagtggattacaatacgctcaacctcgtaacctaaggtccatgtacaccccaaaatatcgagatatttaaactatcgaactgacaccaagctatacgagcagccatatgaatgcaaccttggacaccgacttttggaagctcgctctttgcaaagtaggttgcttgtaaagagcgagcttctaaaagacaactttgaggtttctcaaggttatctttatgtgtggcattcgagccatataccgacactaggaaatattattcaatttacttcaaagagtggaatattcaatgaacatgtataactgaatttagtcagaaaaatattgcttacttttatgatacatgattcagtataatacaggtttgtttgatagagtacctttctagagctaattccataggcacccatgtgaatgttcctttacaaacgcagaaagtaagatttacccatggcttctgggatcaacaacttggtgaacctttctggcttcagcacttgaatactgtccaactactcgggcatggggcaccgaggcttctcctcgagcaagggcttccacattctcaagcaggtatttttgtggaagccttcccactacattgccttcttcatttccttctttgtcaaggaatgaaaagtgtggtataccctcaacaccgaactcgtcaagctcttgttcccactttgtgttgtcaacattaagcacaacaaagttcacccgatccctgatgagaagaaaccaggaaaaaagaatcaatgcccatgaccacaaaaacttcacctaaaacagaaaagtttagaattggattgataatgaatagcaagctacagcataaaactttacttgtactcctgctcaactttgtaaacatctggtgctaattcgcgacatacttcacaccagtctgcatagaactccacaacagtaggcttcccatttgaaagagcctaaggaatcgaccaacaaatctatctattacataaatttacacagcattcattgatacaccagaaaatacttcacctgatgcattatgagagaaaataacagaacgaaaacaaatctacaaatgcggatgataaactaacaaatagcattgctgctatatggtatatggaaatgaaaacattgcttctgtaagagatggataaaagggcgacttccaaagtctatattttccccaaataagactaggaaggctatggaatacggcatagacaatcataatgccaattaagaacctcaaattttgattaacgagtcctgaaattttgtcattgaaccctatattactaaattatactgcatacaatcattaagatatgccatataaacaagtccaccacatcttaagaaagagaaattcaattgagttcttcacaccggcctacctactaaacccgatgtccatgatgagctagaactaaaatgagaggggttgtattaacttattgacaaacctcttcataaggtaacgcagtagctgctatgtccttcaaagaaacaccaaaatccagcctgcctgataagaaaagtcccacagctgcaagagtagaaaccactgctatttgcttgttgagacctttgcttggaaattctggaaagccagaaccttgggcagaactggtagcttggctactgctctcattgcttactgagctaggctcaacaggcaacttcttctgaaacaatgataatagctttcactttttgatataattggtaaactagattatcagccatagaatcaacacaggtaaaacaaatcaaattcaaatatggaagaaaaaacccaagtccaaaaggccaaaatgcatccagaaaagaaggaaaaaccaattttgaaaacacaaactaatattgatcatatagattcagtaatactttgagtgttggtttactcctagaactaagaagaggaagatagaaatagaaacataaagaatagagagaataaggaattcatatattctttattaataattggtaaatttatacaaagctaatgttaggttgtatcgttcagcaacttcaaagttcccaactttatattaccataataccaaaatcatatcttcatacaaactaaagacatttccacaaacaaaaaaaaataccaaaattattgcaaagggtacattcctaaactccaatttctgtaaattaagaggtgcagataccaaaattcatgctcaatggctaaatgcccagaaaaaaataataaaacccaaaatctttgcaagtagagggaaaaggaagagataaggcttaccacagtggagggttggggttcggtgggttcaggagtcgtttgacatgaaacgatgtgtcgtttgtgggtcttggtctggaaatgaacagaggtttttactagggactgggaatttggaaaacaggtttggaatctatgaaaagctatgggattggtggccacacgagccattagagcttcttcaattcagtttttccagttctctttctctgctaattaaactaacagatattcaatcaataataacatattatattattcccatggcaatgacttttattattattattattannnnnnnnnnnnttattattattatatttttttttgttgctgtcctcaattaacttattattagttttatttgtaaataaagcaacaattaatattttaatttaaaaaaaattatagccaagcaaaagcaatattttatttttattttggcattgttgtttttgatatctttcaagcttggaattctttttcttctgtcacaataaaccattttaaaaggattaaaaaatgttagtgcttttttttttttttaaaacatatgttcattaaaaaaaattagacctcccggttaggatattcataaaaatagatactacggctagacgcctaaaatgattaatgattataggtaaaagctcacttaaacatatatatatactataaagttacaagttctcacagtaatacaaaataaataactaataaaagaagaaatgattctattacaaaataaagaataattcctaattggcctttatcttttcatgcttcttaagtttggtggtctcgaacttctcccgtgcctctaatttgacattttggttgtacattttttagatttctttgtgttacaatataaattaatgaagagcttattaggagctctttagaatgaattaattaatgctagcaagagaatggtaatgtgaaacattaccttgtttgttttgaaggtttagccttagaatgttattccccaagtaatataactacccttaaaga

SEQ ID NO: 105465 - DNA, 946 bp, Cannabis sativa
acttgtcagaaaacacatgtagatagataaaataaacatactctataataatatagtccataagcacgatctaccataaaattacgatttctacccttctcaagtcaaaattacaaaaatgctcctcacacaccaacagggtcttaaaatgcaatttatcaatttagtttcacatattaaattatattataatataatttctcattaatacttaataatatagttaggtttgctacaaagtaaaactcgatatttttttatccttttttttgttgaatttttatttattattttctattcagtcgatggaacaatctcagtccatataatgaaaaaataagagatttttctaattaaacagaaaaattaagcataaagttcaaattgttttaatattacccattcatgggtaatacccattaagagtgcacccatataagtatatattttgtgttttattgaatatgtatttatgtatatatatgtattgtgtatattatttatataagttgtattgtatatattgtaagtaatatatatatatatattgtgaataaaaatgagataggtgagatttaattagtttagagataaaaattttaaaattatgttagtgtgagatataattgattatatatgtatgtatatattatttattttcaaaaactaatctatatatatgtataatttagtaactagtaacttgttactactttttataactagtaagtaattaaataattaaaattttaatttgttgtattttattatattgtaggttgtgaggtaatttttaaggttcgacataatttggtgttgatcagattttgacttgctataggtatgtacattcactaacttttttttgttattataattaattatcaatacatgcttagtggagtttgaatatctttaataatcatccgtagtgaagtaggttctg

SEQ ID NO: 105466 - DNA, 1316 bp, Cannabis sativa
  modified_base (874)..(901): a, c, t, g, unknown or other
tcacctaatgatagttttatttaggcccaattagtattgggcttattcaaagaataacaattatttaatgaaaggttaaattcctctcctttgggcccaattagttacgacatactgaacccagccctccctcacatgaacaaccacatttgtgaaggtccatttgccttatttaaataattggattaggctaattatactagtttaacctaattaaaattgaaataacaatataattaattttgaaatatatggaattaatttttcataggattattttaaaattaattttaaaaaaacacacttagtttaatgaaatattctaggtagtaatttctagtaactaatttatattttctaattttttattaagtaaaaaaatacatttaagttgaaaattaatttatttattaattttagaccaacttaaattagattatttttcttagaacttaaatagaataaataattaagttgattttattcaagatacttaattatttgtttctatttcttgaaatttaattgaataataaacatatatgtaagttgaaaattaatttctaattaattttagaccaacttaaattagaatatttgcttagatattaaattagaattaataattaagttgaaatttttgtagacacataattatttctattttaatggatttaattaaattaaaaaaattatatttaagttggaaatttttcaatttcagaccaacttcaattagaataatttttcaaaatatattttattttatattaatagtctattttttttttgagaatttcaaattacatttttatttaaatgtatatatttcaaaaaaaattaatttttaaaattagattaaagttgaaaattnnnnnnnnnnnnnnnnnnnnnnnnnnnnaaatcaagtaattttcattaatgatttgattaaaattaatagattaaaatatgttatatttaattagaaaataataattagtttatgaattatcaagatagacattttgtaagtaaactttttagtatttttctagatatatttaattaaattagagaattaatatttaagttgatttgttcaagacagttaaatatttgttatttttcttaagggatttaattaaataggaaaattatatttatgtcaaaaatgaatttatttaattttaggtcaacataaattaaaataacttttccagttttattttattttattttaatgagttcttgaaaatgtatttttataatacattggatttagaattcatatatatatatatatatatttgtagaaaattaaatttgagttgaaa

SEQ ID NO: 105467 - DNA, 2567 bp, Cannabis sativa
  modified_base (1221)..(1221): a, c, t, g, unknown or other
aataacgcccagaaaagatatgtgaaagagataaagaatgagcagtcgacctttgccccagaaccttccaagaaggtgaaaaccgaagaacctcccattgaattcacggaggaagacaagaaaaacctgagatatcctcatgtcgatccatttgtgattaccataccactcgccaataaaaggatcaagagggtgttaatagacaatgggagcttggtaaatatcatttataaggagactctacgaaaaatggggctcgaaaaagccaaattaaggccttatattgtgaacctttgcggattcactggggacagcattgccagtcttggcataatcgagctcgcataaaccttaggggaggcacccttatctgctagtgttatgcaagacttcttagttgtcgacctgccatcagcttataacattttgttgggtcgtccagcactaatcggactaggggcagccaactcgatcaagcacctatccttaaaattctaaacaccagatgacgtgggagtggtacgtggcgaccagatgctggctcgcgattgctatcgcatagagctacagcataagaaagctggtcatcaattgatggtgatcttggtagaagaaactgaaaagaaagacgaagatcttgaccctcgagttcaagatgagaaaaacctgttaaaacaaattgaggaattggataaggttattctcgatctaggaaatcccataaactgtgtatacatagggaagaacctggacgagcagctcaaataacagctaataagctttttgaaggcgaaccaggatcagttttcctggacccatggagatatgatagggatcgaccctaatattatctaccatcatttaaatgttgatccaagctacccaatgaggagacagaaaaggagactcttggattccgagagacatggggcactaaaacagaaagtggacaagttgttagttaacgactttatacgcaatgtgttctatccctcgtggatagctaatcctgttctcgtcctgaagcctaacgaaacttggagaacttgtatcgacttctctgacattaataaggcgtgtctagaagattgttttccactacccaggatcgacaagttggtggatgcaactgctgggctcgagcttatgtcatttatggacgcatattctcgatttaaccagataaaaatgtatgtcccagatcaagaacatacaagcttngtaaccaacatgggactttattattataaagtcacgtcgttcggactaaagaacgctggggcaatgtatcagcgatttgtaaacgaaatgttcacaaaccaaatatggtgaaacatggacgtttacgtcgatgatatgttggtaaaatcaataaaaagtaaggatcaaacctcagacctcgcggaatgctttaagatattaaagaagtataacatgaagctaaacccgaaaaaatattcctttggagtttcctcacgaaaatttttgggattcatacttaacgcgaggggggtattgaagcaaatcatgaaaaaataaaggcattaatagacatgccatcatcgacaaagcctaaggaagtacaagccttgagaggaagaatggctgtacgtaatagattcattttgaagtcaactgataagtgtgtgccatttttcaacatattgtgaggcaacaaaaagtttgagtggacaaaacagtgtgaagaggcctttcaaaacataaaaaggtatctagcaacgcctctagttctggtgaaaccaataactggagagacgttttttctctatttggacatctcagaagatgcgatcagtgcatctacagtgcaagaagagggcaagcaccagcaacctctttactttgtaagtaaaaggttactaggggcagaatccaaatatccccctctagaaaaactcgcgttgtgcctagtccatgcgtttcacaagctacaaccatacttccaggtgcaccccataaaagtgttaatcaatcagcccttgagacaagttttatcgaaaccagatgcttctagaagattgataaaaatgctcaattgaactggggcagtttgacataacataccatcctcgaacttccctcaatggccaagctttggttgaattcttgatagaaggtttaactctagaggaaatttcaccagttcaccgagatgcagaaacctggatgttatacgtggatggtgcatcaaacgaaaagggttcgggtgcaggggtaatattaatatcaccagaggtttagtattaagccttaatcactggcttaaagatagcagaggcattgaaagtcaaaaatctcacttgtcatagtgattcgcaactgattgtgaactaggtcctcagggaataccaggccaaaggcttaaaaatggcaaagtatttagagaaagttcgaaagaacttgaaaagatactattactttcaaatcgaacaaattctgagagaacaaaactccaacaccgacaccttagcacaactggcctcgcaaaatgacttggatgaattgaacttagttccgctagagatgctgagcgagccaagtatatg

SEQ ID NO: 105468 - DNA, 721 bp, Cannabis sativa
agtgaatttcaagtgagaattattttctataggaaacaaattcttaagggcaaaatagttatttgtgaaattattattttgattaattacgttaattatgaattttataattaatagtatttaactatttagttttattagataaaattatattccttagttaaatataatattattattaatagtattaaagagataaatatattattttagagaaaataatatttattttaatccttgtgaaataagagattcgtgacaattaattaattattatttattgacaaaataaataataagtcttatttatggcaaaattgagaagtcaattttttaccttaatatatggcccacacgtgtagggtgagatataaaggctcatgttaattttatttaattattttattggttaaaatagtttaaattaaattaattaattatcttttaattattgaattgtatatattattacataatttatttaattaataatgttacactcaatttttgcaaaaaaaaaaaaaaatggctactcttgcactagggcccacatgccaagagtaccttgaagattctaaagtcaaccttgtgactttgatcaaggcccataaatgtcaaataaggcaagacatccttcttgagggccctatggcacttctagagggctcaaaaacatcaaccaaccatttggcgtcatgactcacacacccaagtatgccca

SEQ ID NO: 105469 - DNA, 598 bp, Cannabis sativa
agaattcttgttttctcctcgagtttacttttcattatttctgatgaaaaaaaaaattcccaaaacacttttcaaaaacatgattggaaacagcccaagttgacaaaatgtcaacctaggtgctaggcccagcaccaagtgtcaacttgggcgctgggtccagtttcaagctgctagatggttccctctgattcccaaaaatacttgtatcttatctttgatgaaaacagagaatatgcccagaagacttctaaaaaaaactccttggaatcgacccaatttgacaaaatatcacatgggcgttgagccctctttttggctcccatgttagtttatttcttccctaaaagtacttgtttcctcatttttgatgaagatgaagaaaattcatgtgatagatcttcagtttgatgcttggaagtggcccaagttgacaatatgtcaacctgggcattgggtgcctcaggcacttggtgctcagagtgctaaaaaacgaaaaagctttgaactaattctaatgcctcaaatatgtttgtgacatgtctaattcatgtcccaataaaaattttgacctattttcactaagacggtcccgaaa

SEQ ID NO: 105470 - DNA, 1258 bp, Cannabis sativa
taataataataatgcaaatctaaatgtaaaatttaataataagataataatattacaaaccatagaaatgagtatgttagctaaaatttaataataaaatattaaaaatgatataatagtaaatataaaagtatagtatttattgtgatgcaaattttgcatcatgctatattgtgatgcaaatttataacacttttgattatgtgagatttttgcatcataatttagcacactattaaagtagacttttgacaaagtgaactatattttacatttgcattatttatttgatcctccattaaagatactctaataatacataaataagacaatctttacatatatattatttaaactttctttttcttttttattattttgtcatgaaataaaaaaaaaattaattattcaatatatattaaataataaaataatattattttaataatttttaaaaagtatttactactgaaatattttaaaattaaaataaaagccttaaaagaaacgtataaaagggataacattaaatattacttgagataacatgtgattagttaacaaaattctataaatatatatatatatatatataaaattatatataggacattgtacccattagtagacttagggggagggaggacttaagtccactctcatatttgaaaatatattaatttacaattattattttcatatatacataataatcaaatagaacaattagttaagatactttaaatttacatgggaaatcatattttgaatcctttcacttcttttttccacgggtatttacattttatttattagaaaaaaagttgaaaaataaagttcaaaatagattcaaacttatgatcactagaataggagaatattttcacttaaatttagctaattatttattattttagataatattacatctataactaagtccactctaaataacatatattaaagaatacaagcgtcataggtgacctcacttgttttaaattttactaacttttttttcttgactaaaattggcacatttaatatatgctaatttggatatctaaagttagatttttttaacaatactgaaggtaaatattgaatcaccctccataatgtcaaaataataataataataatttatagtctccctttcgcatataagatattgggaaattctaccatgcacccttttaaaatggatatattgatacacccttatcttttttagcacccaaaataattttttagtcaa

SEQ ID NO: 105471 - DNA, 643 bp, Cannabis sativa
  modified_base (32)..(32): a, c, t, g, unknown or other
tttccataaacttcgttgattagcaacgagcngcacagtacgtttaaaaatcacggaaacacgcctatgctagttagagtgttacactattgttcaggactctaatagttcctcttctaatgaggattgtatttgacagttgataacatcatgcttttgttcttgtattgaatgtttatgatttctttctaactttgctactttctttctgtagatatttcttccaagttgagaggtcctattgggggaccttcatatgagcccacggggagagtgaaagccaaggtggccaggactgctcgtggaggagatgctgtcgcgtcatcaatgcctccctctgtgccaaggcttgcactagcaggggaaccactgatacggcctaccggccaaggtactcagagggccggcaggaacggggtcagttgttgggcagagggctacgaaggcagccaacatgcgcatagaaagagcttttcctttcatggatgaggaattcaaagagattagtgacggcgggctagacaggctttactctacaagtctgcgggatctttctctggtatgttatgctttcagctctattcatcattttggcactgtaaaggctagctgtccatgaggcatgttgcatgtggctggccgg

SEQ ID NO: 105472 - DNA, 521 bp, Cannabis sativa
atagagttagggaggggacttagctatataaccctagttagactgggcatgttcatcaaaggcttcagttaactaaaaaagtccacacttctgtttcacttagactttacacacagatactaagtccactaactattgatcaccaacaatatgggctaacacagcaaagaactatccaatcaacccaaattttaataaaactaataaaatttaatgtaagctcaaataaagtctaacattctctcatttgggctacattaacttttattacatatatattataaattaaaataattttgtttgaaaacaactcatgggatgaacaacaagaaaatatttgtggccacttttaaaatgatagttctctgatagcatctcaacataccgatcaaatttaacatttgataatgaacttttttagtcatattgtttttaactcaacaaaagacattcataatcacaaataccaaagtattaaatcgacatggtcaataagtctagtagtgtggtaaggaattatg

SEQ ID NO: 105473 - DNA, 677 bp, Cannabis sativa
  modified_base (269)..(269): a, c, t, g, unknown or other
  modified_base (455)..(455): a, c, t, g, unknown or other
acttaaatgactatgttcacttttgagatagtttttactatgtattggagtgtaattacaaaattggattcatagctcgtttggtacgcatgaatcaactggattagacaaactaatttgtccagtccactgtttgggcatgttggaagtctagataattaatccagctaatctcatttgtttggaattatttatctcatccaacagggtgggataaataatcccatgcagatgatatttttttttaattttgattttattaatatatnttaaatttaataagaatttaaatgaaagaattatctcacatttatttataaattttgtcatcaaaaacttattcattaaaattagttcaaatgtgtaattttgaattatcatacagaagctttcaaaatttatattaaattaggtgattaaattagtgtttaacataaataattttatattattcnagtatttttattttactattttaattatttattaaagaaaaaatatgataaattattatattatatatttatgatatatacttaattatataaaatatattattttattttattttataatttaattatttttattatttattttttatttttttgcttcgaattatttatttttttatttattattatatataatttttttatttaagttttttttttaaa

SEQ ID NO: 105474 - DNA, 551 bp, Cannabis sativa
gaacaactaaaaaataatcgtagaacaacagtgaaaacttaacatagtaaataagtattttttttaaaaaaaaaaaatctaccgcacagtaaaaaaatagttagaaatttcaatatatggtgtaaaaatctcataaaaatattatgtatcttttctattatatttttaaatatttgcatatttttatattatattatttgagaactcgctaatttacgtgagtatgtttatttttttgttgttcaaatgacctttgaatacttcataatttagtgtttcgaattccttcgacaataatatatttcttttttcttgtataatattcttagatgatatttaattttatattgttatgtatactaggagaatatatttttgttagcataatatatatatttcaatgtaagtatatggcatgctacatattttaactatcttataagaaaaaaacagttacaaccgcaacaaaatatttaaacattattttcagcattaaaaactactcgaaattttttgaaaatttacatatgatcttaaataactataacgta

SEQ ID NO: 105475 - DNA, 1242 bp, Cannabis sativa
  modified_base (161)..(169): a, c, t, g, unknown or other
  modified_base (195)..(205): a, c, t, g, unknown or other
tgtgtagatatggttttggtggtgtgggcagttcggttgtggtgggcagatgtggtggtctgggcggtgttctgggtggaggaagggtggttatggtgtgggcggtggtctgggcagatgttgcttctgcatattagagacagagagagagaaagagagannnnnnnnnagaaagaaagaaaagaaaaaaaaaannnnnnnnnnnagaaagaaaggaaaaaaagaaagaaaaaaaatattttttttcatttataatttttttttaattttaaattaattttattttaatttctaattttttttaaataattttttacgtggaccaataaaattgtgccatgggtacactgtgtccagtccaacctggcacttaacacctaaaatggacaaaaagggtaaattgttaacagaatacgagtattgggggttttaccgcccaaatttgggttttgggggttaagtgaaaccaaaatgaaagttttggggttttgccgccatttgcccataaacaatataaaacacacacatgcaacacattggatagttggacataggatttatttaaatttaaaataattaaataattaattaattttgaaaatatttaaataataaaataattttgaaaatatttaaagaataaaatattatttttcgaaaatttcaaattaaattgaataattaatttaaaaataaaacctataaatttgaaaaattagattttcaactaacctaaatatctatttcaaaaaaagtgctaacaacttttcgaatttcatgttattaaaataaaattaaatattcaaaaaaataaatgataaataaatatcatttttctaattttacaaaaaaaaaaaaaattaaataaaataataaaatttaaaagttagcaaaatatcttatttcaatttaaaatttcatgattaaaataatcttattttaaatttcaaataaggtcattatatttaaaaaaaattaaataatttaaaatgttaaatatctaaccttcaatttaaaaataagataaaataatcaaattttaaaataagataataaactaagaaaaaagatagattttacctattttcaagcttcaaatttcactaatatcttaaattaattaaaaaaatattaattaatttaattctgataattagatttaaaatttgaaaaattaaaatcaaagtacaaaatacacaaaaaattcgaaattaatttcatgaaaaagcatgaaaaaatgaa

SEQ ID NO: 105476 - DNA, 1168 bp, Cannabis sativa
agatcttgaaatctcaattattagaatggtgatgatgatctcaatcctacgttgatgaaaatcatgagtggtatttggcgaagagaacgaaataagaagaaaaataataaatcgttgatagatagcgagatgaatatagattgtaggattaggattttatgagtgtcttctctaagaattatgttcagggtgaaagaaagagattgagattgagtttttcttttttttagggttagaggctctgcatattacgtaacaagaatgtgagagatttaggttttataatctaattaagcctaataatggtgtaaaaaaaataaaataacccatataatcgatgataatttaactctaaatagaataattaaataaaatttgtatttgttatatataagttttaaatttgaattttaaaacttagggcttctatgctaagcttaacaggttgttactttgtagcttaattttgaccccaataaagttaaaattacgataaatttatttctacataattaatatatctttgaattatctttccaacgctactagaatcatctcaatccgagccctagaactccagatatgatcgttttagtaaaacagtttttaatcttgcgaatttatccaaacttacaaacttttaacattaattctataataatgttacttatttgatatcacttatacaatcaattaaaacccactaaataatttataggaccctaataaactttcatattgggcttgaattacgtaattacctaattcgtaaaaataccataattttatcttgacacttaatgcaatttcagttatgtttagaaattcgccaatactactctaagcaattatctctattcattatcaatagaaataaataaaataattattctcacacaaattgtatttaaaatatatatataattttaccgggtattacttatagctttgaagaccaaggatgtatgtgaattttttctaccaaaccttgtaaaaattgagagtttgtaatttcttacctttaaactctttactttacaagcttgattatttgctctctatatttcattgccatactatttgcatttacttgattaattgcatagctttgtgttgaaagtttcaatttaccaaaattagtttaaatttctaattcaagatcggaaga

SEQ ID NO: 105477 - DNA, 640 bp, Cannabis sativa
  modified_base (241)..(242): a, c, t, g, unknown or other
gctttatgtagtcgtgactatgggaaaaacacgggaattttgggcagtttttgactttcaccattcagaggttgcaaccctaatttctatttaaggggctcatgttttagaacaaagggaggcataaattggacccaaaaggaaaagaaggaggtagaggaagcaattgtggcgatacggagcgcaatcactaactagttcttccttaaactcttaatttctatgttaatttctgttttanntttgattatggatgttattatagattttatgaactaaactcctatttggggagatggtgaatgttgattgattttatgccatgagttaatgttaattgctattccttctttcttgattgtgtatttattcatgtttgtgcttaattccatgtttgagattaatcaccttaggcatgctttataatcttaatacaaaatctaaaaagtgagtattgagaatgctaaaattgaataaactaagttttgatgtgaaacaaaagtatttgcatagcctatgtgacattgagattatttcttaatgcgggttgtatgttagtctatctcagagatgcatagataacatatgatttagggcctaaaagataagagttaggttaattttataatctgtcattcac

SEQ ID NO: 105478 - DNA, 519 bp, Cannabis sativa
acacttcaaatttcattttcttttgatctaggcatcttagtctcatcaaaataagtaaatgtataggtttgatataatggatttccaaacttgttcatttaggttttcttcatgaattgatacattccttttctatgccttttgagacttgttgatgatgtaggaacttggccttcttctttaagcatcaacacccaagagccaactttggttcctctttattgatacctacaaaaaaacttagatctttctttttggtacccacataactttaggtcgtttgatgttagtctttgaagcttttggtacccaaatagccttatcaaaatagacattcttttttacatggcaataggatttagtgtggccatcttagttaaaataagtgcaaattaagttcaaattgctagatgattcaacaaataaatttttaagaattttttttcacactagtgttgtatcctataccactttctgaaaaagcacatttttaactcccaagcatcatttcaaaattct

SEQ ID NO: 105479 - DNA, 1159 bp, Cannabis sativa
  modified_base (1109)..(1116): a, c, t, g, unknown or other
aaaataaaaatctatatacaattactacttcacatttaaattaggctaattatgatttttgtccctgaattttgacatgtatttaatcatgccccctaaaattttaaggtcgttaaaaatgccccctgaactatggagattgttgaatttaaggatttttatctaatttcattcaattttactatttcagtgattgtttatgtacaaaaacatgctccctagactttgatatctaccaaataatgtccctcgaactttgacatgtactaaattatggtccctgaactttcatccatgttagactttttactaaaattggaaaaaagtccttaaatccagcaatcttaatagttcagggagcatttttaacgaccttaaaaattcaggaagcatgatttggtatatgtcaaagttcaaaaaacaaaaatcctaattagcctttaaattattactacccacacattacttccaaacacacattaaatatagaaatataattatatataaatgcaaagtaaagcctatagtaatcatatgtatatatatatagatatgatgtcaagttccactagtaacagagttctcaccttcgaaaacataataccagagctctcaacttgcttgctttacctgggataccttattattcaagctccactctcttaataatatcatcaccattcaccaataacaaaaaagagaaaaagattattcaaaatacaataaagtaaagaaagcaaaattttcaactaagatatggggacaaaaaatgtgtttttaacccccatattcaaaaatgtatatcatcacaatcaattcatgatagttcaactccgaacatattttctttgtaaataattgattcattaaagaaaagtttcaccaaatagttcatataacactattcattattatcttttggtattcattattaagaggaataccattcatagtcactggtttgtttattatattaaatatctttttcaaacaaaatgatgtatatgatttgatgatactttgaactaggcattattagtactttagtagtagtagtagatgttcattatagaaagaggaaattacacttagtatgggattttaaaagnnnnnnnnataaatatggcacatttaagtttggccaatttatatggtattt

SEQ ID NO: 105480 - DNA, 524 bp, Cannabis sativa
cacaagatgagtgttggacggagtatcaaacgaaaaacaaacaaatatgccgaccaggagtacccaacaggataaaagaacgaccatgttcaaaagaaaagtctaaactcaagaagtcagaaagttttcttgagttagggcaaaaacgtccatgaagcttggaataagcaaggtggaaaatagacacaatgcagttctaaaataagccctacggctgaaagctaacataaggacatggaaaagaagagtcgcagaagtttcaaaccctagggattcctaagcgttctttcagcaacatagttacattcaaagcgtaaacatgcaaaggaaagcataaagggaatcagaaacttactcaaagattcgagtgtccgggttcaagcaagccagcaatcgtctgtaggcacttcaacaactctgaagccagaaaacactctttttttgctctggagtttacttagcaacgaaaggtgataaaaatgggtaatgtgccagtactctgagtatttataggcaaaagggta

SEQ ID NO: 105481 - DNA, 542 bp, Cannabis sativa
  modified_base (46)..(54): a, c, t, g, unknown or other
tttagaaagttcatatttagggggttaataaacatacttgtgagtnnnnnnnnnatcctggtaaaataattccaactctaacatctacactgcctattacgtaggtaatgcatgccctatcttgtaccttttgggaacttgtgcttgtctatagttggctctcaaagacaagttactcctttttcttattcccaccaatctctataactacccatgtgaaaattaagaggagaatcagaaaaaaaagagagagaaaaaacaccaaaaatattctctgtaagaaatactttcattaataacagtgactcgtggactacgactcattaattaatgcccataccacgtaaaaatcatctgcattaattatcccataagctctcattattatcttatttaattagttgtcgaaaacctcggtcaacagctagtaatgtgtgctactccctgtgggaagctacgaaccgtgcttttcacgatagaagcttgctagttcctttgattattcacataaggatcactgcaaatgtcgaagagttcttgaa

SEQ ID NO: 105482 - DNA, 995 bp, Cannabis sativa
  modified_base (153)..(161): a, c, t, g, unknown or other
tttgggtttattcaaaatacaactgttatactgctggattccctaaaacaaaagggaatttgttcttgtgtttttcttatttacctgcttttggttatactgatgaaagccatgtaaatcattattttgtgcatattattgtttcacggcctnnnnnnnnngttatcataggtagatcaggtgtgtattccacctgtaggtgaaagacctagaatctatataggaactgaattagatctaagatgcaatattatgctgattatcaagtgcgactactcagttttaaatgtcattttctatgattggtattgagagctaggatctaaaagacaatgtgatgttcataggtagcctgtctcttgtgattatttgtggtctctctatttttcttgtacaatgatgatgatgatgagatgttttattttaaaagctaaccatgcatggatttttattaaactactagttctttgttattagtagttttcctattggactttatatgctcactcgtatattctctttcaagagctcaatttggtacttgtagatgtaagggaatcattgacagagaacgaaaaaaatagcttagtcctagcttaattataattaacccttcttttaaagattgaactaggcatggtaaaagattcatttattcgggtcgggtcggtgatccgattcgacgaattattactgattcgaaacattcagatacttatcgaattttggatcagatccgctctacctcgcttaatttttttacgaatcggttatgaccagatccgttttgaatatatattcttttgtaaaagatatacaaatatcatcgttataattatagaagaattattaattaacatcgattaatagctcaacatgtgggcaaagctgaagctttcaaagataatcaaattaggtatgctatagttgttaataagttaactatatacatactatataaaaaaccgtgtttttgcaaatgtcagttgtatata

SEQ ID NO: 105483 - DNA, 2190 bp, Cannabis sativa
aagtctaccaagtttgtacccttttaaatgaattgactactaaaaattttacattttctaaaaaaaattaattaaaaatcagtcatataaagcttatggtattaaaatatcttcatatgaaatttttttgagataccatcttaatctatttagtattttagaaaaaaaaaaatttagttcaattattttttttttatgaattgtacttaaaatatcttataaaattttaaaaaattcaaaaacatttaacacatcaaatcaaaaataaaatttgaacaatccatagcatgcgtgtttcttatttagaacatgttattaattttacacacaaaattagactaagatcctccgaaacatatatactcttttgtcaaaattatatattttcaatttacatgggtaagtgtaaaatgttggaaagaagcacaaccttaatcaaagtacacgtagtaagaatatagcaaataaaaaaatgaagtaaaatagtagtaaactaatccatatgtttgtctggtaaaacagggtaaggttttattaggtccaactattagcaaatttgctatggagtattacatcgaacaacagatacatagaatttaacattgtacattattattagaaaattaataaagatatggctattagagcaatttaattttaatgtctagtcaaaacagctagacaccttagcaaaactcttattattattatcatcattattactagggatgagttcatgtgcaattattattatcattattcacacatttttgtgtacaaatagtttcactaaatcagttgttcgccatgtacaaacaaacaactaccaaattagtcccatcaccactttaattcattaataaaccagattggccttgaaccagactagtacaatacaatacatacatacatacataaatatatactaaaattacatttgggaaaaagatcttcttagctataaaaatatatataatttaattaattaataatagtgtatctgttacatttcatttcttgatgacaaaactttgttgtgcctctcaccctccttaaccttaacaatgacatccattccatttggtttagttactagttactagtactgttatactatatttatatatatatatatatatatataatagatatagatataatatcaatgaaattgtgagtgtgagatagaagaagaagaaggagaagaagaagaggtgtcaaactttggagaagttgtcttaattggtgcccagatatctgcaccattacttctagcaaccccaagtgtacatgacacaggaaccaaacacaaacccctgcttctcaacttgaatgcttccatttcctgaccaaaccaaaatttcaaaactttccttaatttactcacagctgttctcttttgactaatcatcaccattcattaaacatttagtttgattttatttttctcaaaataaagtattgttttcacccaagaacatcaacatcaatatcaaatttcataattaggtgcatccatactatttagcattgtggggtcttccaccttccattactaccattactatcattagatgtctcctccattcaaggctttggaagtgttcaaacatttatagctaaatttcaacttcatggggtcctctcttcctatgcacttttcataaaaatacaattaaatgtctaatcttgataaagttttcatttttaatttttgttttccttacctgtatcttagtgggtggagtactttcgaggtatggagcacttaacacctacaagggcacaacgaacataaataataagaccatcagattaataaaacaacagaatacagctctctattctattactccatttctgaagagggccaaggctagtttaaccgaaccttaacttgttcgtgaagaaattgtatgtattccattgcctccaagagaacagaagctgtgtccgtctgcgaattgtacataatgttgtggagctaagaaaaagaattgatggaatctaacgagctcataccgaacatagatgatattaattaattttcggttacatagattagaaacaaatctctatttctatgcatacctttccatatggtgaaactagttgttgtagagctacaattttcgccccgaggttctcttttctttcctgatagagcaacgaaagaatgcaaacccgtaa

SEQ ID NO: 105484 - DNA, 743 bp, Cannabis sativa
atttacggcataaaatccaacggaagcgtgccagtgaggacaaagcacgctgaaaatactcgtgttggtttgtagggtcagtcgttagtctatgaagcacccagagtaaggtactcgcgagtaactctaaaactatttagtgacacttcaccgcgcgtcactaatgaaggtgactggaaagacaatttttagtgacactttatatgtgtcactgaacacttttacagtcactctctgtgcgtcactatagacgtttagagtcagactttatcagaatcagctactttttaggagtgtcactatatctattttttttaaaaaaaaaaataaataataattttttttaattcagattatattattaaatttattaaaataatttgactaattatattttactaataatatacttaatcgtataattaattaattatatatcaagagttaatgtaaatcaatataacaaaaatatcaaaaaaaatatatacaaaccaagaaacaaaatatagtaaaaattaatcaaaatttataccccatttaagcggtaaaacaaatctcagaataataaaaaaaaagggcatttatatacattcaaaataaaacaataatccctaaatctttaaacaaaaaaatacaaatattttgaaatgcctaatattgaatcccagtaaaatctcaggcagcggtgaccttcgtttagctcgtcgacgacgatgctgggttgtccgtcgtttgagaagaag

SEQ ID NO: 105485 - DNA, 671 bp, Cannabis sativa
  modified_base (337)..(354): a, c, t, g, unknown or other
agtggaaggagacattatattccagtgcaaccactgtaaggtttctataactttatatgtgtttatttcatattgttttagaagttcatattaggatgttaataacatacttgttagtaaatctagatcttggcaaaataattccaacaactggccttagagccatgtatgtgtgatttgaatggtttcatgttgatctgtgtcttatttgatgattgattgatgtttgcaaaatttttatgaaaaataattagattttcgttctggaattattttttttttggatagtttgggaaaaattaagcaattttagtttttacagaactcaattttgatnnnnnnnnnnnnnnnnnngattttttgaaaatttgaaaaaaatctaaaatcgagtacacaccacgtgcgcgcgcagacacgggtgatcacccgtgtgcacgcgcattaggacagcatcctgtccgaaggaacaggcacaagcgtgtctgaagttccattccgcgtgcatgcaaatctcgactgtgcacccatgctgcatgcgcggatggcatgcaccccataccatctatacgaaatgtaattttttccattttttttttttattttttcatgctttttcatggaattaattttgaattttttgtgtaattttgtatttagatttttgtttttca

SEQ ID NO: 105486 - DNA, 650 bp, Cannabis sativa
atttataacttttaattttcctttttcgtcagacaggtttaaatcaaaaagttatgatggtttgatccccttctcgtcagaaaggtttgaccaaaaacttttttaaaaaaataaaagttgtgggtttgcattatatcatatatttccagataaattccggttaatcatacacagatgccccttaagtaattttaaagagtaaggctttataattgcttaaataaaagaattgattctctttattcataactgaagttaaaatattacatcagcattgtgagttacatcattaatttaatggtaatagggtcgcaaatgttccacgttccagtagttctttattagcgagccatttagccgagccaatttgtaaactctgattcctactattgttttgattacatatggaccctcccaattcgggttgaacactcctacagacgcatctctcgtgtttgcaaatacacgcctcagcaccaagtctccaacattgaatagtcttttcttgactcttttgttgaagtatcttgtaactcagtgctgatacgttgcattagtgacttgcgactcagtttgtttttcatcaagcagatccaaagataactttaggagttcttggttttcttcttgattataaaactcttgtctat

SEQ ID NO: 105487 - DNA, 632 bp, Cannabis sativa
  modified_base (443)..(443): a, c, t, g, unknown or other
cactgcctgttccagaaattccagtggcacctgcccctgttgtccaggccaaacctacagttgcagtgaatttgatggaacctctgtatgaaagattccgtaagcagcacctccagtttttctgggaggtccggacgttatcaaagccgaacagtggctaacagtgattaccaagattttgaatttcatgggcgtcaccgggaatgatagagtggtctgtgccacttttcattttcaagaaggttcattggtctggtgggacatggtgtccatgatacatgacgtcactacaatgacctgggaaaagttctaggaaattttcaatgcgaagtactacaatgaggccgtcagaagtgccaggagaaaagagttcacccacctgacccagaaagaaaatatgagcgatactgagtacacaacgcagtttgatcggttggcgaggntggcctcgggaattgtgccaaccaatttcagtaaaaaggaaaagtctctggatggactgaatgcgaagattaggcatgacctaatgattactagtgacgacaagaccacctatgccgaaatggtggaaaaagcactgcgaggtgagggcgcagttgggtgtatggctgagtcagctaggactccagtgg

SEQ ID NO: 105488 - DNA, 1524 bp, Cannabis sativa
taatagttattatggcggttagtagtttcactaatatgatataatatgacacttttaagttttcgctgcgcatgtaatttttctctcaacaatccaaaattttattatttttactcttcattttgtctctgtcattcttaattgacaatatgatgaagccacatacatgtattatgtatatatagtttaaaaaagcatttaacaactattattcgtatgctctcatcacaatttattctttcaatcaatcatatgataatgataagaatagatatagattttttgtgtattttaatttaaaattattaaatttaataaatgatgtattatacgagtgtatatgtttgtatataagcactcttataaatagcaatagaactatttgcaactaatgaaaaatgttgtggagtgtttgattattttatcaattgtttttcttttaatgctaatgtaaaattttatttactataatgttttttttttttcaatttttctcctaagtatttaattaattgatttaattttagggattcacacaaaatattaagtaatcaaataattataaaattctttaaaaatatatagttttagaataatagctagaagatgtatcagttatattattattttttctaaaaaaaataaaaagttcaattatagtgtacacgatgttcaattatattaattaattatattcttcaattttttttgttaaaacatataattagatttgatacgttacaattgtatcatttttacttttacattattattattgttgtgctttactatatcattatatttaggtagaaagtgatgaaaattaattttaaaaaatatatataaaatatattattctttttgaaatctaaaaacaataatcaatctctctctcttttttttatatttttttcaattataaaacatactcttatatatgccaaaaaaaaaaaaatcatatatccctttaacattattgtaaacaaactattttttaacaaaaaaaaataactactaaaaacaaactaattgagtgtactaaaaattagaaaacgtataaaaataaaacctaaattctaaaaaaaaaaatatccttaatacttttttaaaaaaatccctaatattgttaaaccacactataatttaaactattaattatctctttaactctctcagaaaaaaattaaaccattcctattaaattaagtcctaaatatctatactatttaataatttgttttttaaaaaattttgaaaaagaagtttaacttttatatagtgtttgccatttaaatttattcttttcctttttttttcatttcagatttttttttttagaaatatacaaatcttaacatagtatgaaatataataatttttagtcataatttaagtttgcaatgttttatttacgtacttataatattcataattatgctcttctaacttatttctttcctctttttaggagtttaattaattgaaaagcctcaagtttgtctctcccttttactatttgtagga

SEQ ID NO: 105489 - DNA, 624 bp, Cannabis sativa
ttaaaaacaaaacacagttttttaattatgatgtcaaacatgcactaagtctctagttataaataataataacctctaaattgtaattaattatacattttttaaatctcgtattcataaaatatacttctatacaaataattacatcttaataaaatatatacatatatttataaatttattaaggtatagaattaataattttattccaaattataatacatgtataaatattatgtttactccaaaataattttattataatgtagtattaaggattgtttattgttattattgttatattgatattttttagtgttttgatattttttttctagtataactttatttagttataaattctcaactagaatataattatcttggtcccaagtatattcttaaataggggttctactgtattaaacaatatttgatatttaaggaaaaataatataattttattaatagcaattagctaaaataatatattgtaagttgtaacccaatcgagatgtctctcttattagaaacatgactagaattagaataaaaaaaacaagacaactaatcagtcgcatgattctcgaattgtttgacaaaataaattaaattaaaaaaatt

SEQ ID NO: 105490 - DNA, 522 bp, Cannabis sativa
aattgtaaaaatatttaaaattatgtaaaaccgtatttttgtaaattttttgattatttttgtatattttttaaataatcccaaaataaactgtattgtaaattttattttcattttttttttttggtattttatttgagtgaggaatgagaaacaagttagaaagttagttggggtctctcacagggttccttagtctgggtctagggtttgaggtctgggatgggaactagggtctaaggttcgagattagggtcggtctaattgcagggtcaagttccaatgaaaaaaatacaaatacactatagttaaagaaaaaaatagtgtttaaattttaatgtgatttttttttttgtttttaaaatatagatttttttttaaaaaaaaaagtgttgttcgaatactaatagaacaaagaaatacaaattggttcgaatactaatagaaaccggattttgttaacacttgagcccagcccataaagagaaataatattagaacaaaacaaacatatgaactaaa

SEQ ID NO: 105491 - DNA, 500 bp, Cannabis sativa
tataaaataaaataatcacgcgtgcaatacactgtttgaacgtagttttcgacgtattaaatttttccaaatttctttaaattttgcaggttgtttaaataactataacatacatgaccatgagaaaaattttgactaaaaaattatttcgggtgctaaacagataggagtgcatcaattatatctattttaagaaggtgcattttagaatttctctaaattaatattattatttttttaaaaaaataaataagcatgcattatatattttaataaattatcaagtgtattctttactcctaacttttttacttcagttttcaatttttttttttaaaaagaaagaaaaccgtgttttggttccattgagagagaagagagagaaaaaagtgtttaggaaaaactaaccaaataagacttgaattagtattaatctgaagacagcatatatccgcatcccaaaatctgtcttacttaaaattttattattggtcttaaaa

SEQ ID NO: 105492 - DNA, 834 bp, Cannabis sativa
gggtgcaagggtaatattaatatctccagaaggctttaagtttcactatgctctgaggttccaatttcatgcatcaaacaacgaggctaagtataaagccttgatttccagcttaaagatagctgaggcattgaaagtcaaaaacctcatctgttgtagtgattcgcagctaattgtgaacgagatttttggggaataccaggccaaaggcttaaaaatggcgaggcatttagagaaaattcgaaagaacttggaaagattcgattactttaaaattgatcaaattctaagagaacatgactccaacactgacgccttagcaaaactggcctcgcagaatgacttggatgaattgaacttagttccggtagagacgttgagcgagccaagtatacgtgaaacgaaagacatcgtgatgatagacgaatctcttacatggatgaatcctattatcaattacttactcgacagacaacttccaaatgacaaaaatgaggtgcaaaaactattgtactcagtgcctcgttacacgaatgaaatcatcagagaaattcatcaaggcttttgttgggatcatgcaggttggcaaagcctgtctaaaaagatcattagacaaggatattattggccaaaaatcaataaggacacccacaagtttgtcaagaaatgagataaatgtcaaaggttttcacatatacctcccatgctgccaacagacctaagaatgatgacctcgccctacccatttgctatatggggaattgacttaattggggcattacccattgggcgaggaggagctaagtatgtagtagtagcagtcaacttcttcac

SEQ ID NO: 105493 - DNA, 985 bp, Cannabis sativa
  modified_base (51)..(58): a, c, t, g, unknown or other
tttcttggggatcactaccaatttataacctcatagctaggttattaattnnnnnnnnttctaatttagcccctcaataaataaaaaataccgcttagggtatatttagcccatgacactttaatatccaatgacccacaattactaaaatgatcactttatttgggtcaaactttatatagcaatacacacaaatacatatgagctcacattagagatttgaatccaacatataatacatcatacgagatgtatcctcaaaacgataaatgactctgacttctataatagaaataacaattgagcctctccacaacacaacttattggtaatcttaaggacgtaatcaaatattgatttacgtgaatcaatataaccagtgaaattagaatgtaagcggttaactttatttctagaatatcaatttattttaataaaggtaatatttaatgtatctcaaagacacctcattactttgtatgaaaaataaagtggtcttaacttcagttattctgctactacttaacgatcgtgaaataaatgtaatgcaaagtcttatttagactcttaggcatacattaggcttctaaaaatagaaacaaaggaatgttcttaatttattcgcattccaaattattttacagatgctggtttaagttgaatttatcacacttaaaaataaaagtaacatgagatgaataatacataattttatttaatcagagatgttgtggctactctctaattaattataattatatatgttatttatattctttatctcaaaataataattcgagatatgaattatttcaccttatatatgaaacttttatcatcatttgcaagtaacatattatctatatttaaaataaatattactcctattgatcttctggtatataattatttctataatactcttttcaaacctaaaggaaaagatgatataatgaaaataccaatttgtgagatgtttgtttta

SEQ ID NO: 105494 - DNA, 1012 bp, Cannabis sativa
  modified_base (327)..(329): a, c, t, g, unknown or other
atatatgggtgcactcttaataggtattacctattaatgagtaaaattaaaaaaatttaagtttttatacttaatttttttaactaattaaaaaaaatctctcatttttatatcatatgggctgagattgttccattggtaaaaaataattaaaaaaaaagtttttagcaaaaaaaataagaaaagaaaaagttgagtttgagttaaatatttttgtatgaacatatttttgatataatacaaaaagagacattttcttatatttttttttaattaagtagttaaattaagcatagaaattcaaatttgtgatttaattattcgttnnnagatccaaattcgatggtttgatatttttaaaattaatatttatagtcaaattttttttgtaaccattcatgggtaataccaattaagaagtgctccatatatatatatattctatataaagtgtgcttatgtaacaaaatttttggtttaacgatatttttttggtttctacattaacttgaacagaatatcctattacttaacagaatattctttattaattttataatattattatatataattaaaaataaaaattatatagatgttttatatgaataatttttattttaatttaaaatacctaaaatattattgatatatttaatcttgtttttaaatttattagtttaactttaaattaaaataaaatgaaaaattagttcaaaaaaaaaaaataaaatgaaaaattatttaaatattttatataaagaaatttaaatttaaaatattgtaaatatttttaactttattattaattattttatattttaaattgaattcacagaccatatttttcgtaaagtttggaaataaaaaacttttatatcaaatttactaattcaacctataaatagacacactcaaatttggttatgtgagtttttgttaagaataagtaaattacaatatatgtattatcagatacgttacctaattaaaaaaattattttttttaaaa

SEQ ID NO: 105495 - DNA, 729 bp, Cannabis sativa
  modified_base (355)..(355): a, c, t, g, unknown or other
  modified_base (419)..(422): a, c, t, g, unknown or other
  modified_base (693)..(696): a, c, t, g, unknown or other
tctatattttgaatgccaactttatattttgtgaaagtggaattagggattaaccctatttgtgaaatcccagagtgtgtgactaggattatcggcacctgttagacagtagttttcacgtagagtatgcgcggtggcgcttatgttgaatatgatatatgtgagtaattgtaaccgggattagagttattaccctaacatgagtagttaatagcctagggttattaccctagtgatataagcagagtaaatgctatgccatgctaattatatgattatattgaaatttaaaggtgatgcgttcaaggcataatcaggtttgactcggtaatcataaccgagatgaaccattctnaggccttattgtatgtagacgtgtgagagcaacacgtagctctacgccacgtagacataaatannnntgtgagagcaacacgtaggtctacaccacgtagacataaataggcatgtgaacaaaacatgcaggcctctgtcacgcagacagatttaaatggcattactatttatattatatgatgagcatattattgatatgttttatactgtcttgctaagcttggctcacgggtgctctattgtgcaagaatgggtaagactgttgatgatcagccatgagtgcaggtcctagatgaagaatgtacatgtctgggccatatcagaccaagcgggttnnnntctaccagtgttgtgtttttgagactctatttt

SEQ ID NO: 105496 - DNA, 520 bp, Cannabis sativa
ttgttccacctgaacagatccaggtctgacctcaatattgctacctgcatggtcagtttcttttgtacctgcactagggttagttgtaataggcaaacatggaaaaatatcttccttaaatattacatccctgctatttattgttttaagacctttttgttcccaaaccaaaagcctataacccttaactccttcaggatatcctagaaaaacacatttcatagccctaggttctaatttcccaatactttggtgtgcatatgctgcacacccaaatactctaagattagataagtcaggaggtttaccagaccatttttcttcaggagttttgtatccatttgcactggatggacttctgttgattaaataaacagcagttaaagctgcttctccctaaaatccttggattaaccctgattgtaacagcaagcatctcactttgttgagaattgttctgttcattctctctgcaactccattctgttggggtgttattctaactgtcctgtgtctctgt

SEQ ID NO: 105497 - DNA, 584 bp, Cannabis sativa
gttgaagcccgcgatgttgagcaggaaacggcaaaagagatatcttattatcaacttcctcaacaccaaaccgaaatggaggggatatcttatccttgccctttagatatacattagttgttttcctaaaacaaggtaacaaaaaatataaaattagcaacaaaaaaatctgaagttaataaaattcaataaaggaataataaaaaaaattacattgatttcttcaatcggagatcctggcctaaccaaacattaaaagcagcctccaaagttggctcaacaggttcaccaatcttatcatcaagtggacataatccatgcacatattttaccattttgaaattagaatcatcaggagaattagacattgaatctaatttagcatcagaaaaacctagttcaataaagggagacttcaacacagcccccttcttcctgtccctctttctaggaattaagattggtgtctcctcaaaaataataatgtcacggacatcatattgaaccaaaccttgaaaaccagaggaaatagaatactgaccagcaacaacatcagtagaggaagactccatcttaaaaaaaaa

SEQ ID NO: 105498 - DNA, 659 bp, Cannabis sativa
aagatggtacttggtcgatgattgaccttgtacattgtgttttacctagaaggtacccttgggtactattgacttgaatgtgtttttaacttcgtcaagttgctcacctccccttatttcttccatgtaggtaccactgggtgttgaataggggaggtgacagccgcgtaggtccctcatttacttcgcatttatgaccagaatgaaatagaccctctgtagggcgcctccatatgatccccatgtggctagggttgccacaaggggtaagctagagtggtggaggagatcgctcagccccatgctaatgctgagctagagattggtcaaggagcaaagagtttggatgctgaatccgatctagtggaggctggactagtgaagaggaggaggagaagttacagtacttgttctgtcctcccaaattatcccctaggtcgctatgacgctcatggtaatccactaagcaagctcgatgagccttcagagtttgaactggatcataacctggagcagtctcctaagctgaagatattagactcgagacaacatggagttagttgggtctctcctgcttctactctttctgatgaagcctttgttgggttttgtgccctaaataaaactcatttcaatctaatcagatttacttattaata

SEQ ID NO: 105499 - DNA, 942 bp, Cannabis sativa
gctgggtcccaaatccagacacagactacgggtttcgtccaagccctgtgtcttgattcggatcccaatctcgggtcccattcgagtccaatttttgattcggtttcaggtttagttttcgtccttgttcgtgtctaggttcctgtcctagtttgggttcgaggtatgttttgggtccgggtgtggagccaacatcaaactcccaggtccaggtcagatcctggttcgggttcggtctcgaatttttatttttgtttgggttctcgacgtaggtccgtggtctaggtcccctatctatgtccggttcctaggtcctagtctgggttaaggttcgggtttgggtccccagtcttggtttgagtccaggtgctagtccgggtttttgtccaggtttcgatccaagtcttcggtcgggctcgggttcggttccttgttaaggtttggatgctggtttgggtcccagtgagggtttaggaccacgccaggtccatgtcccgatccaggtttgggtcccaggtctcaggtctcgatcctagtcaatgtctcggtccaggttcttgtctgagtttgggttatggtttgggttcagttttggcctcaggtttgggtcctaatcacagttcatattcgaattcttcgtcttgcatcgactccaagtcagggtcagagtcaaggttggggttggggtccgagtcttagtctgagtccgggtacgggtttttcgaatcccggactaggtctaagtctgagtaaaggtcccatgatcgggtctagatcttcgtctgggtatgggtccgagtctaggtcccatgtttcgatccttgtttgggtctgggttagtattcagtttcgggtttgggttcgtgtccatgaccaggtccgaatccaagtctcggtcaggtgcttattgtgggtcttggatcgagtcccgtgttcaggttg

SEQ ID NO: 105500 - DNA, 762 bp, Cannabis sativa
gaagcattatggctttggggaatattttatgagttaaaacaaatcataggaggagtgactatgtattcgaatagcaagtcttccatccacttttgtaagaattcagtttatcataaaaagagtaaacatatagctatgagtctctactggattagggagaagatagaagaagtgcttgttgatatagagaaggttagtacggaagataatcttactgatgttgggactaaggtcttaaccttaaacaagttcaaacattgcttgaacttgatcaatctcagaagctagtatactgaaattccttgaacaccaacttataatgatggctgcattagttcttcatcatcgtcattcatttaatttgaagtcactagatgaaattgtggtatagttcctccaaatgaaaaggtttctgcactcgtcatttttgggaaattattctctcgcagttaccagtcctagaaggagtcttgtggaataatagtcgagtctggaagagagttcccaaacgactatcatgtccacttcgggtctagttctcttgatagctacctcttccccgtaaaggagttctagctgtttagtttcactcctaaaatggtagatccagatagttgactccaacagactatatcctatccagaagtgtcttcagttggtgtccgtagtccgcgaggagaattcgttctaagaggatttagttaagttagttatttctactaacttaacaacctcttttcttgcagccaccaactttaggat

SEQ ID NO: 105501 - DNA, 612 bp, Cannabis sativa
  modified_base (211)..(213): a, c, t, g, unknown or other
  modified_base (564)..(585): a, c, t, g, unknown or other
taccactcagcctgactctgtttggccagaattcatcaaggtggttcgggaatttctagatgtttttcccgatgaacttccaggtttaccacctcagagagaaattgattttgttattgacttggcacttggagcagaaccgatttctagggctccctacagaatggctccagtagaacttaaagaattaaaaattcaactccaggggttnnntgacatagggtttacccgacccattgtgtcaccctggggagctccagtactgtttgttaagaagaaagatgaatatttgcggatgtgcattgactaccgagaattgaacaagctaacaatcaagaataaatatcctttacctaggatcgacgatatttttgattaacttcaagggaagactgtcttttcaaagattgatctctgatcgggctattatcagttgagaatccgagaggaggatatcccaaagacagcttttcgcactaggtatggacattacaaatttctggttatgtcttttcaattgaccaatgctcctgcatcttctatggatttgatgaatagggtatnnnnnnnnnnnnnnnnnnnnnntgttattgtatttatcgacgacatcct

SEQ ID NO: 105502 - DNA, 860 bp, Cannabis sativa
  modified_base (46)..(53): a, c, t, g, unknown or other
ttctagttccatttgcgattctgagtttgagtttgggtttgagttnnnnnnnnagttcgagtcctggtctgagtttgcgttcaggtcttgatttcagtctacgtccatatcaggctccgggtgtgggttctcgtcctgggtctttgtctaggttgggtcagagtcccaagttccaatcccgatctgagtctggattcagttctcggtctaaatccttggtcagggtccgcgttcgggtctggcttttggtctgattctaggtgtgggtgtttgagttcaggtgcgagtctgtatttgggtttgtaaccatgtctggaccccgatctgggtctaggttgtgtgggttcgcgtcttgggtcttggtcttacctgggtccgagtcccaagttccaatcctgatccgagtctagattcagttctgggtgtaagtccttggttctgatactgttctgggttggagtttgggtctgggtctgggtctagctttgggtctgattctaggtgtgggtgtttgagtttgggtgcgagtctgtgtctaggtttgtgtccaggtctggaccccgatctgggtttaggttcgggtccaggtcaaagttcaggtcccgagtgtgagtccaagttcgtttgtggatccctatctaggtcgaagtctgtgtttgggatcgggtcccagatttaggtccaggtccaggtctcaattccgatcttggtacatgatcgtgtccgggcccgagttccagtctttgtttgggtctgagggtaggtgtttgttcggttctaggtctgggttcgggtcctggtcaccatcctagtcttgttctacggtcctggttcggcgactcttgttcatgttctaattt

SEQ ID NO: 105503 - DNA, 898 bp, Cannabis sativa
attgaaagaattatcattgaaattccaattaagatatatataatacatattaatttttttgaaaaaatataatacatattaattaaaagaaggaaaaggactctgggactaaattaaccaacctattggatggtaaataactcaatatagtcccaaacatataagactaactcccttttaagaaaagataaaataaaaaataagaataacttaataaataatataaaaattatataataataataataataaaaaaaaagactacgataggacacgatgttattgaagttgttattagtgatttcgaataggtgacatgtggactctcacagaggcccaccatagatattgagctcattacttagcccaaagcaaatcaaccactcagcttgtctactgagaataggcaaagtcggacggttggtctgattcttgcgtcgtattttagagatggatccacatgtgaagtcacagattaagattttacacacaaaatagcttgtaaacttaaggaggatactctcaagggtcatccgggaatagaatacaaaagggcgttcgatacaacttgctatcccgaaggtcgtccatgtggcactcttctaacatgatcctgagaaatttgacgacatgtccctttggtgaagccatgaaaaagcatagaacaaaaagaaatttatatatttgggcggacacccactatttagaaatttacatcccgagaaatttacattcgtcaatagtacaaatgtgtacgacaagcagcaaatttgagttgggcctcacctaccctgcccaataactcgtcataatattaaataaatatattttaccccatcagtgggctttattgtacaaaaccctaatgggacccagatccgtccaacccattaagcat

SEQ ID NO: 105504 - DNA, 983 bp, Cannabis sativa
tctcccctgtctcatcccagtggatgagagatctacagtttcttccatataacagttcatagggagccatccttatagtactctgataactgttattgtacgaaaatgatatcaatggtagatatacttactccaagagccttcaaaatccatcacacaggctcataacatatcctccaatatttgaatcgtcctttcagagtgcccatttgtctaaggatggaatgctgtactaaatttcagtttcgtaccgatagcccgttgcaaactttgccaaaacttggaggtgaatttcggatctttatccgaaactatggaccttggtaccccatgaagccttactatttctttaacatacaactctgccaactgatccactgaattggttgttttaactggtagaaaatgagaagatttcatgaatcgatctaccacaaaccaaatagaatcaaacaaacctgtggttctaggtaacccaaccacaaaatccatcgtgatgtcctcccacttccattcaagtagggttaaaggctgtaacaaccctgatggtctctgatgttcagccttgatctgctgacaagttaagcatctcgatacgaattctaccacattcttctacattttgttccaccaaaagtaaggtttaagatcctgatacgtcttggtggtgcagggatgtagggagtatggagtggtatgagcctcctcgagaatttcatttctaagttccacactattaggaacacaaaccctcgctttaaacaataacattcccctatctgacacggtaaaatctcttgtttgaccagctgaaacctcttctctgatttttactaactctagatcagtcatctaggcgactttaattcgttctaacagatcaggttgcagcgtcaagttttgaagcttgccttcaacaaactcaatgctagatctgaccatgtcctctgctaactaaggtgaaatctgaatcatactagcta

SEQ ID NO: 105505 - DNA, 547 bp, Cannabis sativa
gtttcttctattaaacagtttatagcattattagttttttagtaacttatagccttgttatgaacatttgtttaactgtttgttttcagttgtttttaggttgtttaatttaacttctcagttgacaattactaatttaaattcattttctgcatattgttgttaatatattgctttgaagttattcatcttttaggatgagcacattggagttgttttttaaatgttgttttttggttttttcctggttgcttatttatttatttttttttttttgccttttagttgttgcttccaatgtatttgtttagctattcaaatttgttgcttattttttttttttgtttttccctctttcaggtccatgctaagagctcagagaagtttgaagactttgacttgcccacaaaaaatccttcttagatgtctttttttgtgtttttttttacagtacatttctgtttttcccttttctattatttcatgtcgtttgtcagtgatgataatcatttctgtgttgtcaacttcttcttcttcttcctggttg

SEQ ID NO: 105506 - DNA, 620 bp, Cannabis sativa
taatgttacccattcatgggtaatgcccattaaatatttatatatataaatacattatatatattgtgttttatttgttgtttaatcatcaagagttgtaatattatttagttttttctttttgtaattatatggtttccctttatattatatttggtttgttattatattgaggccctagttttttctaacatgttttatatttattttatataaaatgtagttatgtaacgaaattttatattttatataaaatatattttttaatttttgattttttatgttaactttaatagaatatcttaattatttaacataatatgctttattaaatttatgatattattatatatatttaaaaataaaagttatatagatatgttatataaataaatttaattttattatatatatttaaaagtaaaaattatgtctatatataatcacatttatatataaaatatatatatttcaattttaattttatgacaaagtttttattttaaaagtgattgatgatattaaaaaaataattaatgatacatatatgtgcttctaataatttgtacactttattataactatactttcctaactacaacttaagaatgtatttatca

SEQ ID NO: 105507 - DNA, 1023 bp, Cannabis sativa
atccaaaaaatactaggtttaaaatattggataaacctaaattaaaccaataaatacatataaaatacattgaatggatagaaccgatctaatctaacatccaatgaatgatgggtcgattggatgactgaaattaattggatcagatcggatggtaaaatctaacatccaatatatgatttgatcagatctggataggtctaaaattattgaatgtgatccaacgaacacccctagctgtttgtattaggtgccaactttattataattaatattaaattttttaaggacacatggaaaatcttgtaaatttactcttatttatttatgttcaacttagagttattatttattttattttattcaccaaattaattattttaggtaataaatacaatatatgataagaaaaaaatataaaacaaattcactaaaattaagaacaaaattatataaataagttaagttctgaagaaaatattaggaataatatttatgttttgataaaaaaaaaaaacttaattatttactgtattttctaatatttagtataaaaatattacaaataataattatatgtttactacaatgaattagtaacaaatattattttctattaaatattaaagagaaaagtgccaaataatttttatacaagagaaaataatagttgagtattgattgtgagaagatatatttttactaaaaataatatagcaaaatgcctatatctaaaaattcataatttcttataaaaaaaaatggtagtaaaaattggtagttgaaaatattattttgctactgaatacaattggtagctaaaaaataaaagatcttttgccactaaaaaaattgtagtcaaattggtagctaaatacaaatattttgctactaaaactcattagtagctaaaaagaacatttgcctactaattaatttggcagcagaaatattttgtcttatttgctttgtattgactactaaaaacttttgttactaatttggtagcaaaaggctattatt

SEQ ID NO: 105508 - DNA, 972 bp, Cannabis sativa
acaggtggaacctgtgaccggggatttgacggctgaccatttatagtctgggaggtattcaacgctggatcttcgtctgtttcgcccaagggaatgacattggcaggttgctaccccggtagtctgataggcttttcgtatcagcacagtggcttgccgactacgatcgtcaatgactgcttgctgagcccttaacgtttccatctccttgtctctccattcgacaaacatgcgtctctgctctccaaacgcgatatttaccgcagcatggagttcctcctgatcatgatgtagggtgttggtatgaccctgcatgattccaagagcagcacggaggttctggatttcagtgtcatctccaatggttgtttgaacattggtagcgaacgaaatggctgtgctatgaatgccttcgttggctgctaaactcgtattcctagtctcttgtacaccaggcgtgatttcatccacaggagttgtcacaccatgacccgcaattgatggctgtctgggatttacggctggcggaacccttgggtttcatgggttttgtagtgcaggatccaccacctgtggatttgctggatcaaccatgcccctacgagtctgtaccaccatcgtacttctgattaaatttggaataaagagctatccttgagtctgctctcaatgaaagcacacaaatgttgacctcgcttttagccaatgagaatgagtctaattttgtaagcgacaagtagtttaatatgagtaaaatatagtaaagcaaataaagacacaagaattttatagaggttcagtcccgagtagttcggtaatagcctaatcctcgttatttgtattgaattaagaacaaggaaaatggctccttttcttaaagctcttacaatagtatctctgaatatgaattcttagataaaatctctcgaccctttgcccagtgaattcaaatcactatttatagggctataa

SEQ ID NO: 105509 - DNA, 714 bp, Cannabis sativa
tgtaagttattttatagcactcccaaacttttaatttttaattttattattattgttctttataacatataattctaaattgattgaaattaatgatattcaggaacttgtcatcgagtggattgactggcaatgtaactacacacatatcaaaactctctaggattcaatctctgtaagtaccttaaatctatcttgatttttctctactttacttgctgtttatctacaagttgtacaatcacaaactacttaattcctctgttttgtttcagggatttgtctaacaataatttaactggaccggttcctgaatttttgacacgattgccaaacttaagggttctgtaagtcttcattaatagacaccgtacaaatttaattgtctgcattactaaaattttattattatatctgcattattcatcaaggtattctttttgctttatactccagaaacttgagaagaaacaatctcacaggttcaattccaattaagcttattgaaaagtcaaatcgtggtttgctatcattaaggtatgtctgtcaaagcttgtataaaggctttgaccatttatatatacatattctgcattaattttctttttataaatttgtttaatatgcttcctaacataaattattccttggatcaatattataataatctatagcgtgggagaaaatcctcatctatgtgtctcatctaagtgt

SEQ ID NO: 105510 - DNA, 4703 bp, Cannabis sativa
atcctctcgaaagattgagaatttggacaaacatgcctctcaaaaagttcgatattgtaactgtcactgatttttcagaataaagatcacttgaagaattcattacttgtgtttattatggaaaatagctggcagactatttctattctaagattattctatcacaaaacaatctaacaggatctcttttctatgccctgtggcccttccatttgggcatcatgagggtagtaaacaaagaaagtgaggactctatttactttagagtacagttttcacggatatcttaaacaaagctagaagaatgggatcatcactaattcatcatttaatttaaacagtttgatgcagttaagcatgcgtcaaatcaactgcaaaggtcatctgaatttaagctttcgattctacaatgaaaactgtttggttgatccaaaatctagacactacacacacttgatatggtatatcatacacatacaattcagaaaaagttaaggaaaattacggctgtccattcgaaaacatgacatcaaagacaaatacgcaaatgtcaacctgcaaagaaagataacagaagggaaaaatcagaaagtgaaacaaaagtaaatgtgtgcgcaagcaaataaataaacacatgcgcacaacgaatgaatagtagactagatgtttaatacatatgaagtggtaacatccataatccaagatcctttatttctgaaatctgattttggtttaaccatttctttatgcttccactcctcacaaaaccattgttcatcttactaagactaaaaaggattgaaaaaataaataaacctgcaaattcaagcagtaaatcattaactatgataatatcacagaaattgtcacatgagatacctttatgctgtccaatgtaattgagatatccttgctgcctctcccacgggaagacagctcttgaaatgacaagagtttgcaaccattctttctatcaattgcaacaatctaaaaccataaaaaagacatacataggaatcaattatatttttactcagaaaaaaaatagtaattaataagtaaaccagtcttcctccagtccaatgcaaaaaaagaaaaataatgaaaaatccagtcctacccaaaagaagaatagacgataatgacagcaagtgcataatatacatacatacatgtatatacataatatgaagtacacatatactctgtaggatcaatagttcttacctctgcatcaagtataaaggtaactgcatcaggcttacaagatttcatcattatatcaataacatctgggaatcttgacgttgattcatccccatttcgtgaatacacacgaaaggatccatcaggtagcttgtgaatttgtgcacgttgaccatcatatctgatatcgcataccagtagattactcatcaagtaatatgtagaaatataagacaaaggcaaataaaagtgaaagcaacataatactatcaacatactcatacaaagaggataatgaaacagaagactggttgaaaatcttgtgtttattctatgaagatttccttgtattgagtcagattagaagagttgtcttgtattctattttctagggattattttgaatcagatttgttttgtctttttgtaattgtccgatttgctaagatatactctgagctgccaactcatcttagcaaccctctatatatagaggctattctgatgtgaataatattattagaagcttagcaaaaatatcctaaaactaataagaccagcctacaaattagaaccatctaaaacatatggccttaactaaaatactatccttaatctaatgcacaaagacatatacaagaagttcaaaaacgctgcaagatgatcacttaaataaaaatttctgtataaaagaaatgctattcaaaaagacaaaaacgataagcaaatatgaagaaaacatctgaaacaaggtatcagcataaaaactatttcattatattgtcttgacatgcttagattatgaaggatccatcaaacatatcaaataggttctctcaagccaaccttaacccaaagatgaaaaactgaatgcaaacatataagagggaaagacttacttgtattcacaagtaaaagccttattttgaaagagcttcattgcttgtggaacaccattggtgattctaccacagaaaaaagattatataaaaggacatatcataacatgcattctatcaattttacaaagaattttaggggaggaaaagaaaacagcaaagaacatactttgcaagcattggcttaataggtattcctggaatcattgacatagtagatgatgaaaacccaatcccattgttcattagagaggggataattaagtcctgtcaatcacaagtagaaatatatatctcgggaaacagcttctagtgaaacatatagtttctagttaactaaaatgcaattgttacaggataaaattatatgttaaaaggggcacttactacatggaaagcccaaaagtggaatagatataaagagaagcatgagatattaaaggactcaaactgatcgtatgccaatatacatgtgtttttatttttttgttttaaaacacatgaaaaaggttctgctatacaagatacattttttgtgtgaatacaatagggatttgaacccctccccatccatcacacacacacccaaccaagcccaagtggtgcgacggtatacataatagtagcatacaaaaataagagagcaggtttttcttttcatgtgccacatggatggtaagtctgaggaaactgtaataacaatagacctggaatgtggggaaaactagaaagtagtactttagtccaaagcatgagtaacttaccaaactaggaaccacattgtatgcttcaacaacagctcctgaaaggctctagattaaagaaatatagcataagaaacataaaaataaaattacaatgaataaacaattccaaacgctaagtatatcctcctctactgacaattcagaaacaattaagagactaaattgaaatattcaaaaagaaataaatagaacctgaagctcatcctttgtgctttcatggggagaagaattcataacaactgcttgagctagtgcagggagaacagtcctcatcatagctccaatgcgtaaatttttaatctatactcgtataacataaagagcatcctcagttcaatgttttatttaaaaaaggtatatcccaatcaaaaaaaatggagataaatgaaggatgccatgtgatccaacatttaaaaacaaaagggctctgctctgagagaatattaccaaagttctaaccagaaacttcatttccttctctctacaagaacgcatgagattgacgattaggttcttcttccttaatgtacttccactgcctgtttgtacactgatgaacagtacataaataaactgaaaaatgacaaattaattgaatggtctatattcatttatgttaaccatacaaccaaccaaaattaaacaccgtaaccttgtttagaaattagactgaaaaataaaatggtccaagacaccttagggatatgaagtcttttaattgcaacttgtaattttgttttgttatggtctttctgtggtttccccttccaaacttatacttgtagtattttcaatcactaatacaagtttaatttctgtaaaagaataataaaataatgatagatagaacatgtacaaatcttcttatttttcttcttataaagaaaataaataaagaaagaaagaaagaaagacagcaagagagatataaatagaatgccagaaaccaaaaaccaaatatttcagagcttagaaacttagaaaaacaaaaacccaggttgatgtctccctaccttatcttttgtaaagtagaaaataagtcttttatcagaagtggtgcaggtggagcaagtaatgtctgtgtttgacggcatgcttgagcaacatcacctttcagaaaaatagaatatttgatatgcaatacagaatgctaacaatgaaaagaaaataattgatcagtgcgaaattcctacctagatcacccaagtcattgtacatctcccttaattttgaccggcttgtcccacatgcctcttccagtgctgatgttaccaaactacctccaatatttagctcctgtaccattgttataaatgatgatttttcatttttcacattacaggaaagggaattgtacagacaatttgcttgatgacaccttgctccaatacactatgtttagtattgcagttattagtagactacttagcttagagcattcaaaagaaagaagaaaatgataatacaaaacaacacttgtaagacataaaatacaatgtaagactgacccattacatatcattgatatcaacaatgttttaacaggcataataagaaaatatctatcctgcatagtttggatctgtaagaaacaattcaatagaagtagattttttttttaacattttgataagaaatagtgtagacaaatattaaaagaggaattgaccaaccttattttcatggtcagcagcaatcttatttgtgcataaatacactgcaggcagcacatcctcgggggacaaggcgagcaaactaagtagaaagaatgataaaagttaacaagaggaagctcattttaaatagcaacagcattcagtagaaaaacatt

SEQ ID NO: 105511 - DNA, 545 bp, Cannabis sativa
ttctgattgggccacttgtcccacaactcggcgatctaccactggtttttgtattttttttaggggactgcctcatttcctggaaaactaagaagcaagctactgtatctaaaagctccgctgaggccgagtatcgtgctctcgccgccaccactagcgagatgacttggattcaataccttctcaccgatcttcacatcgcacaaccaacaccagcttttatttactgtgacaatcaatcagccattcacatagccaacaaccccacttttcacgaacgaaccaaacacatcgagctagactgtcacttcattcgtgagaaaattgccaactctaccatccgactcatacctgttagcagcaaccttcaacttgcagatgcctttacaaaacctctcccttctaccactctcaattgccatttatccaagatggccatccatgacatttatgatccatcttaagggggggtaataagaattatatgtattctgtttgtcctctgtttctgcatatacaatacttagccttgttattactgttga

SEQ ID NO: 105512 - DNA, 633 bp, Cannabis sativa
tttctttttctttttttaatttaattagagccaaaaagcttattgtttaaaagcattaccatttgtaaaagttcttgaattattcttgtagtttatatataaaaaaaaaaataacgtactcaaaattttaagtttgtaaataatataaatctaatatttatttttaacagtataagtactaaatgtttataaaattgtaattttcctcgaattcattaatgtagatctcgttattgtcttaaacaaggcacgtataaggcccatattctaaatcattaaatctagataaaaacatgtagtatcagttttttctaaatgttcttttaatcaaattcaaaacaaaatctgtattgacgaaattaaaggaaaattataattttacaaatattgaatatttatgctgctaaaaatacacataaatttgtgccacttaaaaatttaaaactttgagttgctggtatttacataatatattattactataattaaatcatggatatatttgatttggtcatgtaccaaataactcaaaaataattgaaatattttatttcatttctaccaaactcaaatacccttttcttatttttttccaaattttatactaactaacacatcacatcatgccatcac

SEQ ID NO: 105513 - DNA, 1004 bp, Cannabis sativa
  modified_base (50)..(50): a, c, t, g, unknown or other
  modified_base (257)..(258): a, c, t, g, unknown or other
  modified_base (507)..(523): a, c, t, g, unknown or other
tataaaacttgttttacaatcaaacaatataaaacacatacacctgcaanaagttggatagttggatataaggtttatttaatttaaaattaatttaatttaatataataaaaatttcgaaaaataaataaataataaaaaaatatttttttttggaatgataaataataaataaataaattaaaaaaatttaaaattaaacctataaatttgaaaaattaggtttcagctaacctaagtatctttttcaaaaaaannaaaaatgctaacaacttttcaaatttcatgttattttaaaaaattaaagattcaataaaataaaatgataatttaatatcatttttccgattttacaatttaatttaaattaaaaataacaaaatttaaaagttagcataatatcctgtttctatttaaaatatcatgattaaaataatcttattttaaatttcaaataaggtcaattaataaaaaaatttaaaatattaaatatctgaccttaaattnnnnnnnnnnnnnnnnnatcaaattttaaaaataagataacaaattaagcaaaaagatagatttttacctattttcaaattaaaatttcactaatatcttaaattaattttaagaaaaaaataataatttaattctgataattagatttaaattttgaaaagtaaaaattaaaatacaaaactacacaaaaaattcaaaattaattccatgaaaaagtatgaaaaatgaaaaaattggaaaaaattgcatttggtatggatggtatgcagtgcataccatccgcacgcgcgtgcttggtgtacggatggtatgaaaaatacagaggctgcatgcagcctatccgtgcacgtgaggggaaaattcaaacaccatgggcgtgttccttcggacagaccgtatctgaaacaggggtgacacccgtgtgtcacgtgcatccgcgcgcgcatgggtgtgtcaccacccctgattttttttccaatttttaaaaattcataact

SEQ ID NO: 105514 - DNA, 522 bp, Cannabis sativa
  modified_base (106)..(110): a, c, t, g, unknown or other
  modified_base (228)..(228): a, c, t, g, unknown or other
  modified_base (316)..(324): a, c, t, g, unknown or other
tttagtaataagtaattgagaagtcctattactaattgggattattttacaaaaatataaaaacaacaaaaaatttataaaaatacggttttacagaattttaaannnnnttacgattttttttattttatttgcagaaaatacagttttttttatgttataatcttgttaatttgttgataattttttgttatctgtatgttatttttttgttgttattttcatgtnacttttatgtagttttcttgttgattttatgttattttcgtataattttttaaaaaactgaaaaatgtaaaaaaaacattctttgaannnnnnnnngtaaatattttacaaaaaaaataatgtcttatgtaattatggtttttcacgcaaaaaataattgttatccctttgtttagaactcagaattttaagagggcaaaaagtgaattctgctttttatttttttattttttttatttagaatgttaagaaaaataagattatatttttagaaaaataaattaattttataaa

SEQ ID NO: 105515 - DNA, 812 bp, Cannabis sativa
actcagacccaaacatggaaccagactcgggacctagaaccgcaccccaatctcggtcccgaactagatttgggactcagaccaggaccaaaacccggccgctgatccaaacctaggacccgaaaatagagcttaaacaataaccgtaagaccaggaccatcgaacaagactaggaccgtgactaggacgtggacccaaacctagaaccgaactcagacctagccccaaaccaaaaccgtgacctgaagtcgggccttgacacgtcgtgtacccagaccaagactgacaccgggaccaaaaccccgacccagaccaggatcgaaactcggaaactagatttgtaacgagaccctgacctagacccagacctagaaccgcacctgggacccgaactcgaacctggacctaaacctagacccagacaaggatccggacctggacccagactcagagcaggaatcagacctaaaaaccataccagacccaaatcggaacacggcactccgacccgaacctggacaccggggccgaacccaagacccaagaaccagactaagacctgggacccgaagcccagaccaagactaggattgggatgcgaactctgaccctaaccaaaactacgacctaaactcggaccgaacccgaacacgaacttggacccggaacgggagcaaggacctgaacatagatgggggacacagacctaggaattgagcccctgaactaggactagaaattggtctcagaactttgatcgggatcgaggacccaaccctagacccaaacctggacataggacccacgtcgg

SEQ ID NO: 105516 - DNA, 722 bp, Cannabis sativa
agcccctcttccatcaataggtacgaactcgtgtgggcgtagcgcggttggccccttcgagttgcacagatgataacatcctggacaagtaggaatcctggacgaaggttcattagatgcccatgccatgatgtgagttttttttgccctaatttttattttcttatgtctcattctttccttctgttcacgagtgttcctggttgtggcaggaagtagaagggtgtcacttttggatgtggtacgacccacccatttgtcaacgatcgaaggatgtgattcctaggctgctaaggaggattcgaaatctggagagagaagtgtccatgctatcatctaaaggtgttgacaatgttgtgactaaccaagaccattctaaacctattgagaagtcaatgaactgcaaagacagatatgaagttgtggagagttttgatgacaacactcccaccattgatgaatccctaaatgtaagtcaaacctgtaaatgtaaaaggagtggatgtattagatacctttcaatatgtattgcaatatgtattttgttgtttgtactgaaagcatgagcaattaattgtaacaagtgtaactttggttgatcaatgaaatatattctacttttaattagtaaaaagcaaacattgctttgagtcttgtattactacaaattgtctactaatagcagcaacaaaaaacataaattagaaggcctaaacactaaa

SEQ ID NO: 105517 - DNA, 833 bp, Cannabis sativa
ccctgaagtcatcatttaagaatgatgttttaaattggaatgaaattatgtgatcatcggacctttttattacaactttttgaaacttctgaacgggaattatgtgatgaatccaccatttaagaatgatgttttattttattaagggtgcttttaatgtggtcatttgaccttagcacaaggatttttttgcacttctaaacgggtgttccatccagaagctaccatttaagaattgcattttaaacatgaatgcaattacgtgatcatttgacctttgcattcactggtaataccatgggctagcttgatttctcttctctttaggttgattgagagactctaccaacaggttatcattcatgccttggtcagaattgaactttttgaggatggaggttcatttagtaattttcctaaagcactattgttatggtgtttgggattttgctgtttggaaggagtacatcatccaaacaggtcatctgtttttcactcaaatggacttgactcctagattagtagtttcgacccatggtcttagttggcccttaaactgggctttgctttggccatccttaactgaaaaatgccatgtgtccccgagctaggaactcagtcgactagtcttatgaattggcaataagagagggtatgtgactttggttagctttactctagccaacattgtccacccgcttgaatgcttcctcaagctttataaatgcatcaacctgttccaagaatttttccattgagcctatagtgatgttgggaatattttaccaacatctaaatttactaacaagtatgttgaattaatatcctaaata

SEQ ID NO: 105518 - DNA, 552 bp, Cannabis sativa
  modified_base (502)..(515): a, c, t, g, unknown or other
gaaagtgatccagatcttgactcgagattccggtaacggggcctggaacagaccaatagtcggtgtctagatcagggactcatagttggaccagaacccagaagaagaaccaaaccagaacacagacctagacctgggacacaaaattagaagctaaaaaagaatcgccgaacaaggaccctagaacaagactatgccgtgactaggaccaagacccagacctagaaccgaacacatacctagcctcagacccaaactgagactagaactcgggtcaggacactgtcgtgtacccagactggaactgagacccgaaccttgacctaaataaaggacccgatcccaaacacatacttggacctagatagggattcagatacgaaacttgactcggcccaagacgaagacttggatcggaatgctggacctagatctggaccgagatcctgacccaaacccaaacttagacgtgcacttgggacccgaacctagacccagatcnnnnnnnnnnnnnngacacaaacccggacacagactcccacccgaactcaa

SEQ ID NO: 105519 - DNA, 1613 bp, Cannabis sativa
ttaggatgttaatgaaacatgcttgtgagtaaatctagatcctggtaaaatatatataggcaatgctatcgcgactttaagcttaagccgtcctgagcccaattgctaagctcacccaatggttaagaacgttttcaacgaaagtatgaccactttaccatatgcactagagtacttactccgtactcgtgttggtagggccattattgtacttctaggagttactgagtgttgtaccatacgcactctgtaccccctggtactcgtgttggtaacactgtaactaccctaagactctacattgtactaacacccttatagctacatctttaacagtgctagtagtgtaagcaaataataacatacatacattcacatatatatactttatgctatcttaccttatttccttgctcaggtgtgctagtcaacctgagtggaactgcagctcgacgctttacagggccctaaaccacaatattcaaaattactttgagagacacgctaaaataatttttggggatttaaaatcaaaactagaaatatccctatagatgaataacatggaaattccctaaataacacaaaaatgggaaaaactagggttccaaaattgtcctaatttgtagactagttccccaaccggaattccggttcgatggggtttcttgtgggccaatcggtcgaatggtttttacaggttcccctgaaccggtcgaccagttaagtgcaagaaccaccaatagtgtccccaacacttcaattcaactctaaactccacaataacttccagaatacatgtatatactataatgaattaaattcaagcaataaacctcagttttatacatagaacctcaattcaccattagaggtcaaagtgccaaatcaccactacagccaagcaacccaacctatctcagctcaaacaacctcaatttaactctagaacacaaactcaaacattacttcacaacacataaccataacctagaaaatcacacattaaaaccttgctcaatcttaagaaagccaagataagagagactaaaggttataccttgatgtgaagctctcaaatcctgctaagattcactgaattgaactaaaaaatctacaacccctagctggtctagaagcttcgagagagaaagagaaagagttggtgaatggaaatgagttttctagcttcttcatgaaaaacacatatgcatatccttttttttttttttattttacttaaataaaaaccagattttacttaacacaatcccataaaaggacaaaggatttaagaggaaaagacaattttgccccctaagcataactcaaagatttaaaggcttccaagggtaatttggtcattctaatttcccgactatccccgacacttctaaaacctaaccataatgtctcgttattagaaaaatcttaaaccatatgagtgtatgactctctaatgccacaacgtcgcattccactgctaccgaacacaaatacagaaacaaggaattcacatatataacataattaatacattctacatttaaataaatctccataaatgtaaatcataattaataattcaatatcataattaaccctaattattt

SEQ ID NO: 105520 - DNA, 718 bp, Cannabis sativa
  modified_base (300)..(301): a, c, t, g, unknown or other
  modified_base (354)..(367): a, c, t, g, unknown or other
  modified_base (684)..(693): a, c, t, g, unknown or other
aaactttttaacataatacttcaaaatacataatattcatgtcacacaacgactacaaaatacaactccagatgtttcgagaccaaacacttcaggtcgcgctgctttgacatgtacaagctcatcctagctcaggttaactcctattcagctttcgcctttcctttacctacacatggaagcagaactctgagtcgacagactcagtaagaaaagcatataatatatcatataatttccgacttgtatttaggcgcccatacacctatttgttagaaatattttaccaagatctagatnnactaacaagtatgtttcattaaaatcctaaaatgaattctaaaacaatgaaannnnnnnnnnnnnntttaagaaaaccttacattgggtccagcagaatataatgactcattccgttcagatctctagtccttgattcctttctgtagcagagcatcatcaagatttgaacctagatctctttctctccatcctttagtctgattctccttcttgttgattggattcttcacaatcttacaaactatgattgagataccacttgctgtgtgtgggcacttactcattcaatcaaggctaaaaaatttaaggaagaaaagagaagggaagtggtggcttagaatattcactgaaggaatgagatgctgttgggttttatgcccnnnnnnnnnntccatttcaatgtaatccattttat

SEQ ID NO: 105521 - DNA, 1036 bp, Cannabis sativa
agatgattggaggttggtgtaaggagatatgcagttcggataagagggataccagccattttatctcggatgtggtgttggctaaagctcggaattcgctctcagtactggatggagccacaacggcttgtttttttgtagaccaagaaatgagatttccaccaaggaagatggtgtagccaccagtggatcgtctatcgtcggggcagcttgcccaatcagcatcagagtagccatatagatttaggagtggtgctagtttgaggagaagaccctctgttatggtgccttttaggtacctcaagagccttttagtggcttcccagtgggttgtggttggagcatgaagaaattgacttaacttgttgattataaatgcaacatcaggcctagttaaggtgagatattagagagcaccaatggtgcttctatacaaatgaatatctggaaagggttctccagtggtaagagataacttgtgagtcgaactagttggatttgagcttggttttacaccatcgagatgtaatttgaccaacaaatctgtgatatatttggactgagagagatacatgccaactgagttccgaaccacttcgacacccaagaaatagtgtagggggcctaagtctttgagggagaattgaagattaagatcattgataagcttttgcttcaagcggctgttaggactagtgattagaagatcatcagcatataccagtagtaggatgatgtttgagccggagccagaaacaaaaagagagttgtctgatttggattgagtaaaaccccattgtagcaatgtcgatttaagcttgtcgttccatgcccggggtgcttgtttgaggccatagagagccttgttgagtttacacacatgtgtaggtttggaagcatcaacgaatccggctggttgttgcatatagactagttcattcaaagtaccatgtagaaaagcattgttgacatcgagttgtgtgactggccaaccatgagagacagcaatggtaagaactgtgcgaactgtggccgg

SEQ ID NO: 105522 - DNA, 925 bp, Cannabis sativa
cttgcacttggcttacttatatattaatattaataatatatttattatacagttcttgtaacttgtccatggtcaatatacaatagagattataaaatatataactttactctaatatatatattttctataaataaacctaaccatgcatgacagctaacaaaaagcaaaacacgcaaaataaagaagacaattatggacgtgattatagatattttaatatttgcctttttatccaaacacatattgaaaattattctaaaaaaattgacaaaactttatgatcaaaatactaattaagttaattactctttagaaccggcaagtaatcgtgtgtggctgtacctacgtacgtacgtacacgacactacaaaaacaatatgtagtgtataatttagactgaaattgttgaatttgtgagtaaaaatctggattaaatcaaaaagtccttataagttagtttaattgagtaacaaattcgaataagtatattttaaaatggattaattacgtgcagataattgaaagaagggaaagattgaaaaagaagtcttcaatttgtttttgaatgacttttatataaaaagtcaaatcgtatagtttttcaccaactttgaattttatctattcccacgttttttttagaaatattcaaatgtaatattgtgactagtattctcggtatcatactattaattaaataagtattgggtctcatataatttaaaaaaataaatctcaaataatatcgttaaccaatcgtaaaacgccacgtataaaaagtactaagaaccactgttcccaaaaattaagatctttgttaaaaagtagtgtccatttaatgtgttaaaccaatctaagtttgacacgtcaattaaataaaaaattaaacctttaactgaatcaataaaaatagttagtatat

SEQ ID NO: 105523 - DNA, 527 bp, Cannabis sativa
  modified_base (200)..(217): a, c, t, g, unknown or other
  modified_base (274)..(277): a, c, t, g, unknown or other
agcagggaatgaaatcccaaacttgaaatctaaattgttttaaaaatgaaacaattaattcaaaagtaaataaatgagcttcttctttatcttgacaaactccatccttaatccaactttcagatccaactcgctaagacagcatccgagtttaataagcttgagctataagaagaaaaataaacaaggttagtagtccnnnnnnnnnnnnnnnnnnggataataattcactaaaacacattagtttatggaaagaaataccttgtttctttgnnnnaagcttaggacattggggtttccattccaatgtcctttctcattgcagtagaaacattttccttttggtgtatcaccagaaggtgcagcctttttgttcttagctgctttcatagcttgagctcgcttcttggaatttttccacttcttcttattcttggatttggaagtagaggcaacatgtgcctcagcattattcgttctattagcatttccagaattctgaggtttactccctttcttcttgggtc

SEQ ID NO: 105524 - DNA, 552 bp, Cannabis sativa
attattttttatgaagttaataaaaaaaatgagagaattaaggaaagcatctatatagatttttcttaattaattaataattagtatttattaattgaataaaaaattaacaaaaagagagaattaaggagagaagagatagtgagattaaagtgattttagggtgctacatcaccgcttcatacttctcctttatatatatagactagcaaaaaactacgtgcgagacacgtatattaaattttatgctaggttttttttatgttatttgaaagtgagattattattgaatactgaatgtaatatattagtgtttaaggaagcttaatgattactcaagaccaccactgtaaacaagctaaacaatcaataaattactcaaacataaaaaccactgtaacagatggagctctttcaacaagagaaattcaataaattaaatcacaaatacattacgcccagctctattgagcctttggacaagcccggagaaaactgaaggagcaaaagaaatcatgtttgaatcgaaattaatctttttttttaaaaaaa

SEQ ID NO: 105525 - DNA, 864 bp, Cannabis sativa
atcatacttccattagtgaattaatgataccaaatgataaagaagtaattagaagggtaaaatagtaatttgaccaaaactaattatgaaccaacacatggaggactagtcactagaattgattatatccatggacatgtagtaaaacttagtaatataattctataattactaaaagttcaattctatatttatagtagattaattctagaattaataaacaataattaattggttgacgagactcagtaaataatctagtttattggagcttagaattataggtccatgctccccgaattgccaccttaaaatactattacgggaaggaaaaaaagtagtataatgttgttcgaaaaaatctattttaaattaaaaaaatagtaattatttattttttgtaatcaataaataatttttcaaattaattaaatagagaaaagacaaaaattattaagataaaatttgtcaagaaaatattcattgagacaaaagttatcaggataaaagacaccatccttatcttaaacaagacatggtaggcgtctgtccctatggaggtttgtctttttgagtttattaatttaatcaaataaatatttaaatttgaaaagtggttaaagatatttcaaattagttaagatattctctcaagtggttgagagattccctcataactattagtaactgaattttgttatagatatttatttatttaaataattaaatatgatttaattaatagaatttaactactataaataaaagcctaatttgagaaattagaagaagattttcaacaacataatttttaaaattaataaagcttttcacactgctatttttgaaatacataggagaaaa

SEQ ID NO: 105526 - DNA, 528 bp, Cannabis sativa
ggaaagaaaaaaaaaacatgtggatataattttatttaattcattatattaatttttcattatagtatttctgcttatggttgtagtatatagtttttgtatgctattatatatattttgggaaaaaaatttcatttaatagtatattagtttaagtttgtggtatattttttatgattttaggtatatcgtttgtatatgatatgatatatcgtgagagaaagaaagaaaaaaaattgaatgttagtttaaatttgacgcgcatatataattttcactacattatatatatattatgtattacattatctcattaaaaaaacaaataaaagaccaacaaaaaagaaacttataaaaaatttaagctcgtggtatattaattttacactatgagatatccatgtaatctacaaatatatcatttttatgtgctgatgtatatcaaacaagaaaaataaagaaaaaacttaaaaaattgtaattatttgaataaatacatatcttaatatgacgaatgaaataaagaaa

SEQ ID NO: 105527 - DNA, 684 bp, Cannabis sativa
tcataactcccactcaatagcaggtgtctagtctaatgaatttcaaagcatacacgagacttctcactgttgatccttatggaattccttcatgaattttatcttttctggaatagttgaaactattccttagataaataaaatctatgtctaggagctaaaaggcttcctttgaaattagccattagaaaaattctctagcatcttacaaaagtaagttgcttgcacgacagtaagtaaattaccaggtataccataagtcatatgtttagataaacttaaacctataatactaggatcacgaagttttgttacgtccattgaatagatttagtttttgaaattccattcttgtccttgaaatagaaaactttttggttactccatataaatagttttaaccatagttctcttggctttgattcttagttccttattctaactatccattacctatttaaactaacaatggatttttatcacatgtgtctcccaagtgataaaaggatgggttccttaaaatcctcccaatacgataaggtaccgtgactttctatctaggaacattaattgtattgccctcatcagttgtgtgaatacaacaaaggcagtgggaccatcttatgtagcatcagaagataaaacacttttggaatgtaactcctctactttgctactttcttt

SEQ ID NO: 105528 - DNA, 527 bp, Cannabis sativa
atgaaaaatagggaataaaaatctcaaactaataattgaaattcaaattgttctgaaactaaaacaattaattcaaaaataataaaagaagttttcgagcttcatcttcatcatggactatctccatccatctgtccaaccatccgattcaactcgctaagatagcatccgagttcaagcagctggagttgaaataagaagaaaaacaaacaaacatggttagtaggtccagaattaataatccaagtggataataattctctacaacacatgagtttatagcataaaaagaaataccttgtttctttgccagaaatttagggcattggggtttccagtggcccttttcattgtaatagaagcattttccttttggtttatcaccgggagtagcagcctttttctttttcactattttcacagcttgacaggcttcttgctattattccacttcttcttgttcttgggtttggaagtagaggcaaagtttgcctcagccttagccgccccattagcattcccagaat

SEQ ID NO: 105529 - DNA, 1241 bp, Cannabis sativa
  modified_base (855)..(863): a, c, t, g, unknown or other
gtgtttccctgtttcctagcttaatgtagtccctaatgataataaaagaaccatgagttataggtttgggtttcctgaattagggttttggacatgtgatttacccgattttaatatgtgattagggcatccatccagcacgagactttccgttcaggtcagccaacttacttgaatctggaaagaaggtaagaactgcgtataatgtgtaatatgaatatgtgaatgtatgtatatgttaagtgtacatgcatgcttatatgtttgttacactaccaacacttttacggatatggtacagagtgcattggtatagtgtatattgttaaggagtacattacggtgttactagcataagtacgggaaagtacaaggtgtgtgtggtatatcactcagtggtagtcagggtacgaaataaaccctaccaacactcgtacaatgaggtacgaaatgtatgtggtacagtggttgtaccctagtatgaaacgttcttactcatctgttaagccttgtaaataggtgtatggacgcctagatacaagtcggcattatatgatatgttatatgattttgttactgagtctgtcgactcatagttctactttcatgtgtaagtgaaggaaaggcaaaagctgaacaagagtgagccttagctaggatgagattgtacatgtcatggcggcgcgacctggagtgtttggtcttgggacatctggggttgtcaatttgtagtcgttgtgcgaccaggattatgtattttgtataaaaagtttagaaacgggatcctaaaacttgtaaatattttactgaaggttataaagtttaattattaatgcaaaagttttattttgacannnnnnnnnagagagttctttgattatcaaagatagcactgtaattgaaaatcaatgtagcgtgccttagcattagggcgttacaatgacagaatcaaagggctgatgaacgtaaggcacatcttggagcttagatgaaacttcatatcccagggtgcgcttgaagatgaaggatacagatacaaatccattcacagaagcttgaggatcaccaaagatcttttggtagtaatgaaaggagagaagataaatggtttatatgttctccaaggagaaattgtcccagctggagaagcaagcagggttaaagggctagaattggatatgaagttgtggcatcatagacttaagacatattagtgaacaaggcctcaaagaactgcacaa

SEQ ID NO: 105530 - DNA, 592 bp, Cannabis sativa
  modified_base (559)..(566): a, c, t, g, unknown or other
catcactatcagttatcaatcgtcgttgaaagttcattttcataatgattaggggcattttaggaaggcacgtgcgatccgttattcatcctcggtcatcccggcgtgactattacacaatttactatagttaccgatcttgatcatatttactcattggttacaaattagtcattgaatatgtatatactttgaaatttcttgctgtgataatatataatttctaaaaaagtgattgtaaaagtaattttttttatctagtcttattgtatttgaggcgttaagcagggataggttttgtcatttattgctttgcatgtatttgttttgtttttttttttttttaaatctgttttgcatgcatttaaattagagaaaattgcattcaagaacgtcattttcattttatttatagaaatattatcactaattttaattaatatatataccgcaaatgttatttatactacaattatatgtgttagaaaaatatcattttggatatttctttccacagttttctttttttatgagcttttaatatatctttatatattannnnnnnntatctaacggcatttcttggtttaac

SEQ ID NO: 105531 - DNA, 1242 bp, Cannabis sativa
  modified_base (48)..(67): a, c, t, g, unknown or other
  modified_base (156)..(162): a, c, t, g, unknown or other
  modified_base (545)..(552): a, c, t, g, unknown or other
catataggctcacacaggcacagagatttggatggatcctatcatgtnnnnnnnnnnnnnnnnnnnnaaagaagaatgtaaaatttacctattgacaattgaacaaagggttaaaatcagatcatttgatctatcaacaagttaaccatggcaatnnnnnnnaagcaataataggttttataaaacttgttttacaatcaaacaatataaaacacgtactttttcaacaaattggatagttggatagagggtttatttaattttaaattaatttaatttaattacaaaaataaaaaataataaaaaaatttcttcggaatacatatataataaataaataaattaaaaataaaataaaaataaacctttaaatttgaaaaattaggtttcaactaacctaagaatctttttcaaaaaaaaaatgctaactacttttcaaatttcatgttatttttaaaaaattaaatatttaataaaataaaatgataatttaaaatcatttttctaattttataattttatttaaataaaaaaaataacaaaannnnnnnnttagcataatatcctatttctatttaaaatatcatgattaaactaatattattattaaatttaaataaggtcaatttattaaaaaaaatagaataatttaaaaaatattaaatatcaaaccttaaatttaaaataagataagataatcaaattttaaaaataagataattaatttagcaaaaaaagatagatttttacctattttcaaattcaaatttcactaatatcttaaattaattttttgtttaaaaaaaactaattaatttaattctaataattagatttgaaatatgaacaataaaaatctaaatacaaaactatacaaaaaattcgaaattaatgccatgaaaaagcatgaaaaaatgaaaaaaaattgaaaaaattgcaagttgtacggatggtatgcattgcatacaatccgagcgcgtcccaagagtgctcagcggaggtatgcggcacacagatcctacacagcaggatttccgcacgcggaatggggtttcagacaacacctgggcgagaaattcagagagcccgtgtctgaacaaggttgacacccgtgtgccacgtgcatccgcgcgggcatggggtgtgtcaccacccctatcttttttcaaaacctcaaaaaatcataactaattcaaattaaatcgaaataaagttctgtaaataagtgaattgcttaatttt

SEQ ID NO: 105532 - DNA, 530 bp, Cannabis sativa
aattgtaacattaggtattttgccaccaaaaattaacattaggtatttaagtgtataaaatcgaaaacattaattatttatgccgcaatttaccataatatttgttttgtttggtttatagcattggaatgtattttcattttttttttttttgaaagaaatgaaaatggattattatagtattatataatattttaatttttttggaacgactttttcactagtggaatgattattctattttaaaataaaaataaaaattatttcattttgaaatataagagaaaattattgcaatgcataataagaaaaaaattgtaatatattattttttttttttttgcattttaaattttattctactccattcatattcttatatttttattgattaagtaaacatacactcttatggcatgtttactaataagtaatgggaataaatagtaaggtaatcattcccttacatttgtttacttgcattattaaaattaggaaagggagaagttgattaaataagggagaaaaga

SEQ ID NO: 105533 - DNA, 1576 bp, Cannabis sativa
  modified_base (69)..(92): a, c, t, g, unknown or other
  modified_base (1328)..(1336): a, c, t, g, unknown or other
  modified_base (1514)..(1521): a, c, t, g, unknown or other
tcaaaaattgggaatatacgatttcttagagagatatgtgggtaagatgattttttttttaatttaaannnnnnnnnnnnnnnnnnnnnnnntaattattgggtttatttatttgttaactttaaaagttaacagtctattaagttatgattttttttttaaatttaaaaaaaattgtttaattttttaggtttaattattgggtttatttatttgttaacgtttaacgttaacagtctgttaagttaatcatgtaaggttaaataaaaaaaaaaggaatcgttaaaaaaaatcgttaaaccaacaattaccgtttgatatacactttttatatataaagatattgattatcattactattataccacacgttatctctctccctcttaaatagataatttaattatatatataaattaaaaaaaaaaactaatttaattagtattactttgacttttcaaatattttaaaatctcacttacacttcaaaaaaagaaaaaaaaaaatagagaattactctatatactgtttttttaattttttttatcaaatttacggtttgggtttttaaagtggttgcagcactagttgcaataggagtttctatacgattttttgttgcgatttaagttgtagtgctagttgctagaattccgtaaaaatgcaaaaaaataataataataataaaaaaaaaactattttgaagtgtaaaaataaaaataccccaaaaaaaatctaacaagtttaatcaacaaaagtgaaaaaggcttataaatgtgccatttggcgtgccttcctcccactaacgaaaagtggggttcacgcgcgtcaatctttgtctcctaaatagcttacacggtataaaagtaaaaaaaaaacaagaaataagtaaaaaaagaaaaaacacccctaacactataaaaatgtaaataaattattattttagtcaactttttgtaaatttctcttttattttatacgcgtataaaataaactgtttgaatcttatttttgacatgttaaattttttaaaattttcaaaaattttcaaaatgttataaataaatacaacgcagacgaccactctcacaataattatagataaaagtacatcggtggattactttttaaggtgtattgaaatttttttcaatattttagattacattacaaaaaaaaaaaaaaattaaaaaaaaaaaactagtaatatatatcaacatcaatatagtaccagatcatagtaactgacttgaaaattttgtcttattattaaccactagcgtcgaacgatagacacctaacataagctattattattattattattnnnnnnnnnattattattattattagtataattgttccgtgtttatatttatgtggatatagtttaccgtggacaatatatttaataaaagagaaatggtagagggtactagtggtatctaacgtactcttatgttttaatattgttattagttcaactgattatcggatcccatataatttaatannnnnnnntttagggagtatcgctagtcaatcacaacgcaacatgtcgagaaagtgctaagca

SEQ ID NO: 105534 - DNA, 1381 bp, Cannabis sativa
tatttctaaatcgtaaaaattctcttcatgacttatagtctttcccatatcatcatgatggatttgtctcaaggacttaatcattgatcttggacgttgaaaattgtaatgataatcatgagattgatgagatctaataataagtgagtcgtacctttcagccagccaacggtaagagttatgcaactcattcaatacttttataagctgaggccttttctttgggaaagagtctccatcttggtcaattatacttaccattgtttttatattctcatccaattctgcatgtacaagaaaagtatatattgagttattaaccctttggttggttgttgatgataatgaccatatggaatgagtaaagtataaaaataaaaaacctgttagagttgtgtgaagccaaagagatgaatggcgattactatagctggtgtcacgagagcaccaccaccatggcattgacaaagctatatgatcacccttattattatcctcttcttctttcttctctaattttaccattttattgctttgtacaaacacaaaattaactcctccatcatctgattggatactacatatataaatatatatttgttaggcatggctaattaatgaattaattagaattttcttatcacctcctaaattgagggatttcgaacgttatgtaatttgtagtgtttgacttcttttaaaattcaaatattttttcctttccatttttgggatatatttgctgctcattagaggagcgggaaactagcaacctctattctctttgaatcgtaagaattgtgttttgaattgaatgagagccacaatttcatatttatcctacaattatttactaccattacattagatgattattagttaagtgtggtcacaattcgcaaactcaaccaagtaaggggactagtcttttgctttgaaagcccaaataaagacaaatttacatataaaaaaattaaaaaaaattacatcatataaaaatacttaacacagaaaaaaatctatttttataaaaaatatacctcttccgtaaaaataataagcaaaatttttgttgttttatagtttatttataataatattataattatcataaatttatttttttaatcatgttttattattttatagcttattttgttactttttagttattttttttatttttttgctaaacaaaatatatttttataattttaaaactttacaaacatacttttataattaaaaattttaaaacataaaatcataaaatcataaataatatatatatagggacaggatttggtcccgttatgccaaaacagggaatacaatccgtgattgtactgtagccgttggattaaattggggcatgatctaa

SEQ ID NO: 105535 - DNA, 613 bp, Cannabis sativa
tataaaaggaataggatgctctcactctgataacctaatcaatctaagatagcctagttttcattccttgtcagacaactagaaatttgagagcctccttccttcctattttaaaatcccctctcttcttcttcatcaattttcgagcatttagtgatagagtacatatccactcatatcaagtcaagtactcaatcatagtgtgcttgtgaagaatccaacacctgaaggatatccaagctcagatcttgttattactctacgacagaaaggaataagggttagagatttgagtggacaggagacattacattctactgccatcaatgtaagattttctaaactttatatgtgtttatttttattgttttcaggaattcatatttagggtgttagatgatagaatataatcaacatacttgttagtaaatctagatcctaataaaatatattccaacaactggtatcagagtcatgacaatgatttactttcaagaaatatggatttaaaacgataaatttgtgatttggatgtcattcatgttgatctatgtatttatttgatgattgatagatgtttacaaaattttcacgaaaaataattagattcacg

SEQ ID NO: 105536 - DNA, 773 bp, Cannabis sativa
  modified_base (61)..(64): a, c, t, g, unknown or other
gattgaggcctcattttagtaattatattagtttactaaaatattatttataggtagctannnnttttaaggataaaatgcattgaagggtataacgggttatttatccacattcgatgtagatcatctatagaagatctttgactatttagatcgatacaatgggtaattcaaatagcatctatttttggtaatagtgcgttcaatgtaattaagagttcaattccaaatctatagtggcacaatgaggaattaataagttacgaaatttactttgtaaattttggtctacttattgtaagcttgattacatagggtcatagtccccacactagttgagataatacttcttgtagactcagataattgattttatttaatcaattataattctaaaattatagatgtcttatttatgaaatttcactaagcaatggcttaattgtgaagaaaagagattttgagatttatttatttattaagagtctttgtaagatctaattaataaataagataaatggcaattttatttgataattaataaatagttttgacatttataggattcaaattggaaaatatggcattattgaaagaaaagatgaattatgaaagaaaaattgtaactagtgaggcacactaagtggccggccactaaagcaatttttgctattaattttatctttttttaatccatataatttaaatcctaaactctagttgaaatactataaaaggaattaacctaattttcattctttgtaagctaacta

SEQ ID NO: 105537 - DNA, 602 bp, Cannabis sativa
  modified_base (219)..(222): a, c, t, g, unknown or other
tcgtagccactcaggttgactggcacacctcaattcttaagcgaggtaagaattatataatgatattcatatgtgtttatatgtttagcgtgcatgtttatggagcctgttagattacattgatagcggtatcagtatacgtagagttgtattggatactgatagatgtatgtttgtctcaagtacaagatcgatgctatcacatcggtacgactagannnngactagagtaccgagtataggatgatattatggtcgatagtactatcatacgaacgttctagagtcattaccgtgttggacacgaggatagggttatagttgcatgtatgggcgccaaattataatctgagttattcaatgcttatgattatgcttttctaactgagtctattgactcacatttattgtttgcatgtgtaggtaagggtaaggctaaggttgagcagccgtgagagcgagtggatgaagagtgtacatgtcggggcagttacatctggagcgtacgatctttgggacaacttgttatattttgtttagtcgctgggcgacaacttttgtattacgcactctgtattagttgtaaatattttatactcggg

SEQ ID NO: 105538 - DNA, 588 bp, Cannabis sativa
tgaaataatagttttttataccaaatcatatatttatagggaactcttgctgatggtagagaaattgcaataaaacgtttatttgcaactgggaaaagtcaagcagaggaaatatgcaacgaaattgatataataagtagtgctcaacacaaaaacttggttagatttcttggttgctgctttactgattcaaacagctttcttgtttatgaattccttgtcaacaagagccttgaccaattcatatttggtgagtaattaattaaattaaagccatcatcactttatatatattattacactttcctctaatactggtttaattcatgtttgaaccatataataataatgtgtggaaggtagattctgagaggagcaaagaattagactggaaaaagaggcttcaaattatcattggatcagcagagggtttagagtacctccacaaaggttgtcaaatgaggataattcatagagacattaaagctagcaacattttattagattcgaaatggaaaccgaaaatcgcagatttcggcttagcaagattttcttcatcaactgccagttatgttcctggtgttacta

SEQ ID NO: 105539 - DNA, 624 bp, Cannabis sativa
agagtgtacgagtaaatattgtagatggttggggcataaaatcaattttaacaagtctcgggttgccttttcggacaattgtggctgggaattaaaaggggagttgcttgatctcttgggttttgaccttatggactatgatgagaaattcttgggcaaccctttgtttatctggaagaattgtagtaagaattttcagtttgtcgtggacaaagtggcaaaaagactggaaggttggaaggctcgactgctttcccaatcggctcgcacggtcttggtcaaaagtgtagtccagtccataccgtcttattctatggcggtgtttaaacttcctacttctattatggaggagttggataagctcactagaagattctggtggaaaggggatactgaggggggtagatacctatccttgggagaatttgtgcaagcctaaagtttgtggtggcttggggtttagacaagccaaagatatgaacatgtgtgatatggctaaactcgcgtggattttggctcgagatggaggggagctttgggtccgggtgatcaaaagtaagtacttcccaaactcctctttccttgaagctcatctgcctgggagtgcgtcgatagtggcccgta

SEQ ID NO: 105540 - DNA, 500 bp, Cannabis sativa
ccgggtcacgagctgggtcctagcactacaccaaaattcctaattagtgacacttctaaatgtcactattattaatatttagtgacactttataatttagtggcatttcttaaaaatataagctattctaatgtcactaaagattgaagtgtcactaaactaatttttattgacattttaaaatgacacctaaatataaattgtgacacttcaaaatgtcactataatatttattattttttttgtttaatattttcaaaatgatttagggacatttttaaaatgtaaaaaaaaaaaaaattagtgacattttttaaaaatgccataaattttttttatatataatatataatttatttaagaattacgtaattaattttaagagtcatgtacattattaaaaaaaagttgtttatttaagaattacgtaattaattttatataatttttatgtataaataatatttaatatatttatatttacttatataaatttatta

SEQ ID NO: 105541 - DNA, 503 bp, Cannabis sativa
tcaatagtactcgcaatgtatcataagtactcattatgtatttatacttagtcaatttatctataaatgttctaagtatagggggtatatagcccactttgcactattgattaacttgttctttttaaaagttaaatttttcaaaaattcattttaccttagtgttttttacaccaagctgtaaataaaaccgcaattgaaataacaaaagacgcgagtacccgtgtactgtgaatatgataacataaataaatatcatcgaaatgatatatgtgcttcgaaatattaaagacaataaagataaatttgtctaagtacaaatcgcaagtacccgcgtaccgcttaaagaagtttggcaaaataaaatattcataaagtaagtaaactaagcattgggggcagggcagttagagcagtggattcatctgcgactttactggcagcctcgtcagtgacttcttcagtattcgcagcatcagtgtcctcgagaaaaagatttcccc

SEQ ID NO: 105542 - DNA, 1804 bp, Cannabis sativa
agagagagagagagagagtcatggcagatgatatgaaaatgataaaggttagccgaaaatatatatatatttaaataggcatatggagtataaatgcccacatggtatgtaatatttattaggtaacagaggtgaaaactgtaaagacagccacgacctctctctcacactttccaattttaaaataaataaaaaagtatatgtcttttgactttcctagcacctagcacgaaaatctgtgcttaattttcgggtttcggatttacacccaaaataatacttatcttactttaaatccgaactcgacacccgtgtggagcactttcaggttagatctgacctgaccatacagtttttaattttttggctttttttagcagcgggtcggggcaggtggttgggtttttgggtttgcgggtctaaatgttcagccctattgataattcctaggttagcaaacagtttgtataagggctcatactccttgcctaaatctaattgcacactttttacttttaattgaaaaaatatctcaacataagcattgaattaaacaaacaaggatgcagctttagatttagatttcatgggaaataaccacaaaaatcttgtgaaatcatctacaaagcaaatgtaatatttgtaaccatcagtagaagggtaaaaagatggaccccatacattagaaaataccaaatcaaatggtatagatgttttattagtagtttgtttgaaactgaactggtgtagtttgcctatttggcatgcattacaaaactcaacattattacatttagtgtttggagacactttggtcataactttggctagaaattcttggagggatgtcctaacctgttgtgccaagtgggaacaattttggatctatcatgaacaagattggaggtggtggtgaagttgaagagatttaatggaaattgactgcagtggattgagttggaggatcacttggtgagttggagcagggctcttggagtttgtagatcccttcaatggatagtgccccaaagaaggtccttgcttggttgtcttgtccttgatgagacaacaaacaaagtcaaattcaataatgatattgttatgtgaagtgaactaagatatgctaagtaagttcttgataaaggtggaaagatgtagaatatctttgaggactaaaaatttattagcagaattagtatgaagaaaggtattgccaatttgatttataggaagagtagagcctttaccaaccattacttttgctttgcccttgtagtcagttgaggttgtcatattgtcagaactgttggttatgtgatgtgttgctccagtatcaaggtaccaggctccagacatatctgtagtggctgaagattctgtgagatttgcatgtggagagttaatgggaggggcagatgaagaagaggcttcttgatttggaggagggccaatgaatgtaatgtcgaacctatggtagcacttgagtccaatatggctagctctaccacacaactaacaaataagtcaatttcctcttcctcctctattagaatagtttcctcttcctcatttgcaaccacaatatccacagccagagttaccttgatatgcacctctagtattggttgtgttagcaagatttacttgcacatttctgagagaatcagaggtgagttgattgattctcatttcttgactatgaagcatgaattgaacttcgtgtagggttggattttctgcacgagaagttaagttgacaataacaacttcatatttagagccaagacctccaagaacaaaaata

SEQ ID NO: 105543 - DNA, 958 bp, Cannabis sativa
tcttcaattatcaacaatttagagattattttttttttatttatttttttttatcttacacacatttaaattatgttttctaaagtatttgaacatcaatttttagtttatttttggattaacttaagaacatatttaaattatcaagctttcttaaactaataatgttttttctttagactcacctaataactaataatattttttctttaatttttaattgtattactttcaaataaagtagaaaatacctagcacaaaatctagttatacttgcctcgcacgtagtttttttattgtatatatataaatatatattttcttgagaatgaggagatcacacagactgttgtctaaacttaaaaaaaaaaaatgatagaaaacacaaataaaaatatgtattaaaaggtaattcaacttttcatcataaattttaagtaaaaaaattgtcacaaaagtgacatgcccaatcaaatcaacaaataaagtgtctgtatttacttattaattcaagagaaatatatatattaacacacatttttttttttttgggatgaaggagatcacacgagctttgtctattttttctttaaaatagatgaaaaacacaaataagaacatgtattagaaggtatttcaatttttcatcatcaattttaagtaaaaaaaaacagttacaaaagtgacatgccgaatcaaatcaacacttcttataaacttaaaatataattaaattagttagaataaaccttgaattgtcacgttttaacaaaatggaacatttttttttaataaaaaatacagtatacaatatggcagtaaaaacataattttatacgtataacagtcaaattataaaaaacttgagaaacaccgtgtaaatttccgtaattttttttacttcaaaaataaaaagttccttttttgtttcattaaaacgggccatggaaatagatta

SEQ ID NO: 105544 - DNA, 620 bp, Cannabis sativa
tctgctagtggctccttggatacctattaggtttccttccttcctcaactttaacactacttctacctttccttttacacagtccctgcaaactactggcattatgattccaactcctattaacccaaatatgcgtgagatgattcctcctttcaactggtctgatcttagtttgtctctaagtaattctgcttttagtccttataccactgattctgtgattgtaactgcctctgttcctatggttagctccgagcttcagatgggaggctttcagcctcaagcttccattctgtctgcccaggatgggaatgtttgtctcaattccaatcctatggagatggagcatggtgtccatgtgagccaacctgactactctgttcgtggtaagggtttggcctctgcttcaggggtcaaaagaccttcctttcagcttcatcaagctgttgttggtggctctttgagatctaccctgaagagagctcgagctggtgatagtgatgatagttcttctgctgcaacttctgaacctaaacaggcgggtgatgctgagcacacccgcctggaaaaatgagtcttttgagctggaatgcacgtggtttggggagtacacgtgcatt

SEQ ID NO: 105545 - DNA, 995 bp, Cannabis sativa
atatctaacttttaaatttaaattgtaagatctccatcttgtaattttagggtttagttttgacctagaaaaattacgaattataatatagctattgctacaaaattatagatttttgaattatatttccaacgccaatggaatcacctcaatcggagttataagactcttgatatggctgttttagtaaaacagtttctaaacctgcgaatttttctaaacttacgaattttctcacactaattagataataatgttatttaataccatttacagaattaattaaatctactaaatatattataaaaccctaatggaccttcatattgggctttaattaaacaattacttaccttgtgaaaataccataatattttattttcgtagttaatacaactttaactctctctagaaaattggtacaactactctaagcaataataactcactaacaatacaaataaatgagatgattattctctcataattaatatcgcaagaaaaagaaattaaatactattttaatctagatattacaattaagtagtaaatgtacatatacatatcttgtaccaacaatagtttaaaagtattgttttcaagaaataataaaatatgtatatattaatttgcttatgacattactcatatatgtaaattctatattctgaaatataatttcatgtctattcattctcttcagggaatgatatttaaatattctgaatgtacaataaatttgtgatatactaaaatatatgtacaatttacactctatcaaaaatcaaatataattttatcttgattataaatgtgtttgtactatagatacttgactactattattcaatttcacacatgatatatagatttcatgcactttaattgtgtgtggtattttatcacttagttgtttccaataaaaaaagaaaaaaagattcttgaaattatttcagtcagataagtatatatatataaatgtatatatatttagt

SEQ ID NO: 105546 - DNA, 1142 bp, Cannabis sativa
  modified_base (1092)..(1102): a, c, t, g, unknown or other
tggaggagtagaccttgggctgggcctttgagcaaatttttgggctctttttttcttcttttcaaatttactacttttatttcttccatctctcttctttgtcttcctccacaaaatacactctaattcctacaaaataacaataaattaaattcaaataaaatattttcaacataaaaatatatttcattaatttcatgaaaatattaatttaaacttaatttattttaaactttaagatcatgaaatgtgcatttttcaccattaatcacctatcccaacccctcacgaaataaacctcctttgtaacttgaaaagaagtcctactcgaaaagaagaaggcttctttcccttccaccagttcagcccatacatagagatgtcaccaaaagtaactacagcctttacctccaggaatatttctacaccccagttcttccattgagacacataactttccaaaaggctggccctttcaaaagacctactcctctaattaacatgaagaagagagttgatgacatgctgatgggagactttgttcaattttgaaagtcttcgaaaggttggactgataatgtcttgtcaatgagtgtatgttgatactagcttccctgatgaatcctggacaatgccacttaagcaggatgatgaggatgttcaaagtgcaactgtcatcctatctcagacagtatcagaagatgtgacctcaattcgaaatgacatagagtattcagggagaatatttgtgttcttggaccaagaagatggagaagttaactttattcaaatagctccggagaaggatatggggagtcagtaggtggctaatgctccatgctgtgaagttgaactttttttttttttgcttcccttcagctgtaataaccacttatcttttttctgtgcagacaatatgagcttcatcgctgctatgacatcttgttcaaactcaaagcaaaaaattccagtgtcaaaagaatctaaacctctggtctaggaatttgtttagggtatccttagtgcttctgttgcttcaaagaagaaagtcaaaaagaagagtagcccttgctggaaatattttaccaggannnnnnnnnnntaccaagtatgttttattaacatcgtaatatgaattctaa

SEQ ID NO: 105547 - DNA, 504 bp, Cannabis sativa
gaactccatagttaagcgtgcttagcctggggcaattttaagatgggtgacctcctgggaagttttcttaggaagcgtgcgagtgaggacaaagcacgctggagcggggacgttacaagcatttagtttttgatattaaatatattaaattttaaaataaaataaataaatgtaatacatatgggtcctccacatgtccatatttatgagttaacggaagtggtagtaatagatgtaagagaactgtaacattaggtattaacgtctccaaaaataaaaataatatattaagtgtataaaatctaaaacattaaatatttatgctgcaatttaccaaataaaaaacctcctattaaagaattttcaaaaaaaaaaaaactcctattattcttacattttttgaaaagcgtctgatcttaaactcgaaacgacaaagcaaagctttaattattaaactaatcacgcgctaccagtgcatgtgggtgtgaaaataacaatatatat

SEQ ID NO: 105548 - DNA, 618 bp, Cannabis sativa
  modified_base (225)..(230): a, c, t, g, unknown or other
tgtgttgaaaattaatttattaattaattttagaccgacataaattagaataatttttcaggatttattttatcttaatttatgtaaatttcaaaaaaagtattttaaatacattgaatttctaatttttctatatatatctatagaaaattaaatttgagttgaattttaactttggaccaactcaaattagtaattttcgtaatatttattgagaattattannnnnntggaaaataattttattttattttcagatctttctaagtataattttatgaatattaaattaaaatttatatttagagttatctaaattgataattttaattgaataaatatatatatatatataataaatagggaaaattacatgtgaatacgtgtttgccaatttaatttcaataatgacgtgatgtgtgaaattattgatattactgttattttatacccctttttttaatttaaactatatcagatagactattaaacatgctgaaggtattgaggagagaagggattgatgagggaaattgaagatgtcagagagtactaatgtgatgtgcatcaattatttttttctatatgtttaagtttatttattcttttttgtgaaca

SEQ ID NO: 105549 - DNA, 1459 bp, Cannabis sativa
tataattattaattatttttttataatttattactaaataaggatcttttagtattttttttgccctcaaattattaaaatttttataacaaaactccttataatttaaaattatacacataatttcataattaaaattttattacacctaaccttaatttaaaattattatacttaattttctagtttgtttttatttaaataggttgaatgtattttctaaaaaaaaggtgaaactcctccctcctttttgtttggataaggagtcatttattgaaaaaactaaactagagtcaaaaaataaagccaagctcccccaaaaaatgaagcaacctcaaactcaaaaagaaaaactcctccctgattgtttcgacttgttttgtacaaaatcgaaggaccctttcacttgaagactcttcgctagtaatcccctatatttattaagttttcagacaaatctgagagcgatttctaatttcaaagaaacaaaatcaaacatcaaaaatagagaaacctatcttcgtcgctctcttctcccgattgctttctttgatttttgtccctgtcttcaatttctcaacaacaaaataaatctcggtggtcttattagtcatggcaggtaaggtactccaaccctcactctatgtattataatagctttaatttttttttttgttttttttatgtcactccttttcttatttaaggttaattttttgttaattttgcattgcaataatgacaatagtggtgtagaagtatctcaactattaaggtgtatctcttactttaaattgattattgaagcttgaaatttatgttgatactataacgagataaaagttcagatttctttcatttctcgctttgaattgattttgaagcttgaaattataggaagatgtgcttgaattgttgctagaaaggtaagtatgtacccacaacgatgatgattatcatattttctatagatttataagatttatgtatattattaaccttagtttgtgctaatgatttgaacaacatactgtttttttattaaaattgaacaagaaaaaattatattaataggattaaatgtagaattttgcctagagatttaaaagtatttaaagactgaataacaaaacagtgtagtattataggcataattattactatagtccaatggtatttgaacatatactacttaggtttcatcttaaggtctcatacttaattcttctagttgtaaaaaaataattaaatatcattcaaaaatgattttttttttgataaatcagggcattatattgcacaaaacactatgtacaaactataggcacccaaatcaggcccaatcaatctatacatcagatattatctacattatagatcattgaaccattttttgtctacttctttagtcttcttgggtgtaaacaaggcaatccgtgttttgatattccattttgtc

SEQ ID NO: 105550 - DNA, 550 bp, Cannabis sativa
tgcttaagggttaaagtccatcgtacttctgaaaagttaattttttttggcctttcttagtgttgttcatagcagtgacggacctagaatttttactttatggaggcttatttatcattaaaaaatatttatacctttattataattattcttactagatttatttaattttgtgagagttttttctactattttgatctataattatcaaattaaaaaaaattgcatttaatttttcaaaagattctatttttgttagtgggggctatagccaccacattaataaaagtagctacgtcccagcttcatagtccacttcgggatcacaagagcaaaaggcttggcttatagacccacctacgtgaaagagagtctcaactaaacagaaaagagaaataacatttgattaaactttaaattgaacattgacagtagtaaagaatagtagagtctgcaatgacctaatcgatagctgatcatccaacctataaagtcaggtttgcgccaagtgagtaggaagttgctgtatggtgttttcaataagaaaaca

SEQ ID NO: 105551 - DNA, 504 bp, Cannabis sativa
ataatgaatgtatcgtaatacatgaaagataatactcgacatataatgaggacctatcactatgattcatatgtttactatgtaatgaggaacgttgggttttaagtggtaaaataatttaaaaactgaccaagtgggagaatgttagaatattttttatatggtaacaaatcaaataaaatatttgatttaatttataaaatataattaattgaaacattttaattatggtcatattaattacttaatattcagttatccaatttaatttctaaaattaattatcaaaatattcaaacattagttatggcagagaccttgatagaaggtctcacctatataaatatagagtgtcacgacccgagccctaggccgtagcagatatgtaatatccataacttgggtggtcaaaggtcacattttgacccttgtaggaagataaattttataaatgatccttgtatttatatcacagaatactaatttaaaagtaatggattaact

SEQ ID NO: 105552 - DNA, 990 bp, Cannabis sativa
tgcatcccacacgtactgagtctaaaatattcatacgacagtactattgaccctaatatcagtctatactcggtactatagtcgtaccgatgtgatagtgttaattagtacttaggccaaatatatatccatcggtattcattgtaactctatgtatactaatactgccattactgatctgttagataatatgcatttccaaatatgcacgctaaacatgtaatcacatataatactattatactaatcttaccttgatttagaattcaggtgtgtgggtcaacctgagtggaactgctgctcaacagtttacaggcccctaagtcaggacttacgcaaaactgataagtgatacgctaaatcactgtttggggacttagactcatagaattcctatcaataaatagcgtgactaagcctaaacatcgagaaaacgctgaaaatgagatctcaaaaaaacaccaccaaaaacgacaggtcgtttcctaaaatcgacaagccgttttttcaggtgtgtgactgccgaaaattgtaagtcatttttagaaaaatggcttgccgttttttactacaaaaacacaagaaactcagagctcaaagaattcaactccaagtcttaccaaaagctcatgatcacttaattagaccgtaacaagtgtaaacaatctgaaaaatccatcattaagctaaaaattcaaaaaccaccattgaaggatctatcttgagcttgaaaactcaattcaagttaaaacatagctacaatcatcaaaacctactcaaaactactcaaataataacataaaaactgtagaaacaaaacaactcagccctcaacaaaaatagaaactaaaccctaaaattcatgcatgaaagctcactttttactaaagaaactaaagggtaaaggcttaacttgtccctaccaaaattcttgctagatcacaagaaagatgaataaaaaaccttggttccttgctggttctaagagag

SEQ ID NO: 105553 - DNA, 1796 bp, Cannabis sativa
tacttctaaggttgccaaaatctgtaattaagttctgccttgtaaaactgagctcgttggcttctactattttccaccaaaatatgctaacatccctctaaatgactccaaatggatgattagtcttcaaaataacctaataaattataattacactaatcaataatttaaagaatcaatttaagaatatcaatacataaattagctatatttataaggcaaaacatcacttatcatccttattctatgcgatttgataaaaaagaaaattgtgctaggcttccaaataacacgttatctggccttccaaaaatgcagtacttggactgctttcgggtacaagctgtccttggcagaagcttgtttgagcgaggaaggtagatgcctttgatgaaggtcttgctggacttgggcttagcccaagccatcttctttgtcccttgccgaaaatgcggataacatttacccctaagctttcaaaatattgtctattgtggaagctcgccccaatccatatgagtggacatgtggaggttaaaagtaatatttttattaatttttatgtgctagttgattttgaaaggtggacttccatcttcggctctgggaagcagacttggcagtcatatagtggtggaggagtgtgtttatcgaaaagtcacttttcagaaaagcttttattttgacgggaattattggtgcaaaaattaagataagcactttcatcattgatttgtgccttagttccagggacattaaatgcttgacatgcctggatgttggacttctgagccgtaggatatgtttgtacttttagaaaaacgatctagatcgttcattttttcttcacgcgaatagctattttgagtataaatactcttaaaagctactatttaccacttttttcccatttcacattttcattcacttgagtttaagctttcttgagagtaaagttcagtgagagattctagtagtgaatgaactcaaactttgacgatctcctccaaattgctcttcggctaagaaatcgtcttctactaaaccatccacccttagtgatcaattgttttcaaatgagtgacttggtgaatctcaattttaactttgaaatcgatttgttgattgccttagccaaccgtcttcgtgaaagccgtgctcgcttgcgcttcccaaaaccgacaaagatcagttgggagccttcgtcttctctgccaggtatgggtttgtttggtttctcgcctttaattgtgtttatgaattcattataaaagttagggtttgcgtatttttctttgagtgaaattaggatttcttaggccagtgaccaatacttctggtagttttaaatgtgatgaaccttattgccttcgatttttagtcttagcaatttctggaaaatagttgtgttgctgtagaaatgttgacgaaatttttccacatcgaggatccttctgattttgggtactttgtcaatttcctccttattcttcttcttaatgttcccgattttctatttggaacgaatgactcttgaaggtttttatttttgggaacctctccaagtagtttatggggttggattccaatgctccccctctatattaggtagtttgggtagttaactgcttagttttctttctttctacagaattcatgtccaagaaggtccagcaagaagaggtcatggagcaagagaatgctcaaaattgatgttgaaacagttcatgggagatggaccaatatattaataaatatgatgttttagtcataattaactttttgttgtgactaaa

SEQ ID NO: 105554 - DNA, 1176 bp, Cannabis sativa
gatataaaaggctctttgaaaccttaatcacataacagactaataccttctctacactctccattgcatctgcattatgcaccatgtgattttaccaataaaaaggccgcagcagatccaatattgatgccccaactgggaaaacaaagcaaaattttacattttcaatagtaagcaaacttatgcttcaactgccgcaattccttcttcttctgtagaatcgcctgaaacaacttcctctacagggccaagatctgaagattctgcttctgttgtttccttttctggctcagcatgaagtaacttctcccgaagcttcatagtaagttcttctgcagcgatctcatcactagaaagaaaccttttcaaagcatctttaccgtgaaaattcttgccatttaaattataatgtgacccggcttttgaaaggaatttatatttcaaccccaattcgatcagttctgatgctcgacatattcccttgccaaactctagctcgaattgagcatttttaaatggaggcgcaagcttgttcttcacaatcttcactaaaacttgactacctactgtctacaaaacatgatggaaactagtctcagaattgaaaggtcctctttacaaactgccaaaaggtaatgtgactaattaccaacgaacaaagtaactgacacctttttatcagtatcattagagtggaaaaattaatagaacaaatataattttaagtaaacaaaacaggagagtttgtacctcttcacccttcttgacataccctgttcgccttatatttagtcgcaccgaagcatagaacttcaaagcattgccaccacatgtaacttcagtgggaccaccaaatcctccgaaagtactaattttcgacctcacctgtagaaaaatgtacagtttatggctacccatattattataaggaaaaactgttacccacaaccttcaatgaaactgcagcattcataatagaaaatcaaattgtagggtataagacttggttcgcaaagataacaaggaacagatgcaagttcagcaatgggaagtggagattccctgattccaacagaattcagcaatggtaggtgataaatgcaacaagccaaatacataaaataaaacaaacgccaaaaaagtaaagccttgcaaataaataccccaaaatttact

SEQ ID NO: 105555 - DNA, 509 bp, Cannabis sativa
agaaagaagaaagaagaagaaaacaaagtaatttttaattaaatggagcattgatttgtttgatgtggtgggttttgatctatgtcgtgattgcttgtagatttctttttcccaatatttatggatatgtttatatatggtattagtatatgctgcctgcctggtgattattccaacttgaattagttctttatttggtttctaagttgtactcatcatgataatctcaggtttcaaaacgctgagtgatcaaaacttaagctaactccaggtgcatatttattatggccaaatattccatatctcaaacccttaaatatggttttttctcataaaaagagattatgatgttttttggcctgcaataatattttggggtgaactttcacatgactgtgttggttgttgtatgaaccaggatgaattcttaatctaaacgatccatccatttgtatggatttcttggtaaatagataaatggttacttcaatttagaattggtgtgattg

SEQ ID NO: 105556 - DNA, 618 bp, Cannabis sativa
ttatttatttatttattttactttgtgaaatataatattcattttttattatattttttacacttttgatattcttatttagtagatatattaataaatattattaacaaataacaagcaatcaatactaataaataatatatactaatagatatatatttgaaatggtatatactaattagtatatgttaagaatatataatagttactattaacaagtaagaagtaattaatactatttttgaaattgtacatactaattagtacatattttaaattatatagatactaaaaagtaatagatacaattaggtatacatttgaaaatgtacatactaattagtctatatttaaaactgtatatatagagaaaaacaagtaatagatactattaggtatacgtttgaaattaaaaatactaattggtatatatttaaaactgaatagatcttaataaattataaatagtataaaattatatattaattggtataaatttaaaattgtaaaatattaacaagtaaaagatactattcagtaacaacttgattgtgatgagaatacaacctgtgttaaataatagagtggaactacgaagcttctctctctctctctctc

SEQ ID NO: 105557 - DNA, 4022 bp, Cannabis sativa
ttcaaaaaccgaccaacaagacaccaacgcacatcgtactcctcctcttcttcttccacttccaaagacagcccaccaaactcttcaatctccagaataacctcctcatcattctcctctggataactccttgaactggcagaagccattgcagcagtaaaaagaattacagcaaaaaaaaaacaagcaccagaaacagacaataactcaatacagcaaaggacaacaagacaaaatcaaacccatgtcaaaggacaggacataaaatcacttttttttaatctattaataatattcaagggaatagtccaactatcttctggccatattttttttttaggattgttacaacaccttctagatttatcatgacattataattaattagtaataatttttaaaaatttatatttataaattgtacaaatagtgatattgataaatgtagtaagcatgtcaatgatatattttaacattcctctattttagtaatttgtaccattactctagtcttgctttacgcctacatttctatagttaacttttatttttattctttttgggctgcttttgattttagaaagaaaaaagtttatatgaatcaagtgtgatttcaattgattcattgctacaacaaaacaattacaaaactaaaataattagcaatgagtctccccacttacactcaaagactcgaaccaaatttcctctctttctatttctcattatctctcataacataattaaaaatgtgatttaggcctactatactagatctcattaattttattttgcgatatgccagttactactaaaaaaaattaccaatcccatccctatctctccaataaataattgtgacctagttattttttttttctaccttatttattaattatttggtatactattttttgctggagattatttggtacactattacttttccctctctcttgttggagatgatgagtatagggtacttctctctgcctcacacaatcattgccatgattatctggcaatcattttgtaatcatctagagtattctttttattattagaaagttgttatgtcttgatttttatattatcacttggcacaacctctttggctcttcctgtatcatgctatccctacataattaaggctccacactcagtatcaatatgagatgagtaaataagttttctttttttggctaaaacttaacttggtatcagagtcgtaccactcctccaccaaaatgtcaataggaaattctcaaactccccacaccaccacctacaaatcgtgcccagcaaatccaacctgccaccaaccctactgcacaaactttcagtggtgttggtacctctaatagctcaccaaactgaccacaaattacacacaaccttttaacacccttaaccagcccttttcaatcaagctagaacgaaataatttcacactatggaagacaacagtatctaccataatccaaggccacagattggatggttttgtcgatggcacaagacctttccctcctgaattcataccagcagagactactacagacagacaacaaagttttagagttacaataaatcctgactatgaacattggatagttagtgatcagcttctcatgagacggatctacagctctatgacgaaatctattgctacagaggtcatgggatgtgctactttaggtgcacttgtgagagccttggaaaacctatttggagcacattcaggggccaaaatggatgagtacaaaacttttattcagacaactcgtaaaggtatgacacccatgactgaatatcttaaacaaaagaaaatgtgggctgatatgcttgctcttgctggaaatccctatccagaagctcatttagtgtcaaatgtcacttctggtcttggtattgagtatttgtctattgttgttcaagtggaagaaaagcctaacatatcttggcatgaattacaagatctgctgcttagttttaacaacaaatttgaggagattgtagggtttaaatggcaacaccaaatcttgcagccttggtttaataagatctggctcaaatccaacaacaaaccttgctacaattttggtacaaaaccaaacaacagtccaaatgcaaatcgaggtaaaggacattcaaactcatattctcgtggaaattgtggtggtgcacctcaatctaacaattgagaaggtggaagaggtggaggccctagtcgatctaataattctaagccaaattgccaagtgtgtggcaagtatggccactcagccgcatactattataatagatatgatgaggctttcatgggaagagatccaagagcccaaataaatttgcaacaaggtggttactcttcttatgttgcaactctagaggtggttgataacaccacatcacctccttaatgtcaaatctaaaggtgaaatcaacttacaatggtaaggagaaaataactattggtgatggaaaccaaatagatatttctcatgttggtccaagtagtttattaaccaacactaagaacccttttttgttaattgagctattgcatgtgccaaagattgcagagaacttgataagtgtatcaaagttaactggtgataataatgtgtttattgaattttactctacctcttgttttgtggacaaggtgataaggaagttattgctcaaagggagacatggacatggattgtatcgtcttgacacaccagcaaagtcagcttccaactctacatgtcagtttttgtttctcaaacaaccttagaaatttactcgtgtctctgttctccaaagtaagtgcaacacagtcctgtaatagtgtgtcttttgttttcaaaaatgatatatggcatagaaggttagggcatccttcaattagagtcttaaaacatatcttagctactgagaatgtacctttttccagcaataaaaatgttcacttttgtgatgcttgcaaattcagcaaatctcatgcacttccattcaaaatgtcctcaaactgtgcctctctaaattcttagaagttgctcatactgatctttggggtcctgcacccatattgtccaaaacaagttacaaatactacatacactttgttgatgattttagtagatacacttagatctatccacttaaagtaaaatcggatgcctttgaagcctttgttcagttcaaaatacttgctaaaatcaatttgaggaaataattaaaacacttaaaattgattggggtggggaataccaagccttttgagacattattgtagaacatggaattcaatttattcactcgtgtccccacacttcaactcaaaatgaaaaagttaagtgcaaacataggcacatagtcgaaatgggacttacacttttggcttaagttattataccactcaagtattgggttggtacctttcaaactattgtatatttattaaataggtttcctacacctgttttacatcataaatcacattttgaagtgttgtttaacaaataagatttctcctttctcaaagtgtttggttccacctgtttttcatgcttgagaccatatcaagcaaacaaatttcagtttcactctttgaaatgtgttaataatgtcataatgattgccataaggggtacaaatttcttagttcaactggaagagtttacatttctagaaatgtaaccttcaatgagaatgaatgtccatttaaaaatggatttctcaataactatgcattaaaattaaaactattatagttcaaaactcccaatggtcccaacttcctaccatacgattcaccaaattctttcaaaaaattactaccacacctatggccaacagtcaagatacaacctctctactctctcgtggagcatcataaaccatacagcagcaagaggtaaatactccaactaattctgatgatgaaaacaatgaaaatttagccatgattctaacctgcatatcagccagctcctaagctagatgttacagaccagagggctacaatagtg

SEQ ID NO: 105558 - DNA, 515 bp, Cannabis sativa
  modified_base (288)..(293): a, c, t, g, unknown or other
gaaattgccttttattacttttttcttaagtcatttatcttactattattttcgaggtaaatattattttgaaacttgtattttgcaaaaattattaattagattttttgttttgttaaatgacaaaatagatattgtactttctaaaatggtacaaagaggacgctgaattaattttttgtcaaaataaaatttaattataattcgatctaaaagtgctatgataaaactgtttatattttttgtatctgttcgtataaggaattattttcaagttggttatattannnnnnaaaagttgtcaaaaattaagcacatggtcttatttttactattttgaaaaatacatggtctattttatcatttaacaaaatacagggttcagtcggtaacttttgtaaaacacagggtccaaaatgatatttacccttattttcgccaaaaaacatttaactgcaaagttatgatgaaatttaatatattaatattgttataatcgcattcttttaaaagag

SEQ ID NO: 105559 - DNA, 2610 bp, Cannabis sativa
atctaaatttattaacatgtatgttgattataattctataatataacatcctaaatatgaaattcctaaaaatgataaataaacacataagggagtaataaaaccttacagtctgtattagagcattatcaagatctgaacttggatcttcttatccttcgattatgttcgtgatagtcttccagaaaggcctgagtatcaccttgaatagagtgggctgatactcaaatcacatttggaacaaaattttaacaaagaattgtgtttggttaggtaatgaaatggaatagaatggaaaggaaacaatttttattctattcctttgtttggttgcatattaaagcatttcaatgttattccaatggaataatatttctactattttggtagaatgactattctattttaaaatagaaggaaagaccattccaatgcatgatgagaaaaaatttaacaatttttttgtattttttttttttgcattttaaattttattctattccatttttattcctattctcattcctattcctatttccatgttttcattcctcccaaccaaacaccaccttagtaaattttgaaattgaagagaaggtgaagaagtgacattaaatctttcaattctcttctctttctttatatatgtattcacttagggttaggtttagataagatgggtttgataaagacttgggctaaatctttctcttagggccaaatatacatataggttttagagttagaattttgccactttatttcaactaataaaataaaagcgtctttttaaattttagcacttttctcatctaattatttaaatgctaatttagttttaataattgtaaataattatcaaatgaaatataatttaaaaatatttattaattagacccaaaaagtgtactaattaataaataaattcctatttctcttttcttcttaaatatgtccaaacttggtaaaaattctcaaataagacttagtctttttttttcgaattctaattgacttattaaatcatttagttaagtctacaataggagtggtaaaatgtgtcatcgtgtcgtgttcgtgtcatattttatatgacccgcttttatattttgtgtcaagcgtgtctaccccttttttgacttgtgtctaattttctcaaccctaagcagacccataaaaaatcgtgacgtgttcatgtcgacccactgtgatccgttttgctattattaaaactggaattgtagaaaaaaatgattgtgtaaatattttgttatatatataatcaaaattaaaaattttaaaatattttctttttcatattaaagaaaatttaattaaatttttttaagacttactaaatatatatatttttatatataattacattattgttaataactttttattttattgtatttaaaaaactatgtcaaacgtgtcgaattcgtgttaagcgggtcgtatcgtgtttcacctgtttttattttgtatcaagtcatgtcaacttattttcgacctgcatctaattttttcgaccctaacccataaaattagtgtagtgttcgtgttcgtgtgccgtgttgaaactcgtttcgccacccctagtctacaagatgatattattccagacaatgcgggggccatgggcctatgtaaccaagctcataataagtagatctgaaatttaccaagtaattggtaaatttcttaacttattaattccttttgactccactatagtttcagaaatgcactcctaattacatagaacactctatataccaaatatagatacgctttgaattatccattgttacaatctaaatagtcaatgatcctctatagacgatttacattgaataggaataaatttaccgttttaccctttaatatattttatacttaaaacacttaggtacttgtaaatgatatttcaggaaactaatataattactgaaatgagtgctctatcatttatcgcgttaagccaaagaaaactattgtttcactacttatagaagctatagattctaaatctatgattaatgttcccactcaattgaactacagagttctcaagatgtaagtattgtgtcgatcctattggtcagctgtaatgaataagtcagagaacccatatagtacaattaagatagaacttaaccatcttaggattgagatcagttgacctaagatcagctaagtgacatttgacttaaaaaagacatataacaataagtttatgatatcttttctattatcaatatcagtccagttcgatgtatagctgatacatccaatcctagtttactttgctaatgacttggaaagaacattccacttgtacaagtgcaagtaaaccacatccctgattatcacgtcagtgtaaatctagtgtactgataaattgtgagactaaatagtttaaagcatataatcatattattttccactgtgtagacaacactataatcatgaataattataagttaaagatataatagaatttatatattaaacatacagggctcgtttggtaagttgtattaggtcgtattgtattgtattatattgaattgaattatataccatatttttatataatactat

SEQ ID NO: 105560 - DNA, 595 bp, Cannabis sativa
ttgctatatctttctttagctcctcaaaaatacttgagttgcttccacttaagattaagtcatctacatacaagcatacaatcaagatatctttacttctacaaaaactagtttcagtgacccttattgagtgactctaaaataatttagtgacccttcactgcgcgtctgttagaaaatcaacattcttaattattattattatacagtaaagctgtatataataattctgtttttattgtaccatattttagggaattagtttaggaattcattgtatctttattatttgatatgtttttctttataggattattgtacatcttatatatactgctttatatcagaaataaaataatacagaaaaaaacatttttttccctaaatctgtcgacttggtatcagtgccagaaaaagaagacaaaaaaattcgtactctaccctaatcgcattcctaaccctaatcacctctgtcctatttgcaccatgccagattctgagtcaggtacaaccaaaaacaaccccatccaaaccaattctactgttccttctacaaaatctactgagtctcactctttccagatcactactattc

SEQ ID NO: 105561 - DNA, 751 bp, Cannabis sativa
tttttttttttttttttttagtggagaacaaaaagaagttaattataaaaagaaaaaaaatttgatatgaacatattttttcaattgtttttgtaattttataatatttaaaagttattgaaataattaaaaaatttggtaccaataagaatatgcaatgtgtacatagatgtacatggtggcaatcttagttggcgtcctaattggcacttaactgaaaaatttaactgttattttaagtttgcaaacagaactaaactataggggatttcaccacaaaaaaaaaagaaaagaaaagggggttatgtgtatacaaactaaaacataaaggggtttagctgcaaatttctcaaaataaaatggtttattaataaaaataaaatggtttataataaaataaatcccattaaatccaaaaaaaaaatgcaattggtttttgctgttgtacatctacgattggttttttctagttatttagttggattttattctaaataagaatttactactatttatataatatatatatattgctaaagaatttttctatttgtttttttatcaggttataattgtttgcctccacatccgaatccattaaatgtggctcgattatatctatatatgtaaaattattgggtattttttttaaaaatattttttatatatataaaatgtggctatgtaacagaattcttggtttaatgttattatttatttttctgtgaaaatgttaacaaaatattctaat

SEQ ID NO: 105562 - DNA, 572 bp, Cannabis sativa
aagaggatgatgtcgaagtcccccaaacgaaaaagcagggcgaagaaaagtaagggagtaagggttgaggaaaacgccccatcggatctcggcatgtcatatgagcatgactcagccactgaggatgccgttggggccctactcagtgctcttcccgaggtctcgtcgggcgtgggcgaaggtgaaggcaattccggggggttggccccaacgggagcctccaatctagggcctcctgatcgggaaggtttctctcagcctgagaccctcccgacggctacgctgggccttaatccggggcttccatcctcttctcctgctcggactcctgcttctctactcagcgtgccgtcgacttcccaacttgccctttctcctgctctaacacaccctacaaccttctcctccaatcgaggctccccgcctctacccaatcatcccccgcaagtgtcggctgaatgggacgagattcctgccttccagattaagaaggatgtcccgttcgaggagtcggctaagaattatttcaaaactctcctggacgccgtcagaaaacctgatgatgatttcta

SEQ ID NO: 105563 - DNA, 608 bp, Cannabis sativa
ttagtccggtggggcgctgccgctgctatctcctccctaacatccaaattcccaggcgtcatcgactcctccacccatccaccgctccaagcaaactgtccaatccagtcctccctgtatcatctttttctcttcttttatcttcacttcagttctctaagtttaatgttaaatcatatatatgatctatatattatatagattatatatatatatatgatttaaatagtgtaattcgattggtctggtagctttgaattcgattcactattatttttcttggattgtctttataatatgtttttagttttttacaaattattgaaattaaatttctactctttctttatttaactttttgaattatttgataattgggagaaaatatagaaaataaattttctttatttaggtcatgcttgtgagcatggaaattttgtaggttgtgaattttgattcattaaataatgagagaaaccgagagagaaagagaaaaagattgattttatttctcaaattgatcataaaatagtacagagtaaagtgcttttatagcaccggtttacaagaatcaagttgatcaaaattaactaaccaattagttagtt

SEQ ID NO: 105564 - DNA, 516 bp, Cannabis sativa
  modified_base (27)..(31): a, c, t, g, unknown or other
aggatgttaatgaaacatacatggtannnnntctagatcctggtaaaatatttcgaacaaataaaacataattttcttccaaacaaattaagatacacatacatggattttacgaacagcctccaagccagccaacacaacttgatcatcatctatttcaagctggcttaacccatcaaaaaaaatcgtccccctttaatccagactcattgccctttggcttctcaacatccttagccctctcatcattgcctccaatagcctcagatggattcacatcagaaggaggaacatcattaacaaccttatcagcatcatcagcatcaccaccatctttaaccaactcatcaccatcatcatagtcggaatcaatattttcaggatcaggctgttccttctcatcatcctcagaatcatcatcatcatcatcatcagcagcagcagcatcatcatcatcatcatcatcatcatcagaatcttgagttactaattcatcagatgactttccctgattca

SEQ ID NO: 105565 - DNA, 530 bp, Cannabis sativa
aatttttgtaactgttttctcagctcaaaaacacaacaaaatcacagtcaacaaacactataaataaaggagcaacctgcccatttgaaggggatattcgactcaaaaatagagagtggcagcagtatttttccatgaagaaaaacacctcagaaacaagagagataaacagaaagagttggagagttctattataatcaaaccaaaaataagatgaaagaaaagagaaaagcttagagattacctgctggtttgtgacatggaatctccataatcttgcaactcggttttaacattcatagtggagactcaagcaactttgagggtcgcttgacggagacgtacctctaatttagagggaactctgaaataaattgttgtggtgtctatagatttttcttttgctagttttattttcggttgttctctagttttgttctttggtttttttctgcaggtttaaagcttggagaaagaaggttcggtgctatattttgcagcaagaagaaagaaggaagaagaactaaggg

SEQ ID NO: 105566 - DNA, 698 bp, Cannabis sativa
gattaggtctttaaaaggtaacaagatcccaaaccccgaagcatacacatcaaatagtttatgaaaaatttctattactctacctgatacatgagaatgagtagctcccgaatcaaataatactgaataagaacaaccattaatagacaactgacctgtcaccactgatggactagcattagcgttagcttgagtcatagagaataaataccctagattctgattgttgttcttctttggttcttctttcttagattgtggacactctctgataaattggcccatcatatcgcactggaaacatgtttttggctcagcactcaccctgatggtgctttttacatttgggacatttcaggtaagttttaagtgaagacccacgaccttgatggcagcctctgttcctacaaaactttctattattccccagtgttttgaaagcttcggccttctgcttgtggtctgggttgtcactgtcggtccccttacttacactaccaccaacattagggttcgatgccgtgacgacatccttagcagcctattctttgatcacatgttgtttcccctcttcagcaatcaatgctaactcgaccactttcttgtaatagtgtcgtgattaatggtgattttcaagtcccgactgctagtgacatgcagcccccttacatacttctgtttctgagtgaagtccattg

SEQ ID NO: 105567 - DNA, 930 bp, Cannabis sativa
taattttggattattctatacaatgtaaaaggaaaaagaaatggactgatctcttgagtttattaaattttttgttaaataacaaagttgcacaactatcaacttttctattctaatttttaagatatctcactaaatttaatatttttattttactttacatatttatattatatcatacattaggttctctatatttttctttatatcatttaactattatatatttagggacacgattttgtcccgtcattgtactttcacagaatgtattccgtgatgtaaaaaatgcattagatgggtttcaggtctgaggataagttactatgttttaaccctaattactctagaccaatcccagcgctcagatcaaataactctcccatctaacggctgtcgtacatcacggaacacattcctacaaaatcgtgtctctataaaatgagtggacccaaaaacgacattgtgtgaatgaccaaaaaaaaacaaaatatttggaaaagaatttgtagaaagtagataatgctaaatgctattttggtgttattgtcaattgatttattaacaacgtaaaacattattgggtctggttgtgcggtaggacggctaagaaccagagagaaagagaaagagcatgatatagcgggtggattagaggaatgtatttgtagcagatatgtagaagattgcattgcaataaaaatttgcatggatttttctttttttgttaaaggaagaaaatgggttaagcgtaattaaatgttttttttaaaaattgattaattattcataaatttattttagaataggtggaggtctaatatttatagaaaaataaaaaattattgtaaatattataattaattggtttgatggttaaaaaaattaggaatttttttttttttttatttttacacttcaaattagttt

SEQ ID NO: 105568 - DNA, 809 bp, Cannabis sativa
  modified_base (306)..(326): a, c, t, g, unknown or other
aaataagatattaatataattaaattattattttaaactaaccaactaaattttgaaaatttagggttcttaaaaacaaccttaaaaatatttagcatttaaaattcaaaaatgaaaactaatttaaaatatctaggtttatttgaattatttttatcaatttaaattaaatatcaaataagataaatgatttgaaaaatatctttaatatcatcttctaatcttataatttaataaaattaaaataataaaataaaacaattttaaaatagatgtggttgcataattattattttaagaataaannnnnnnnnnnnnnnnnnnnntcctaattatatgtcaaaatatcttaaattaagcatttgattaaagactctgaagttctttattgtgagtattaaagtcaaaatttcattaaagtttatcaatattattagttgaaaacgtttatctaaatcgttaacgagttcagaccattatcaagagtatattaaattttatatttattttttctaaatttttaaaactttaataaatatataaatactcttattatttttgtttaaaaaaaatagtattattgttttctttcattcaaactaggaaacaacccgcgcttcgcgtgcagttatattttatttattgatatttaagatataaaaatatatcaaatattttaaaaatttaaaatttctgatataatatttttaataatatgagtaattattttactaaactttttatagaagaaaaaaaattcaagcattttttgaatgaaaatcttgtgactttgtttttttttttttttt

SEQ ID NO: 105569 - DNA, 765 bp, Cannabis sativa
  modified_base (574)..(581): a, c, t, g, unknown or other
tggtcatctttccttctaggcaagactcgaatataggtaattcacctaagatgacatttggcaatggaccgtctttggttaacctattaagtctgtcatagcctatgtgacctaaatgtaaatgccatagataggtttgatcatcattatcgatcgtttgctttttatggtttctaggtttagctactttaaatagttcgttatgaagcgcaaattgttagtctagtcttagaacataaagcctctgttccatggatgcaacacaaatttgaatgttatttcgagatatggtagaaccagaactcgaaaaatctaatttgtattgtcgcaattgtaagcatgaaacagaaatcaagtttggaatgaataagacattgtctaattccaaaattctattttgaaacttaagtttggcttttcctctagctctaaccgataccatttcgacattaccaactttaagtttcaactctccagatttcaaataattccacttttcgagcaattgcaatgaacaactgacatggtttgtagatctagagtgaagaatccagatggatttatcattctctannnnnnnngattcaaaaactaaagcatcactgcttaatcgttttttaattgttgttattgctggttcaatctattgtgaagtataatccaaggaagtgagatcactttctctatttttctcaactgagcttggagtagtaggattgttggagttatgaactctttgcccttcagattgaacaattcctagct

SEQ ID NO: 105570 - DNA, 980 bp, Cannabis sativa
acataaatagctattatattgatcttgtctgatctttagcttaatataaacaaaaaaacttgcataaaataaaaaattgtactttcataagtggcactcgacctgagtactttgtcatttcatctgaacctttgggcgtggtccgcctagaatactgttcacttaagagtaaatgttattttgttttgtacttaaaatggtcatccgacctggcactgtcactggtagtattttcttaagtgttccccgttccaatactttggtactagaacgagttgaattttttcgtcgtacttaccctgcttgtatgctcctgattctagaactttaatcacctgatatggtccttcccagttcggtccgagcacacctgccgtgctgtctttggtgttcaaaaaaacccttcagaggaccatatctcccacgaagaatttttgtgctctcactttcttgttaatgtaccgagctaccttttgttgatgggctaccaatttcaggtttgctacggttcgcttttcttcgatttcatcaagagattctgcgaagagtgcatgattaacctcttagtcatttgtcaatcttctgtgggacggaggttcaagttctatgggcagcatagcttcataaccatatgccatggaaaatgaagtctgtccagttgctattttctcaattgtgcggtacgaccataacacttcagggagttcttccggccagtttcctttagcatcttcaagtcgtttctttagagtttctttgagtgtcttgtggactgcttcgacttgaccatttgcttggggatgtgcctctgcagagaaactttttatgatgtcatggtttgcacagatttcagtgaaggattgattgtgaaattgtttgccgttgtccgagactatcttgtacggtagtccaaaccgacaaattatatttttcacaatgaagtcttgcactttcttggatgtgatggttgccagcagctc

SEQ ID NO: 105571 - DNA, 1044 bp, Cannabis sativa
cacgtacaaatctcttgtgtcaagtgttttaattttctgtaattatatttatattctgtctgttctattttgtctctgcaaaattaatttctatagtaacagaattattttctgctgctgtagacatatacagttttatatataatatatttttataataattattggcatttgtaaaaacttgatttttcatcaaagtttatattttttttatattttattcctccatatataagacttccaataagaactcaattgcctaaattgatggttcgtactaaacaagatacacaataagtcaataaaatctcctacaatataatatgcaagtgttttaacttttttattattttaaataaaaaaaaaaaaaacaaagtttctttttttcttctatttatatatagtcgagttgggtagggttaaataaaggagggtggttgggttagtgtaaaatgaaaatgatcaattcaatatagtaggagtctaggagagatggtgactgggtgaggtggtgtttgtgcatgcgtggcgtcaaagttgcgtgagatgaaagccaaagcatcgccattagtttgatttcttttgttaatttattaaaaaagattgttgtttgtttttggtaaggaataataatttcatattagtatcttcaacgtaattactttaatatttacaaattaatctaaaaattgcccactatattctcacctatcaccttttaaatgatacccagtctacaccgcagctttgtgtggggcctattcttataatcccacgtcgtttcctacgtggacttcactttcaagccacgcaaggaacctcactgtctacctctcacctctcactcagatgatgattgatcatcttcgattcattctaaactacgcatatatggacagctatagctaaataatatcagtagttctttcaaaataataataataacaataatagtatcagtagtttctaaatatcacaataaatggaaagcattgctattgtggttagagattagtgggttcatcaccattaccagctgacaca

SEQ ID NO: 105572 - DNA, 670 bp, Cannabis sativa
gtataaaaattagtgtagtccaagtggagaatactagatttttatttgggcttacattaacttttattggttttgttgcctcgaatttttcccaaaatacgtggcagcgactgcgtacgacacgtagatctcaaagaacacccactcacagaaattggttaagtcatagacagagcagtgcatctcacggagtgagcctcctggagagaagcataaagcgcgtctttactctccgggagctggaaatgtaacaatgcatctccaggaggaaaggagatcgttcgagcagtcattttgaatttaatactgcatggaggaaaacgtatcagaacctccataagtggatttgacagatagcgtaagtctcttttatggcgattacacgataatcgacaagtctagtgacgactccattatgaagactcacatcaatcaaggaaggataatagattatattcacctaatccctaagatacttacgacataggtcatgtattttctattttgtatatgttaggattttgtgcccctaaggggctaacacttaaggacaagtgatccctttttaaggattctcccaaaaaatactataaataccccaaacatagaacgtaaaaggggtcgatcgatcaattaaggaatcgaaaggagtaaagaagagagagagaga

SEQ ID NO: 105573 - DNA, 857 bp, Cannabis sativa
ttgtgacacgtgtaatatttacaccgtatatattataggctaattatgtactaaattttttaaggttgttaaaaatgctcattgaactatcgagattgttagatttaagaatttttgtccaattttagtaaaaaaagtctaatatgatgaaagttcatgaggcatgatttagtacatgtcaaagttcgaggggcataatttggtagatgtcaaagtccgaggagcatgattttatacataaataattactgaaatagtaaaattaaataaaattagacaaaagtcctaaaatttaacaatctcaataatttatgaggaattttttacggtcagaaaagttcaagggcatgatttaatacatgttaaagtttagggggcgaaaatcctaattagcctatataaaaatgaaataataaatatcttatttttagaaaacatttattaatattttattaatttttatcaattagcctatagaaaaaattgacctcacttttaactaacgctgagtcaattaaagtgataagaataatagataataattaattataatgatatataattaagcaataagaacacataaatttatagaagttcttactcttacttgtgagaaaagaaacaataagttcttgatcactctcgaaagcttacaattttacagcgtaaaaactctgttgaataattaacattgagttccttaatagtgaaatggatctactatttataagaatgaattgcatcagttaggtctctcgaaacaaataagaaataaaatgggaaatttgtttactttcctaaaacaaataaaactaaagggaaactaggaagattttctcttgtttttttgtcggtgc

SEQ ID NO: 105574 - DNA, 723 bp, Cannabis sativa
aacaaccccgtgcaccaataccacacttacgcgcttattaccttaaccctaacttaaacttactattaatgaacatttatcatactctcatataacatttatttctagatgctcatatactacctaaaaatggaaaacggtaaataaataatcacaaaggcagttaagcatttactctcaacaattactacaccacgagtcaagcttgtctctgacgatgattgtacatgttcaaccggcctacaggaagtttaaaaaccttggcgttctgataccaaattataatgccctaacaattaggcacgctactattttcagataaacataacctaatcctgctaaaccggaattactagaaagaagagtaaaatttaaactttaaattatttacggaatgaaaacataacttgtaactatttaaactttacaaactattccaaaatattatacatgtttcgcgatctcgtaaaaaaatttcacaaaatattacaagtcattttaacttgtcgacctaagtgacaaaattgggagtacaaaatacatcagctggtagacccaacctgcatggtctagtgtggcccgaacatgtacaatccaccgccaagccctcaaactcatggctgatcatgaactgatttaccctttcctgcacagtagagcacccgtgagccaagcccagcaagaaagtataattatcaataatcataattaatacatcacata

SEQ ID NO: 105575 - DNA, 525 bp, Cannabis sativa
tgcaagtgtgcatgacgaggcattaacctcattgtgtggaggagatatgataacaataaaaatacttaccgtatataatgcaatatacaaactaagtataaatagtttggtgaatcaagatgacagacaacgaggcgtttatctcgctgcaagatggcatgcatgcaagaaagatcatctcgatacaagaaactatagttcaaaattaaagcagtatcaatctcgggaagttatatgacgagcatcacctcgccatcaaagttaactcgactccattcctagcaaggaatcctcacgagataaggcataccgtatatcttcaatatgtgctcatctcggtccaataaaagcgggatactcatagttgtgtgaattctaaataaaaaccacatttacttagcgtgatttgtaatcaaatcccatgatttgaggaaataattgttgtaaagatcataatcaacttttgtaattaacactgcccactatgtaattataaatagtggcaaataagatcaaaaaagggac

SEQ ID NO: 105576 - DNA, 724 bp, Cannabis sativa
tgaactatcaaatatgagcccactgctgctgagttaaagctttgaaattgagcagtttcaagtttgacactgattacaattcttacaggagtattcctgctccggaagagccttatgcagttgagagtgacatttctgtcaagcttgatgctttttctgagaaatttgatggtttgcaggtgaagattgatttgctgcatacttcccaacagaagatttcatctgatttggttgagttgaaagagtttgtgtctgcacagtttctttcttttgatgctcagattacttcaatgcagacacagttttctactgtttttgccgattcttatgctaaggtatgttagtttttcaatggttgtgttttagtttattttatgttgttttatacttatttaaattatatttttaaaacaggacaaagtgagtgactcttccaatgatgatggtggaagtgataatgaagaagacatagatttagatgaatttgaagaaacagatgacaatgaagaagaaaatgttgcaggtgatgaagaagaggagggtagtgaaggagaagagaaggatggtgaagctgatgaaaattctgagtcccaagaaaaagatgataagggcagtgatgatgaatgcattgatagtgagaagaaggtagataattagacaatgtaactgggttttagttactttgtgtgttttattctggtgtaagtccatttaggtaatggat

SEQ ID NO: 105577 - DNA, 677 bp, Cannabis sativa
atgctgtgtaattgaagatttgatgttgagtcatttcacactggaaacatattgttttagctctattagacaaccatattttccctcttaaaaagtcatttgttttctcataaaccattttatttttaataataaattattttatttttaatataaataaaaagtcacctacgaattttacataaaccaagaatttaattatataggcacactttatatagaatagatatatataaagttaacataccaaaagtaactgagcaaatttcattcacaaaaaattaaatgcattatgaaacttctcaagcttacaggaactttctgaaccaaattaaaaggagaatctaaaatgtctggtaactaagccactagttgtcatgttcttaaaacggaatctgagatgaaaatggcaaagccagaatcaaaaaatcctaaacacaaatccaagaatatctaaaagtacttgttaaagattcaatatattaggttctctaaaaacacaagtgccacaaataaaattgcatgcatgatattgattccaaagtcaatttaagaataataataataataatataggacaaattaaaagttacaatagtggagaaaaatggaacgaatctgttactgccatctgttggtcgtgggatttttgggtgctgctacaattcttcattttt

SEQ ID NO: 105578 - DNA, 936 bp, Cannabis sativa
  modified_base (444)..(448): a, c, t, g, unknown or other
  modified_base (881)..(895): a, c, t, g, unknown or other
gacaactagatccattgtggcggataggggtgcctcgccttaggttaatgcgagctcaattatgccctgaatgacaatattggtgccaatgaagccgcaaagatttaccatgcaaggcctcactttggccttttcgagccccatcttcttcaacatttccttataaaggatgttcactgagctccagttatctatcaacaccctctttatccttttattggcgagcttaatagtaatcaccaatggatcgacgtgaggatatcgcacattcttctcatcttcctccaagaatatgattggaggttcgttagttcttaccttcttggaaggttttggggcagataccgactgctcattctttatttctttcacatatctattttgggcgttgttgctctcccctgcgatatgcagccctcccgaaataaccaggatgtcctctcnnnnnacaggaagaggttgtaacccctggttgtttgggttattgggcagactgggttggttgtgtccattgccctgtctcttcacatactggttgaaacggccccgagcgatgagactttctatctcatctttcaactgacggcattcgtcggttgtgtgcccaatgtccttatggtatttacaatacctggtaggatctcttttgtgtctcgcatgcctcatggactcaggcttaccgaaggaaacctttcgctcatccactaggtaaatattttcccaagtttcattaagctcgatataaattgtatacactggcacatacttgtcgtgcttcttctgtttctttctatcctttgactattccttagaattgtcctttctctttgagccagaggcccttgagttatcaactcttgttgatgttgggttttatgccnnnnnnnnnnnnnnnttcaatataatcagatttaattattaatatagatcagaaat

SEQ ID NO: 105579 - DNA, 620 bp, Cannabis sativa
  modified_base (252)..(254): a, c, t, g, unknown or other
ttctggaagtcctgaaggtttgcggctccttcctgttgtagttcattccagaagggagtccctgtacggatgtctacctggataagggcaagctgttgtccgtcatcaactttcttggttttcgaggcttcctcgcggaacctctttacatagtttttcaaggtctctgtgggcagctgcttgatgttagtcaaggcactgacctcgaggttgacctttcttgcggcgacgaactgtctccggaagttggtnnntaacttattccaacaacccacggatcctgactccagcttcttgaaccattcctccgcggactcgcttagagtaagcgggaagcacagacattttgcatcattgccgactctcatgaccgtcatgacacggttaaaccgcgacatgtggtcgctaggatcggagttcccggcatcttaaagttcttggggagctctgcttccaggatgtgcttagcacacggctcccggtcctcacagtctgagtcggaatcgtcgcctttttgtctttggcagactcgggcgatgattccttcatttaacgttcccgtggagaccgtgggtctgtacttcttttggtcaaggtgatcccggaggtcaccttgattc

SEQ ID NO: 105580 - DNA, 522 bp, Cannabis sativa
ccaatctaagaccctataatcgaattaaaattcagtacagatctatcccttgtgtattcctcgggtatagtctgtctcataagggttataaatgtctttccaaagatggccgcttgtatatctcgagagatgtactatttgatgagaatgtgttcccatttgcctctgcagctttagatgctgcacattccagttctcctatcaatgctgctgtcaatgctcgaattcctactgtcacttccaaaacaccaaatccttctgctattcattctactccttctgctgctgctaccacacacaatgtcatctcaccatctttatccaatacacatactccaaccccaaatccttcttcaccatctgctcctaatcttgtccatgataacacactgtcagaacttcattccaacacacctgagcatgaacctaccaacattcaacctgttatttctagcaatatttctagtggtgttgtctcccatacaggtacaaatttgcatcctatgcaaacaaggtcaaaaa

SEQ ID NO: 105581 - DNA, 2383 bp, Cannabis sativa
  modified_base (435)..(435): a, c, t, g, unknown or other
acatgcacgacgtaccctctagtcgtgttggtaacactgtaaccatcctagaatgctacactccactaacacccttaaattcacatctcatttagtgttagtagtgtagacaattaatattaagcatatattcaaatacatatcatttatgctatcttacctcgttatgtgctcaagtgtgtcggtcagcctgaatggaaacgcatcttgacgctttacagggccctaaaccataatgttcaaaactcgatgagagacacgctaaaacacttatcggggatttaaaattgaaactaaggataacgctatcgataaataggatgctaacaccctaaacaacacaaaaacagggagaactagggttctgggaaatggcccaaccggaagtccggtccctgggtaccaactgatcgactggttctacgggtcccccanaacggtcgaccggttctgtgctgggaacccaaaaaatgacccccacaattcaatctaacaccaaactttctaaaaatttccagtatacctgtttatacccccaccaaactcatttcaagcatcaaaatacaataaacaactcgaactatgaaaacaccattaaagctccaacttgagctcataagctccaatttgattcaagtaacaagataatcatccaatttagtttaaaacagtctaaatcactactcaacttcataaaataacattaagctaaacacatacacacagcccctatttcataaccaatcatgcatcaaacctaatttgagctaaagggaaaaaccaagaaaagaaagagaagtgttataccttagattaaagcttccaattctcctaacactcactgaattgagctgagaaaaatcaatccccaactggcctcttggtggttcgaaagaaaggaaaagagagagagcttgatggtgaaaaatagaattttctaggttttcctttctctttcttacaaaatcagcttttgttttatttgaaataaatgggaaagaaatcatattattatttgatatatataatctcataaaagacaaaagatattactagtaaacaaaataccaatttaagcctagtcaaaagtcaaatgctaaaaaaaagccaagggtagtttggttatttcccaaaccccgctaaattcctgacacttccattgcctaacaatgacgtcctgctattactaaaatcccaaaacatagaaggtgactctctaaaggcccaacattactttccaccgcttccgaacacaatcacatattactaggaatttacatatagcataattaattaactaaaataaatttccacaatatgtattttataaataataattaaatctcctaattaaaccctaattacttaatgatccaaagtgttaatcataagcggtctttacagccatactcagaggcatcctacagttgagtgaattctaggaagatatcagaaggatctcaacgagtaacatgaaggagttccttgagcaagttgatggcttgataaagttagaaaaagttgttcggcaaaactagacaagagggtaggtcaatgttgaacagacacagggcatcgtactacgtcaagtgttgtctgacgtgccaactagtatagattacctctaccgattctctaacactgagaatattggaggcaagtgcaacaacgatgtctctaaccaaaataatggtaaaaaaggaaaattcaacaattctcttatgccatgaggtctaagggagaaagaggagaagtgtgcatgcttcactctcctaccagaactcctaatgcaatgcatgccaatcgaccatggcaacaagtgtcaaaaaaaccttaggcacctggccgacaactcaagtggaccaccgaggttaagccaatataaggccaccagccaacctagcatggccataaagggccaagctctcgtcaacttcatggctaaatatataagcatacttcctaaaatctcttaagattttagagaaaattaagagccagagaagaaacgagagcaagagcaagataatttaacctagaaagtgcattgaccaccggcccgacgctggcatggctctcaggacacttggggggcaatggctggatgaggcagttaaggtcaaagcttctaacaacaaggcttaacatgaatctccaattgctggcctcaagctagcacacgaagcgtaggctgaatagctaaacatatacaaggactctcaactagtcgtaggtcatatcctaggtcaatatgcagctcaatgtaaatagatgatggcctatttaagttgattataagacttgttaagtcagctcaaaggctttactagagggaaagtccctaaagaagatacaatagctaatgcactcgctcgactagcca

SEQ ID NO: 105582 - DNA, 732 bp, Cannabis sativa
taattttgttaataaacttaaaggtaacgttttttatatttataatattggtcaatggtatttttttgtatatttgattataattattaatttctttaatatatttgcaattaacataaaaaattgctaaaaaaattaaggtaacttaaacaagtaaccaacatcatgggttactaaaatgtattttttttttttcttttaaattttggttaattatctcttcataaagtataaaataaactaaaaagttgctctttattttaattattttttttaatgatagtaaaaaatatatacttctcacatgttaaaatgatcactttaaaaaataaatcacaatagtatcatttttgaaccaaaataattagtagagtaattcgaaaatatttttcaaataatagaattgattgaaaaagaaaagaaaaaaattataataaaattacagaaagttaaaaacttatatattttgttcattcacacgaggaaagagaaaaaaaaaatactagatggacggactgatcaagaaatagaataagagatgagagattattttgatttagcggtataacagtacgctacttggatcaattaaattgttttagttattttaatattatttttagtattatgtataatattaaaaagggtttattttataaatatggcttttttgtaagtggtttagaaatatatggagaaataaagaaattttataaaaactggaaaaatgaa

SEQ ID NO: 105583 - DNA, 737 bp, Cannabis sativa
tatattttttattcacactatatatatatttattttttttttgatagagagcaaaccatattagagttttccttggagccatcaaaaagttgtagatcatgaacataacccagaggtgaaaccagttgtgtaaggatctttactcccgttgtaggactttttgacaatttcacgagatcatagtaacgaatgtcctccactacaatatccataatatatatattaaattatgtatgtgataattaattatacatatatttatgcatgtacatgttaaatttaatgaataccaacatgtgtagacataaacaatttgaatcaattaattaaaatattcttaaactagtatgggttctcaaataattaaagtgaaattaattattttttgtatggaggtcaaattggaaacttagtatttatgttatttcttctcaattatttgcatcataaaatgcacacacctaggccatcttcttaactataataatctcctatataccaacacactaactaaaagaaagccacaaattattgaataatataactttaaatagttatgaagttctatattattttctttaatttacacaaaaatatatacattagtaatatgtcacataatttttaacatgagactatgccacaaaaatctaatgaacataatgaataagcaaacctttgtcttcttcaaaaatgagtcgtttgtgtttgagatccatgcatctagttttaacttt

SEQ ID NO: 105584 - DNA, 613 bp, Cannabis sativa
ttaaatgtttgatatttttcttaaaaaatttaattaaataggaaaattacacttatgttgaaaattaatttatttaattttagaccaccataaattagcataattattccaggtctattttatttaattttaatgaattttgaaaatgtattactgtataatacattggatttcgaattcagttatgtatatttgtagaaaattaaatttgagttgaaaattaatttaattaattttggaccaatttaaattaagtaattttcgtattattattggaaaattaatactaacgatgaaaaataatttttttatttttcagatcttcttagggtataattttataaatattaattaaaatttatatttagagttatctaaattagtaattttaattaagtaaatatatgttaaaataaatagatataaataagtatcaaatgaaaatacaactctttaaaagaaaatgatctttagttataaggatattcgatctccattgttggtcttacatagttaattattttcaatataagctcgagacgcaagactttgtccaccttatggatggttatttgttgaagcaattaatactgtaaagatctcgaaagataag

SEQ ID NO: 105585 - DNA, 529 bp, Cannabis sativa
cacaaaaattacaaactcttaaaatttttatttaatacaagaattactcaatgataaaaataataataaggaaaaaaatattttcactctattataaaacaagattaattataatattattatagaaattcaaatttctaaaatttatactaaaaaattttaagaaaaatatgtcattacaatactttgaactaatagtatacctaccaattatgctatgattaattatattaattattattaggctaaaccaataattaaaattgatgtttttttaatattgataaattattacgtattttataatatatgttatggattttttttaaaaaaattaatatatgttataactttgttgtctagattgaaaatatttgtagtgaagtttgacgatgtaactggcagttgattattgatattttttgaatgaaaatacttaaattatcataattaaattgtaagacatgaatgtattaatattatatagggagattatatttacaccctctaaaattataactacacccca

SEQ ID NO: 105586 - DNA, 905 bp, Cannabis sativa
  modified_base (164)..(166): a, c, t, g, unknown or other
  modified_base (334)..(335): a, c, t, g, unknown or other
tcacaattgtatacttttgataattagataaataaaattaattctgatttagagatttagggagaaaacttaattgatagtattacactatcaaatttacagtaattgttatatatagttcaattagcactataaaaaactgctacttttagtgataatttttnnntcacaacataattttttttttttggattaaatgtgacttttagctagtcacaacaaaatgttacttgtgactaaatatagtatttagttacaagttgtcactaatttagttttagttacaacaagtattgtgactaaaaatacatttaatcacaacaaattataattnntgtgactaatacctttagtcacggaccttttagtcacaacataagaatagtggtttttaattaatcacaattttttcatttttactcacaagttttgttgtaactaaaagtaagattttttatagtgtaaatacacatgtctaattgtattatatattattattgtgttttaaattatatacaaatagctattttgagattattaatttatccaatgcactctatatatagattgatgatttcatggaaaccctagcttgaaaatatcttctttgccatacaagtgtctctaactttattagaatagtattatatatataattaacatgatgcggactggatcagctcaaactaatagtgatgagcttttttttcaagggaattagttcccttaagacatgatatcatgactcttaataaaagaaaaagcatatatacatatcaagataacaataaaataaacccttcaatgacctttttgaaactattatcttatctatctataattctttacactaacattacaaccacattttctatagatacactcgatgtcttatatcttatata

SEQ ID NO: 105587 - DNA, 554 bp, Cannabis sativa
cgttctgttgggcatgcattctatcaaacacatcccgggtaacaaacatcaagcaagtaagtcggccattacaacactgctcagtgataaaagcgtttgtgagaatgatgttgtctttttgagtactcgacaaagctcgagaaaatcccgaaaataatctggtccatagagtttgtttccaagttccaagcaaagaagatttcaccaccataactaagaaaatagaaaatggtgtcgtctctgcattcctttctctcctcccaatatcaactcaatgctacatttctgtacccacagccaagatccccatgtgaattatacaaagaaaatcttaggcctgaactaactaaatttcataagttcaaacatttatggagaataatataaatctctatcataacttacttgtttcataaagaagtgttcaactcagaattccaccgcttccaaagcttttggcgactcgaaaaatcgagactttgagaattgagggttccttctttgacactcatcagaaagggttggagaattcattgatgggccggttagaacaa

SEQ ID NO: 105588 - DNA, 761 bp, Cannabis sativa
attttgctcaactgtgaccgaacgacgactaccatttactacagaaccacaaatagcacggtcagtagcataaagagctgagaaataatcaacaataacctgatctaacccagaattccagcctttccaaactccatcattatcttggagttgcacaatttgattatttcgtttttgagagcttgcagtggcatgaccgttgcttccaatagatttcttgctgagctagagtctcgaaatagttacattgttcattcaaaaactcatcatgtgaacccggattatcacttgtttttaaccttgctaatcttttcttgctagttgatagcttctttttaaaattcccagtaagaccacggccccaatcaatcaaggttgcaagacatagttttgttttttcagcaagagacatgtgggcattaatctcccaacaatttttgacaatttgaccacataaaggctctcgagaccaagcattttcataacgaaaaacagtgactggtttactcatagcaacaggggcaggttcgagaataattggtgtatgatcggaggacgaaaaatcaaaatttgacaaactagcttcattgaaaatagatagccaagattgagtagcaaaagctttgtctaaccttatttcaatatgtttttgagtccctttgccacgctcccatgtatacttgtaaccacacaagggaaatttgaatttccatacttaaaatactctataatttttcccctaaatgcatagttattaaaat

SEQ ID NO: 105589 - DNA, 532 bp, Cannabis sativa
  modified_base (110)..(129): a, c, t, g, unknown or other
  modified_base (417)..(419): a, c, t, g, unknown or other
  modified_base (477)..(483): a, c, t, g, unknown or other
taataattaagttgattttattctggatacttaattatttccattttaatgaatttagttaaataggaaaattatatttaagctcaaaatttttcaatttcagatcaacnnnnnnnnnnnnnnnnnnnngaatatattttattttattttagagatcatttcaacttaatttcgaaatgcattaatgtagatatttcaaaaaatttcaattttgaaaattagattaaatttgaaaattaatttattaattaattttagatctacttaaatcaagtgattttcattgatgatttatttaaaataaatagacaaaaatataatattttaattagaaaatcaataattagtttatctagatagatattttctaggtagactttttggtatttttttagatatatttaattaaatagaaannnaatatttaaattgattttattctattcacttaaatatttgatatttttcttaagagannnnnnnaaataggaaaattatatttgtgttaaaaattaatttatttaattttaga

SEQ ID NO: 105590 - DNA, 583 bp, Cannabis sativa
ggtactagctcttttcttttatgggtcctgcacaatgaaatgaaacattagaggaactaattgacaagttagcttgagaaagtacttaccgagatgttccctattttagtgtgtgggtagaagttccaaccttagttcttgttgtactcaccaagcttgtatgcaccattattgttatcttgtaatatggtgtggatcatcttagtttggtctgaacatgcttactatagggtctttgctgtcaaggagtattcttcagggagtgaacctcttacaaagaatttcttcctgcaatctgtttgtgaaagggttcggtaactctttgtgagcaaccatgctgccttaagttggtttgatctttgcttttttccattttgtcaagggatcctgctagcaagatgttgtgtacctcttggtcactgtagactagaagtatgatagcagactactggtggatcaggctagccagggcaagactaggtggccagccacatcgagggagcactgcctgggtggttggatgaggccatggctggctagcatgtggaggtagtggccagccatattgtggattctatggcta

SEQ ID NO: 105591 - DNA, 1851 bp, Cannabis sativa
  modified_base (1450)..(1450): a, c, t, g, unknown or other
gcggttcaaaccgcaccgcaccgcgcagtttaggaaaaattccaaccgcgaccgcaccgcaaaaaatttcaaaccatatttatttgcggtgcagtgtggtgcgcacggtttgagcggtttgatgaacacccctactttgtggggcttatttatcaaaaaaaaaaaaattatagctacattataatccctcttattagatttatttaattttgtagggatttttctattattttaatctataattattaaaataaaaaatttataattaattttttaaaagacaatatttttaatattaatggatccgattgaataatataattaaaagagaaaaaaaataataaagtaaagtgaacaccaaatttttaaagaggttcagccccgtgagcgtggtaatagcctactccccttgtattgtattaacttaagagaatgaacaaattattcttcctctttgaaagctcttacaactgatttctgactaattctctgtaatgccccgacccgtagggacgccacgtgtgtgttcttttacaaacttattcctagctattctattagtttatgaaaagtggggtttaatataaaactttttgattaaatcgaaataaaacttctttatgaaataccactaaaatatagggatcccctgtttatgaaatttctttataacaggttacaaaaccgttaatacaaaaataaagttacactttcacacataaaagaaaagaggttgatcttgcttcttagaacccaagacaccacggctgatatatatgtacactgctgggagacttttgattcatggtcgaacatagctttattcctcttacctgcaccatgaagcacccgtgagtcacaatgactcagcaaaaaaagttattagatcaaaagtattataaccgcagacattcacatctcaatataacaagtatatatatatatatttgtgactctcacatatccattaagcataaccatatagtattagcatttatacatttccacatactatgcgttatgagaaaatcacaacatcttacagtcaacaactttaccgttgcattaaatgaatatctaatcaatacataaccacacattttcaaggcttcataaagcattctaatcttacatccctataaatgcatattcttacatcctgtgagtcactgaagctcggcaaggaaagtgactaatttcataagtaatataacattcatccagtcacactataataaaaatgtattcaattatagctcatcacataatatcacgcttaatccatttcacaacatcgtaagcacacaatcctggtacttcataaagtacacttaccactcgttaaccacgagctacatatatcactatcattgcctgatacagcaaacgataagtaagaaacctatctgcagtttcaggaataattactcataacggtaatggccgtttncaatcctcaccactcgttatccacgagttgcatatgttactatcgttgcccgataaagcaaacgataagtaagaaatctaactgcggtttcaatgagtaataaatcataacagtaatgactgtttctaaccttaccactcgttatccacgagctgtgtatgtcactatcgttgcctgataaagcaaacgataagtaagaaacatatccgcagtttcaagaatgattgcgcataacggtaatgaccgtatcttaattcattcacaacaacggtgataaccgtgtttttttccttaatcataaacaattcagaaacaacaataatcgtttctcatcattacctcgattaccatcgagtcacaacaaatacatatcgttaacctcaattaagattaagtcacaa

SEQ ID NO: 105592 - DNA, 566 bp, Cannabis sativa
gaaaaagaattagtgtgagaatatctgtattatttccaagggagcacgctaaatttagtatcacattatcactaaatttaatgtcaaaaattatttccactctaaccacaacaccaaaaattatattaaaacatattctatattattatattaatttttaataatattaaaaaaaattaatattatataatttaataaaatcaccacaattttgttaaaagataataatttcgtaaagtcggtaaaactcaataatgtctcacaaaattatagtccattttataattatttcggtagatcaagaaataattttccacattattgaattgctgtatcacatttaaaaattttaaactttattttcggcgtgttaaatttttctagatttgtcaaattttttagaatattttaaataactataatgtattagggttgagcatgaaatccaaaaaatcgaaaaaatcatttagatcaacctaccgagcatagttggaaccaaaatcagcgaaaccaaaaatcaaaaaaaccgctaacagttaaaattgtcattgaacgatcagtttttt

SEQ ID NO: 105593 - DNA, 505 bp, Cannabis sativa
  modified_base (276)..(276): a, c, t, g, unknown or other
ttgaaaaatatttttacttttctacttttaaaaacagaaaactgattaaaaaagtgttaccaaacaccaccttagaatttctattttgtaaagttattaattagatattctattttgttaaatgataaaatggattttgtattttctaaaataatacaaatagattcttgaactaattttttttgttaaaataaaatttaataataatctgatctaaaagtgttatgacaaaacagttgatactttttgtatctgttcgtgttaggaattgtcttnaagttggttatattaaaaagaaaagttgttgaaaattaagctcatggtcttattttttctattttaaaacataccaggtctattttattatttaacaaaaaagagggtccaatcagtaatttttacaaaatacaaagtctaaagtaatatttaccaatgataaaattaaaataaattattttgaagtgtgaaaagttagaacttaattcaataatactaaaattcatat

SEQ ID NO: 105594 - DNA, 653 bp, Cannabis sativa
ggtgtaaggacccaatggaggcttgaagcggggatgttacattaagggtacattacggtgttaccaacactagtacgggtagatacagagtgcatgtagtacaacacttagcggtactcggggtacagttcctaccctaccaacactagtacagtggcggtactgagtgcatgtggtacagtggtacatggttgtatcttagttaagaatgttcttactcatttgttgagccttgtagataggtttatgggtgcctagatacaagttgatattatattatttgttatatgcttttcttactgagtctgtcgactcacaattgctacttccgtgtgtaggtaaaggaaagacgaatgttgaataggagtgagttccgagctagaatggtgtttgtacatgtcgagacgacgcgacatggagtgttcggtctcaagacatcttggattttattttgtagtcgctgagcgaccagtttataaatgtattatgataatgtttgtaaaagtttaaaatacggaatcctggtctatgtaagttaatatatatataagttaataaaatttaaagtttatcaaagttttaatttaacacgatgtttgaggaaaaaccctttgattagcaaaggtggtatgcaattggaaaatcactgtagc

SEQ ID NO: 105595 - DNA, 601 bp, Cannabis sativa
tcatcttttcctctcttctctcactccatactaactaacttagtgaaaagttactatatctccatcaatcacactacccttcctccttccaagtctctaattattttactttcccttctctctaacaaatataggtgttgtttagtaacacttttattttttaattttttaatctcaaaatgaaagtaaaatttgtgtttttaaaaactttatttttaaaaaacaaaaatgcgttctgtaaccacttttgtttttcaattttaaaaagagaaaacaaaagtgtgttctgtaaagttcattttcattttaattttttgattttatttaagtcgggtcaaaatctggggttggattcgggtttgggtcagaagccgagttcagcgccaaagcagtgaggaggggatttgggtccgggtctggtagtaatccaaaagattgattaagaaaaaaaaaactgtttaaaaaaataatgaaaatgattttttttaaaaaaaaattatttctaattataaaattaaaaagtaaaaacagttttatagaacatattttctaataatattttcactttttcactttcaaaaactgattaaaaaaatattat

SEQ ID NO: 105596 - DNA, 704 bp, Cannabis sativa
actcccatgattgaatcctagggccaaccaggtcttaaacaagacccctagggctagccaaggttaattttgaattgaaatgtgttttttttttttttttcaaaactcaaatgtgttttcatgaatcaaatagccaagaatcacaatgaacgctaaaatagaattttttccatcatgaaatcatacattatgcattctaaaactgtcatgcagatcaaaatactaaaaagattacaaactaatggaagaatcaaaaagtttttgaaagcttaaaatcttgaaacttatcattagtagttcaaagaagagatgtcaaagaagagaagatgaggcatagatggagagataagatctaaaaccatgccatgtaaaaatccaatacgtggctaaacaaggctgctcgaaaaagggtactataagcaagacgagaatgaagaagtccctatccgaccagatgttcaaataaggacgtgggggcaaattttaactgaaattttgtccacctaacgtggtatgtccacataagccaagactgaagaaacgtggaatacaatcttgttaataacaagaaaaagtctccttataaggcatggaaaaactgtcaagcaacaagtgagaggacttaagcgagccattaaggagctgcaccaccatgtctagccagctaaggggagtacataggccagccatgatgagcttgtatg

SEQ ID NO: 105597 - DNA, 632 bp, Cannabis sativa
attgcatttggtatcatttcctccttctcgtcttctccgatagtcatttctcattaagtttctgccatttttgcattaaaaactatcttttcaccttctattttgccattggaaactgtaagacggaagcggacgaagatcatcaaaatctttccctaatgagggctacttcggctaatgctagggttatgattgtggattcctcaaaagtcatttctagaggatattggttttatctatataaggcaagaaccaggtatcattttttattcctatcaaccctttgcttgttttctttatctcttttcttgtattctttgctatttagtatcatggaggaatttctgagtagtgtctctagtgctcttgttttacctgctgatgaaaatactgttttcacttatcatgctaacccccctagtgattttccaacccctattagtttgttgcttaaattacacactgtccgacccttcaataggccttcccttatgaaaactctctctggaatgtggtcatcgctatgtagattccctgtctgtgtttctgaacatgcagatggattgtttatggttacttttgggtgtgaaggggataagggtagagttcttgaaggccagccttggcacttt

SEQ ID NO: 105598 - DNA, 910 bp, Cannabis sativa
taatagtcctattatacatgattaaacatcatcaagaaacaattaataagcaaataaggaacattcatcccttaccaagtttttctatcatccaagggtatccagagtacccagaggcatttgttgacaagaactgaagcacatctccaaggactatcacccgtttgcaacctttctgttggcaaggttgctgattttgggtaaggtctggtaatattacccgtttgtttcttatcatttggagaggtggcacccctgttgcaccattggctctcttgttagaaaaagaatatttcaacaatacaaacaatgctaatctcaatttcaagatcgagttatgtagaagcaaatttagtggctcatagttttgctaaagtctcgaatttgtatcatgatcgtaccttcagtatggagtctgttctactgatttgttactgttgaccgagttttttggcaaccagcttaataatatatatgagaaagctgtaggaagtttaatgcatcagatttttacgtggttggggcattaatgagtcttagtccacgagtctttcttatttatgagagtatttattacagagaatgttcttggtagtttttctctctttaattcttataaacccataattctcgaccacaatcttagtgtgtttggggggtatttatagtattttttttttggtgatccctagaaccgaactacttgtctttctgtgtagtttcagtaggggcacatattcccagcagataaaaaataggaaatgcatgacctataccataggtatcttaggggttcggtggatataatcctttatcccatcttgattgatgtgatctctcataaagtagccgtcactaggcttcttaatcatagcgtaatagctgcagcagaggggttacgccgtcagac

SEQ ID NO: 105599 - DNA, 938 bp, Cannabis sativa
  modified_base (27)..(44): a, c, t, g, unknown or other
  modified_base (151)..(175): a, c, t, g, unknown or other
  modified_base (318)..(318): a, c, t, g, unknown or other
gctatgagcttggagaggaagtatttnnnnnnnnnnnnnnnnnnatataagcagaaagattgcatgataaatacagaatacactaatcgtgggattttgacactttgccatatctctgcaatctgatccccaagttatagggatttctttnnnnnnnnnnnnnnnnnnnnnnnnnttcgctaagtgttggtcgctctacgcggattgctgatcgctttgcttcacgcatgcatatgaggcgttcggttcggactgtattctctgagcagatactcgaagtcgattccacgtgccaccatcatgtgatgccacgtcagngtgcaaaaattgggataacaatgtactaaacaaatctattcagaatgatattaacaattataagtaagatacggtgatgacatcagatttgaatgtaatgacgaatataaagaagatacgataataacaacggcttgaaatcatatgattagtttttttataaatttatcaattgtaatatatattttttaatttcaatttaatttattcaaacgatatatataacttacttattactaaacaaaatacaactgcacgcgaagcgcagtttgtttgctagtattctgttaaagttataaatatagaaactatcgttaaaccaagaattctgtttcaaagttaaactaataaatttaaaaatattattaaaaatatgtaaaatattttaagtattttaaatttaaatttatatataatatctacataatttttgtttttaaatatatataataatattataaaattaataaaaaatattctgttaattaataggatattctgttaaacaaaatacaactgcacgcgaagcacagtttgtttcctagtattctgttaaagttataaatatagaaactatcgttaaattaagaattctatttcaaagttaaactaataaattt

SEQ ID NO: 105600 - DNA, 510 bp, Cannabis sativa
tcaataatcacccgcaaatctacaatcttaatcgggtttagtggtgagaaaaatcactcgattggagaggtcaacttgcatgtttgggcagaaggagtaaaccttcaaaccaagttcatcgttgttgattgtccttcttcatacaatgccatccttggccgaccatggatccatgagatgaaagttgtgccatccacataccaccaagttatcaaatttcctacaccatggggaataaagtagatattgggggcacaaagagcagcgcgggagtgttatcagagtaccctaaaagaaaaaacaatcaacctcatagcaactacatcaatcaaatgcaatgattgatccagatgagcctaacatggaggagctagaaaaagtgagcattagcaaggaattcccagaacacaaagtacaaattagggtcaagctcacaccggaactttaagcaaagttgatcaaatttctcattaggcatcatgacaactttgcttggtctcacaaagatat

SEQ ID NO: 105601 - DNA, 535 bp, Cannabis sativa
acggtcctagtcttgttctagggtccttgttcggcgattcttgttgaggttctaatttttgggtcattggtctaggtctgggttcgggtttggtttttcgtctgggttctggtcctagtctgagtccctgatctagacacggaatactggtctgttccaagccccgttacctgaattccgagtcaagatctggatcactgtcacgggtctcggtctatttctagttcaggtcccaggtcccatttcttagtttgggttcgggattgagactggggtttggttctaggtcccgacactggttctgtgtccctagtctggttccacgtttggctttgacttcaagtttgggttcgtgtctcgagtccaggattgggttgggatctgggtacggcttccaattcgggtctaggtcttatttggagtccgatcctagtgcggttacggttctagatcgaggtccaatttcaattatgattccaagtccaagttctagttccagtcccggtaaccttcctgttttggttccaattttggg

SEQ ID NO: 105602 - DNA, 649 bp, Cannabis sativa
ccaaagctcctgctgcaccccctggcgctccttgaggcagagctcctgccgccggaactgggttgagatggggcagtcggttcttgatccactcgtagagatgtcccaatccgatcaagttttcgatctcgcccttgagatttttgcattcattggtgttgtgcccaatgtcattgtggtactcgcatctcttattggggtccctccgggagctatccttatacagagggggcggtctccggtaatgcgtacttttcctagtagcaaaatatacacgttcttgggagtccgtaaactccgtgtattgagtatattggggagtataccccattttctgtcgcttatcctccgtccggttgctgcctttagaggaccttttgctccgagagccttgagaaggaccggctaggcttgcggtcggggcagagtgcgatggggcttgttcatttgtccacgagggatttccaaaataggaagatgcgggggccaaggcttggccttgactatatccgggagtagcggaaaattgtatgcccttcatcgatggagctgctgctggcaaagtacctgagagctaggctccgggtacatatcctgctatcccggtgggatagtatcccccgttggccactatctgggcctcttccaa

SEQ ID NO: 105603 - DNA, 725 bp, Cannabis sativa
tatatgttcaaatgaaatgcaagataactaaaacatacttgaggatttagtggagaagatgattttcttcacataagcatgaattgcaattttcatgtttttgaggtctcctttattaagcaactccacagctccatgtcttcgacccttatcatcaaaagtagaaccagattgtttagttccaaccttatgttttgtagtaactccattatcaggaccaacaccagcttccaacaaagcttctttcactgctaaattccacaccgacaaattcgaatatgatactatgctatctctcacccacttatacgccttctcaacctcatccaaatcccattcaacgccagacttagtaagaaaatcattgtcagcttctgaaaagaaaccgccgttaatcatgcttgtccctcccaaaaccctacctctaaaattctgcacgccttccatcgatgtgaacctttgcgctggtgtatcgccatcgtcttcttccatgagattagcaagattctttgatgcaattaacacattggggtgagctaaaggggtgttgcctctttcaaggagaagaactgagtatttttccgaaagagtcgccgccaaagggcatcctgcagtgcctcctccgatcacaatgtagtcatattcttccactagtggaagatcagttgcattgtaaaccgatttcatgtaactaaaatctgcttattaaacaaaatcaattaagt

SEQ ID NO: 105604 - DNA, 539 bp, Cannabis sativa
tatttctgaaagtggtatttctgaaaatggagaagaaggtgtaccaaaaaacctgtttggggcgggtctgggtatccaggctcgccacgaatcatgagtactttaagttggaactgccgggggcttgggaaccctcgggccatacagttccttaaggatattgttgtccaaaagaagcctagttttgtttttctttgtgaaacattatgtggaaaagctattcttgaaagaatccgagtatctttgggctatgagggtctatttgtggtagaggcccggggacatagtggtggacttgccatgttatggaaatataaggaagagggcgagattattgatttttctgacaaacatatcaatattctcactcatattccaaatatgcctacttggagacttattggagtttatggtgaagctaatagaagccaaagagaaaacacttggggtcttattcgtcaccaatctgcagatgctcgttggccgttcgtgtttattggagatctcaacaatgtcactagccatagtgataaaaatgg

SEQ ID NO: 105605 - DNA, 969 bp, Cannabis sativa
aaaaaaaaaacttatcaatgtttaaaaaaaaaaattgtgtcaaaaaatgaattaaatacatgtattctatatatacaaagcaacactcatacaaaaaaaaattgtgaggaataaattaaaaatatacaccataaaaaatacacattaataaaaaaaaaattattcagcaaaaaaaaaatctaaaaactacttaaaaataacataaaaaataaaaaaataaatgcatgtatacaacaaaaaatattgtttggaataaactaaaaatatatatcataaaaaatacacataaactaaacaacaattgtacaataaaaaaacatgtaaaaataatagaataataactatacaacacctaaacaacaacataaaattatcacaagttatattttggcgcttaggtcggcacatgaattaacttgtaatattttgtgaaaaattttgtgggatcccgaaacatgttgtcttttggtttgttttgtaaagtttaaaaattacaagttatattttcattcctttgcaaataaagtttaaatttccggttcttatctttctagtaattccgatttagcgggtttagggttttaatattggttgtcgtagcgtacctaattgttagggcgtatagatccctgaatctccaccttgaaacactatcaagggtatgaataaaaattgtatatggaattttgaaaaaaaattattttgatcaaaatagtaattatttatttttcaaatttattaattaaataaattgggaaaaaaattaaatttgtctggacaaaaaacatcaccattgttttaattaagacatgcgcggtgccacctacactatgtcctgacatagtgacaggtgtcctactggatttttttggattaattaattaattaattcgaaagataaatatttatttaaatttgaatttaaaaagtagttatagatatttctattggttgagatattctctcaag

SEQ ID NO: 105606 - DNA, 704 bp, Cannabis sativa
  modified_base (44)..(48): a, c, t, g, unknown or other
  modified_base (239)..(241): a, c, t, g, unknown or other
tttgaggctacatcacatggtgtatggctaaagagttttatttnnnnncttagagttgttgattccatagtaaggtcgttaaaaaatttctatgacaattcagttgctgttttcatggctaagaacaacaaaagtggaagtcgaagcaatcacatcgacattaagtacttagctattagagaacatgttaaaaaaaataaagtgatcattcaacacattagtactgaattgatgattgnnnatcctatgacaaaagacttgccacctcataaattcaaggatcatgtagagaaacatgagacttggttccctcatgtaatttgtacaaataaagttattattaatgaaactcttattttgatattttttcatatttatgcgcatcttaattttattttcgagaaaattttagaggacctaaataaatatacggtttagggtttatttgcttaagtacattgccacataaagtacattgttatatagtaaatatattgtaatacatggaagataatactcaacttataatgaggacatatcgctatgattcatatgtttattatataatggcagacgttgggtttaaatgttttaacctaaatactaaccaggtgggagaatattagaatattttttagggaaattacccaaaatactatttttttaacttttttttttttcaaatttacggtttgggtttttaa

SEQ ID NO: 105607 - DNA, 729 bp, Cannabis sativa
  modified_base (108)..(109): a, c, t, g, unknown or other
tttgtgcatatatcaagtatatgtattaaaccataaacatgtaacatacatgtaaacatacttcacttctaaattgataactgatcagattgtaatgagttttatttnnggcataaaacccaacatgttctccctgcagaagcaaacgatatcatcagagaaatccatgaaggcttttatggggaccatgcaggttggcaaagcttgtcagaaaagattattcgacaaggatattactggccaactataaataaagacacccacgaatttgtcaagaaatgtgataaatgttagagattctcacatataccttgtgtaccaccaacgaaactaacaatgatgacctcgccttacccgttcgcaatatgggggatcaacttgattggggcactccccacaggatgaggaggagcaaagtacgcagtggtggctgtggacttctttacaaaatggacagaggctgaatctctggtttccataatctgcaaaaaagatctcgactttgtcgtgaagaatataatttgtaggtttggaatacccattaagatattatctaataacagaaaaaagttcgatggggaattattccttgagttctacaagaggaacaagattatcaaaagcttcttgtcagtatcctgtcctcaggaaaatgggcaagtagaagaagttattaaaacattgaaggatactatcaaaaagaatttggatgctgctaaaggtagatgg

SEQ ID NO: 105608 - DNA, 697 bp, Cannabis sativa
aaatagattttatggatactccaccagaagcaccaaaagtagattctgatgcaacagaactcgtttctaacaatgcaaatgacgaatctgccgccgcaactgatacaagagaaccagaacaacctatgtcgactcatccaaacatcatcattgattctatccagaaggaaccaagcaccagagttaaactgaatcatccaaaagagctgattcttggaaatcttgaagaaagcatggtaacccgaagaaggtatgttaatttaattagctttctttgttttgtctcacaatttgaaccgaaaaatgtgaaggaagccatgacttttgaagaatggctcaatgcaatgcaagaagaactcaatcaatttgttcacaataaggtttggattttggttcgaagaccaaaaggtatcaatgtgattggaacaaaatggatttttaaaaataaaagtgatgaattcggcacaattgtgaggaacaaggctcggttggtggcacaagagtatacacgagtagaagtttatgtagagccaccaaaaggattcgaagatcctcagtttccagatcatgtgtacgaacttgaaaaaactttgaatgatctgaaacaagctcctcgtgcttagtatgaaaggttaactcaatttctaatttctcatgattatcaaagaggtaatgtggataaaactcttttcatcaa

SEQ ID NO: 105609 - DNA, 585 bp, Cannabis sativa
acttaccgagagtgccccaattgtaaaaggaaccatctacgggagtgtagaggacaggggtgttttcattacggtttgtcagggcattgtaaaagggattgtccctaactcaagactgaagcaccaaagactgcagtgaaacctactccagcaagggtgttcacgataactcaggctgatgcagaagccagcccctcagtagtaataggtcagctctcagtcaacaactcttatttctctttgttgtttgactctggggccactcattcgtatgtggcagccagaatttttagtaagttggatagaccgcacgatagttatgaactagggtttggaaccctattacgtggcagagagttagttatctccaaaaggtggattaggtatatgccgatcagaatcgaggatagggagttcagtgctgacttaatagaaatgagtttagcagattttgatattatactgtgaatggatttcttgtacaagtattcagccagtattgattgtaagaggaagatggtaatcttccaaccagaaggcaaggaaccgtttgttattgtcggatcaattcagggatctcggatc

SEQ ID NO: 105610 - DNA, 786 bp, Cannabis sativa
  modified_base (249)..(250): a, c, t, g, unknown or other
  modified_base (344)..(350): a, c, t, g, unknown or other
  modified_base (467)..(468): a, c, t, g, unknown or other
  modified_base (626)..(638): a, c, t, g, unknown or other
gtatgtcacgagaagatttaattgatcgactttaacgaacatattgaagaacttgcaattttttttcaattttcaatttttttcatcccgtacaacttgcaatttttatttcaattttcttcattttttcatgctttttcatggaattaatctcaaattttttgtgtaattttgtatttagattttttttttcatatttcaaatctaattatcaaaattaaatttattattattttttaaattaatttnngatattagtgaaatttgaacttgaaaataggtaaaaatctaatttttggcttaattaattatcctatttttaaaattttgattattttatcttnnnnnnnaatttaaggtcagatatttaatattttaaattttttaattaattgaacttatttgaaatttaaaataagattattttaatcatgatattttaaatagaaataggatattatgctaanntttaaattttgttatttttttataattttatttaatttaaattataaaatcagaaacatgatattaaattattattttattttatggaatatttaatttttaaaaataacatgaaatttgaaaagtttttagcattttttttttgaaaaagattcttnnnnnnnnnnnnncctaatttttcaaatttataggtttaattttaatttttttattttattccgaaaaaaatatatttatttatttatttaattatttttcgaaattattaaattaaattaaattatttttaaaattaaataaaccctatatccaactatc

SEQ ID NO: 105611 - DNA, 569 bp, Cannabis sativa
tccacctctttctccagggcttctaccttcactgggtcgagggggcatcgcttctgttggacccgcggcatgtccgggttaacattaaggacatgagttctgacatggggacttatgccggtcatgtccccttggcaccacgcgaaaacatccgtggctgcccttagtgctttaattattttttcttttcctccagctctagacttttccccagccggaggaccttggcggggttgaggtcacataccgatacttcctcaacgtcctccataggttctacgattttttcgaatcccacacagggatccaactcatcttcttccaccattcctggctcaataacatcacggaccatcaatatttgtaggtgggcagcaacattgtaacactgcctagcctctccctggtttcccctcacggtccctatcccagcctcctgagtagggaactttagacacaagtgcatgatccacgtaactacgccgaaatccaccagggtaggtcggccgaggattgcgttgtaagctgttggccagtccaccactacaaatgtgcagtatttgaaagtg

SEQ ID NO: 105612 - DNA, 632 bp, Cannabis sativa
  modified_base (164)..(165): a, c, t, g, unknown or other
  modified_base (269)..(277): a, c, t, g, unknown or other
tttttttaatttttacaaaaatatataaaaaaaaaaaactcatatagcaactaacggaataacttaaatcgtaactaaaatttatacagtaattgagtttcagatggaatcacatacactttaactatacatacactagaaatttttttatttttagtcacaannaaacttgtgattaaaagtaaaaaggttgtgactaattgtaaattatcatttttatatatattgtgactaaaaagtccgctgctaaaggtattagtcacaaaaannnnnnnnngttgtgactaaatatatttttattcataatacttgttgtgattaaaactaaattagcgacaacttgtatctaaatactatagtttagttacaaaaaatattttattgtgactaaaagtcacatttaatcacaaaaaaattatgttatcactaaatgtagcaattttttgtagtgacacctccacatttaaacattattttataaataattttgtatatttaacacattagtttgtacatgtggtataatgagtatatattatgtaatatacttattatagtatttattgcagaattttcacaaaaaaaaaaaaataataattgtggattttttataataactattattattatta

SEQ ID NO: 105613 - DNA, 1180 bp, Cannabis sativa
ctggtaaaataatttcaaacaagatctggcacattattgttttcattcccctaatttgtaaatccttggggtctttgaggtacttctcgacgaggtgcttggttattctattgtacatctactggaacattcctagttcccccaggttgctcctcgtgggtgttttggggacttccttgatttgtttcttgcctcctggttcttgaacctcgaggtctacctcgtggccttcttgctctaggatcaggttgattttgtgcattgtttcctagagtcgccttggccgctacctctctttccaactcagcgttttgttggtttgactcggctaagcgttgctggagttgtcgattttctaattctactaatggcagcctcacctagtgggatcataagcatcctcacttctgggtacatactttgtaatatcattggttccttcattccttccttctgggttttggttgttaccaccatgattcctttttgaatgtgttgttcaagaagtgggtggcctttgagaacccattggttctttcccaggacgatgtgtagtctcctcagggcaactattatcgttttgattatgatcagccatggataaatttttgtttgtaaggagatatttttctgagttttatcacgtaggctcttaatgaaagcaccaaactgttaacgcagattttcgttaaccaataatgagcttttttcgtaataaatttaacacatgaattataaagattaataaatataataatagcaccagatatttttacgtggttttacagttaaatctgcatactccacgagtctatcttattcaagatatttctgaatattttaatacaatatacaactgatagtatttttctcacagatttttccatctctttttctgtggaatctgcccttatttataggaatattatttggcagttatttacatttaaatttaaattacataatcgcttcattaaacgtgggagttgcccatgtttcatttaaacacatgtagataataattgataactgcataattgcttattatttttatcctttaagacgattgatgctaatttcgataacagcatctcgctttgcctgtagatgatcaatgctgactttggacaatcatatgccttcaagcaatcgcatcagtaccagtgtactgagcaaactt

SEQ ID NO: 105614 - DNA, 1009 bp, Cannabis sativa
acgtattttgggcgaattcaggggcaacaaaatgtaaaaaagaaataaaagaaatttttatgtacaaaattaaattttggatttctatttttacttttctgcatgtatatgtatattatttgtaaatattttaagagcttaagaataaatataattttatttttaaaacaaaataagtattgatacataaaaatattttattatttaaattatgataattcaaaattttatatctattttcctgcggtccttactcttttttatattttcacaaacttagtaagattattttaataatttgactttttttggtttaccgtagttggagttatgtgttttgtttttatttttacgaattattaatatttgtcattttcccgtctttttttttaatctctcgaaaaaaaaaattcttaaaaaatctctcatctttttttactccatttgcttttttagaatactattttttttaagttttttgtacatttttttaccatttttttcttgtatttttttcaatgaattttacttgcttattttttccttaagttttacttcagtaagtatataatagtgtacaaactatatgaggatacatatgatattaatcttttttgtgctgttattcttctattttttcataaatttttgttagttattatttcatttttttctttctaaattttgtttattagtagataatggtggagaaaatcagatgaacttacatttagacaggatgattagtgaccttacctttaacaaacgaacttataccacacttatgtccttatttaaattaaacataatttttttaataattatttaaatataattgatgaatgtaaaaaataaaattataacccagagattttgatgggtattacgtgcctctgacacgtactccctgactagtctataacataagaatggatctccagtaaaaacaaataaaaaaaaagacttgtttttgtcttcatatatatatatatatactaggtggtcaaaa

SEQ ID NO: 105615 - DNA, 1415 bp, Cannabis sativa
taattcgtcttgggcccataaattttcagggccggccctgcttatacatttctcttcttgtaaaatatacaaactataatagatatagccacctagacataataaaaaggtgtaagaggatagtgagatgcacaaactagaagccaaacaaagcctataataatatataaatagtaatatacaaaggcaaaacctatatctctcttttctcttttacttttgttttgtttattttgtttaggggggtcatggtcattgctcactagtcaatactaacgcattggacggtaccatttgctgacgtggcatcacaatctggcttcaattctctggacccaattcctcatacttcataaaagtgacacctttgaaattgtatttgtacctttaagtaataaaggtacaacctttgaatgcatattcaatagagcttacggtgaaagtaacaacacttgatcataatctctttctctctctttcaaacaacatcgtttgctgatgatataaaatttgtctcaaacaactttcgaattttcaaactttctctctcctctttcaaacactgtaaaaaaaaacctctcttttggctgtgtatgatctttgaagtagctccttaataggaaagtttggatttttatgatagctttgaatcttttgtttgagttttgagaaaaaagaccccttttttatttctgggtctgcaagattttcgggtcttgtgggagttttgtggagattagagggtgtttttcttggtgggttttttttttgggtcttctttgggtggaagacgtgtttgtgagggttttgacttttaaagcacatgatgatgatccatgaaagatcattttagtttttttttgcatgtgacttgttttaatggtctctgcctttttcagctctggtgattctagggtttgtggtaagtttctttctttctttatgtggtttgattattagggtttctgggtttgattaattgtactattcaagttgaaatatattgttcttttattgtatattagctttttttgatgagactaaagatgtttcttttatcaccaactgaaaagttggcttcttttttcagtgttggaagagtgattgagatataattgggttcatttgcttcaagaatcaaaataacataggtatgatatatatagatatacatatatatactcagagttgggttgtgttttgtttggctggtaaacattaattttcatgttttgtttgtttaattttaggttgttgggattgtatgttctttctcttgataatggttgattttgacagaagttagcatattgaaaaggaattaatattggatttttagtgtttttttttctcttataatttactttcccatttctttggttggtgggtgtttatatcttattgttattttaatg

SEQ ID NO: 105616 - DNA, 619 bp, Cannabis sativa
  modified_base (559)..(577): a, c, t, g, unknown or other
aatgaaagatgttcaactatcaccgtatctcatttacaagccattttgggtttaaatacttttttcttacccaaaaaataaaaaataattgactttttgggcacatgctttgcattttctgttagttttattagcatactagtaattgtttagcaatgaaaactggaaaatctaaaagggttactagtaacttgatagtactttcaaaatttgtcacaataataccaattactactcgaaaagctgaaaaattgaatactagttacttatttacttagtgtgatttagattttgcatataactataagtaaccaattatcactttgaaaaaatgaaaaaaaaaaaaactaatatttagtaaatagggcatgctttctatattttagcaaactagtaataaattacgactccaaaactcagaaaaattggtcactaattactatattattattgttttcatatttagcagagcatgggcgtataattacagtttatttaacaatcaaacttgaattgtcgtgtaggaaaaaatagcttattaagagttagtcccacattnnnnnnnnnnnnnnnnnnnttgtgatatataagatgaaagggctactcctcccattgccaa

SEQ ID NO: 105617 - DNA, 653 bp, Cannabis sativa
ggtgtcggtgatattgagattgttagaggttgttataaaaaaaaaagacatcaaattataacagattagtaagtaatgtaattttttatatacaatttactttatttatttttctttttacttattattaaattttattaatttttatgtattgttcgatcatattaaagataattttatggggaaaattgggtgaaatgttcaatccaaatttatgtatatgtaagaaagatggtggtccatttattgtgatagtaacttctactaccgttaaaaaatttcgagattatttatttagattccaccattcaataatttgttacaataatatatgtttgtgtatattaatttatattttttctaaatagatgaaattaacttctcttctacaagtgcaaccaaattctatattaatcttcaaatagattatgtagcatcattaatccaaaaaatttcaaacaactttaagagtgtggaagttattgagagttataatgttaagaagacaactattgaagaagatatatttcttgacaggatgtctattgaaaaattattagaggccaattggagtgatattcatgtgaaggtttttattttttggtattattattactattattaaaaaatttcaatacctataattttacttt

SEQ ID NO: 105618 - DNA, 746 bp, Cannabis sativa
  modified_base (695)..(698): a, c, t, g, unknown or other
tgatgacatgtctatcaatgccttgattttcttgggatttgcttcaatacccgtcgtgttgactatgaatcccaaaaactttcctgaagagactccaaaggaactttttttgggtttaacttcatgttatacttctttaatattttgaagcacttcgtgaggtctgtggtatgctctccactttttattgattttaccaacatatcattgacgtaaacctccatgttccgcccgatctggtctgtgaacattttgttcaccaattgttgatatgttgccccagcattcttcagcccaaatggcatgactttataacaatagagtcccgtgttggttacgaagcttgtatgttcttgatctgggacatgcatttttatctggttatatccagaatatgcgtccataaacgacataagctcgtgcccagcagttgcatccactaactggttgatcatgggcagtggaaaacaatcttttgggcatgccttattcaaatcagaaaaatcaatacaagttctccaagatccgttaagcttaggacaagaacaggattagctatccacgagggataaaatacctcgcgtataaagtcattgactaacaacttgtccacttcctgttttagtgcccctagtctctcgcaatccaagggtctcctttttttgtctcttcgctgggtagtttggatcaacatnnnnatgatgacagataatgttagggtcgatccctatcatatctccatggct

SEQ ID NO: 105619 - DNA, 1452 bp, Cannabis sativa
gtatttttgtaattttttttccttttttgtatttttttgtttttttcccaaaaataaatttatcattattttttttggtagcgtgaagtgtaatccttggggaactcactaatacctggatgtgtgtttcgtgtggtatacttctctgagaatatcttcactcagttattcattttctgaggtgatatggagaggagcagcaagcttaaattaagcatctcaacattaacaagagaatgctcctgaatgccttaacaagcttaacaccttcagttgggtatttagttcccaaggtgtctaccctcaatgcattttaattatcttaaacccaatcatgcctatgacagtttaccctgataagatatatactgagtggccttcatattttgaggaggttatgatgtcttcatcttcttgctgaacgaatattattattaattaattaactagacgttcttattcattgctcaaaaaataagtataacaataatatttactacttttttcttttatagatatagaaatttagtttttgaataatgttttaagttaaaagtaaaaatggctgccaaaaaaggcaaaaatatttcaaaatttagaacactagttactaatttctaatccagctacaattaagaaaagtttagatccaccatttattcttttttgtttttccatagcaaaattttcagttattgttcagtgcatacatttattctctacacaaagatcatattattcaattgtgtgaagtaacaagctagcccatttcctgatatacaaactagcaaccaataacaaaagctttcaagaaataacattagttgaattgtagactaaattggtcattcacattatctaaaacctggcctagcttctcttgattttaggcttcttcacagtcataacggaacatttagcatgctgagcacaatagtcactgaccccacgccaaaacaacctgtatagcagtaatcaaaatctcatgttcaataagataaaactatatcaatttttaactattacgcaccagtgtagtatctaacatcatttagagctgacactttatatttctggtcttataaggtatattatagtacctaacatcttagaagatgcagcatattattggtttctgtgtaatttaaactaaatcagtatacaacaccgtaagcatttttaattgccctatattattagcaaaaagttattcacaaatgaaaaagaaaaaaaatcttgttgttaaatatgtggttaatttgtcataagtacaagtcaacatgacaagactgggtaatgggtattggtaattaccgctttattgctccatagccatagccattattgcccacaaccaacatagatgcatgatgcttctctacagtttgacagagaacattatgggcttctccttcaataacctccaccacaacatctttcacctataacaca

SEQ ID NO: 105620 - DNA, 1374 bp, Cannabis sativa
  modified_base (120)..(122): a, c, t, g, unknown or other
ttagtaatatattgagttggtgtattttatttattttataatttaaaacacaagaaaaattattcttattcacacagacacatacatataaattgaaatatatatactaacttatttatnnnagtaatgaatacatatatatatattttagtgtaaatctaaagatgaatatatatattgacatatatgtatattagttccatttatatataaatggagatagaaatagattattattagagattaagaaacaattaatagtcttaatttaattttttttatgaaatattaaataatttatcattaaaaaaaataaccgatccaatcgggcggattggattggattaaactgttatgcggatcggattggatccaagatatgaaatccgcaattagtgcggattagatgttgtttgaccaaaaaagtacgaattggattggatgaacacccctaataacaagtaaaattagaagtttgctcgaaggtcaaaatcatttcggactctcaaacaactttcaattacagctaactaccaaaaaacagagtacaataagaagaaaagaatacaactcagcaactaaagacctaaactaccgcaactactcttacagcctatataatccaagatcaaagctgaagattaatagttgaagccttcattcttattcatgagctattttttgaaagaaagtagagtgagaagctcctcgagttcaagttgtaatcatatacaagaaagaaacgaaagagctagaaaaatagtaagaaaaacaaagtagagagaaaatcataataaattatcaaccatggaatccgggtcgctcggaatgcccctaacatttctcatctaacgtttgcggacgatgccattttatttcttagagccaacttgtctgaagtgaagacccttgttcggtgtatcaacaaatatgaaacttggtctggccaagtctgtagtaaaccaaaatcggggcttctgatctctaacaattgccaatctgggttgaaagaggagattcaaaggcttctaggtgttggtaaagtccttgactctgacagacatttgggcaatccgcttctctttgggcgtagtaagaggagggatttcaattttatcaagactaaactttgcgaacgtcttgagggatggaggttaaagcacctctctaaggtcggtagaatgactttcatcaattcggtggaactctcgattccttcatataccatgtccacctttaaaatccctcagatgtcttgtaatgattggattcgatcgtgcgtagattctggtggacaggttcggttgaatcaagacgcttactggctacaaagtcatggactgccttatgccaaccgaaacaaaaggggggggg

SEQ ID NO: 105621 - DNA, 524 bp, Cannabis sativa
caattggttacttttcaattaaaataaaatatatatttcagaatattacattacaaatatataaataataaaataaccattcggtctccaaaaaggacgattaatattaaatgaaacttttttgtttcttttttatatttttaggctatattatgttattttattgtttaagatacaatgaggttacctttttttttttttgaataaagagggtagaaattttattcaacaagaaaaattatcctctcttacaatcgaaagcaaatcaggaggagcagaaagctcatccaaaatacaacctgacataaaacaagacttccttgcaatgcaatgagcagccctatttgcagatcgtttaacaaaagaaataaaaacattatgtaactcagaaataagcaaacgacaatcttggacaaggaaaccaaattgagatggcatttgaactgaaccttttatagcctgaacaactaccaaagagtcagtttcaactttcacatcaattaattgtttcgtcttaatccaac

SEQ ID NO: 105622 - DNA, 543 bp, Cannabis sativa
  modified_base (47)..(47): a, c, t, g, unknown or other
tatataaatatataataaaatagtttatcatattttttatttaatanataattaaaatagtaaaataaaaacttgaataatataaaattatttaggttaaacaataatgtaatataaatattaattttttaaaatattaatataaattttttagtaatttaaaaataatctacaattttattgtctcttagaatcaatgtaagtaattatagtttaattaataatattttaaattttgaaaacttatatataataatttaaaattatacattttcattaattttaatataagtttttgataaaaaaaaattataaataaatgtgtgataattttttcatttgaatttttattaaatttaaaatatattaataaaatcaaaatttaaaaaaaaaaaaaaattcacctgcatgggattatttatcctactgctagatgggataaattaaataattttagacaaatgagattaacagaattagttatatggacaaattaatctatctaattcaatccatttcaagtaattattgagtgtctaaaaa

SEQ ID NO: 105623 - DNA, 3504 bp, Cannabis sativa
  modified_base (133)..(148): a, c, t, g, unknown or other
agggcacaaaacccaacaactaaatggggccgaacctctttaaaaaccttgtgttctttattatttcttcgcttatactatacgttaatcatatttcttatcgcttattatttgactcattgtcgttggctannnnnnnnnnnnnnnntttggtgctttcattgagagcaataatccaagcttgttctttacttcaagtgtgatcagaaacactatagtcgtataaactcgtagagatgtggtcgatcacgtgaatttactagcagcagatcccacactgcagactccagggaatgcaagggtccgaccagccactactcctgaacaaccaaacacgcaactacctactgtgggtcaaggtgtgacatctcatttgtctagaatcacacccgatgtgcatgagactagaaacaccagttctacagcccacctgggtactcccaacactgagatcccttcgacaacaaatgtccaaacaaccattggagatgacacagagatccaaaacctccttaattctcttgggctcatgcaaggtcatactaatactttacatcacgatcaagaagagcttcgtgctgcagtgaaccttgcgttcgaagagtaaaggcgtcagctcaccgaatggagggatagagagatggaaacgttgaaggctcaataagcggccatcgacgaccgaacaagacatgccaccatactgatacaaagggcctaccaatttgctaatcagcaacctgcgtccaacatcccatcgggcagcttagatgaaaatcctgttaagcatactgcccaaactctgaacgctcagtcatccaattcctggtcataggttccacatgtgggccaagtggtaggcggcaagacttatctcataatttgtcaggcggggttatacccgataactccgcccagaccagcagttttggtcaaattctcagccaaaccaactagtcactgaggcaacttggtgtttcagtatttaatagacttggaacagctcatgatcttaggggtgatctgaatagaaggagaaggttagataaacaatatgttcaaccagtaagtcagcccagggtccacattcaagatgcagctcaaagagatcctaacgtgacactgatcgaccaagaggccaaaaaagtacatccatctgtgcaagcagacttggatgaactgaaaaatatgttccaaggcctggccggtcaaaaactcaatgatctcaagttggatcgagcacgtggatccccattgactccagagatcagtgttctgtaactacccccaagttcaagatgtcgacctaaaagatgtatatagggaaagacgatcccttatcacatctcaagtattttgaaatacaaatggacttataaggggtacgaggagaggtgcgttgcagagtcttccctgccacactttcagaagccgctcaataatggtatttcaagttgacaccatgaaggttcaactctttaaaggccttctcctcagagtttcatgcacaattctcttcttctcgccaactcccactacatttagaagacctggtcaaagtaaaaaaaaaaaaaaagacctagagagcctctccgagcttacataagtagattcgtgatggaggcaacaaaagtagcacaattaaatgaagaagggaagttagccgccatactgggggtatcaagattctaagagagctgtggaaagacatcaagaaaagttgtccactagattctatgagtgatttcctcgacccgacagatggtttcatcaaggttgaagaagccattcagcgagcagatgtcgagcctagactgggccaaccacaagctcctttagctagaacgtctgtccaaaacccctagtaccgtagtagttcaaattcaggcggtcaaagatctaacaacaacagcagacaaggtattggaaaagaggaaaagttcacaggaaaagccgaatagacccctagagagaatccttccaagttcattgctttctctatcctgacagatgacttggagaccatctacatggctactcagttagtaattccgtacaagaaacctcctcccatgaaaaaggacataagtaagcaggacatgtccaaattttgtcgttttcatggagattatggccatgacaacaatgaattcaacaatttgaagcgggatattaaattcttgataagaaaaaataacctgcatatgtaaaaatatgtcaaggccaaacagaatcaacggtcccccaggcagacaataaccaagatttgttactgcctccaccagtagacagccatttacaagtcatcattggggtctgcatatagctggagattcaggaaaagcttgggaaaggtatgcccaaaccttgcaacatgagcaaaaagaagtggtcctagacgtagaagaaaggaagccaaaaataccacggttaggagaacccactataacattcaatgaaggagatactttcaaagtttgcttcccgcacaatgatccattagtcgtggaagtatagatagctaacaaaatagtggcccaaactatgatagacaatggagcctcagcaaatatcctgttcaaaacaccatgtgaaaaaatggggctccaactcaaagatctgatcccctgcctccagcccatataaggtttctccggccagagtgttgcacctttagggaaaattcgcctacccctcactattgggcaagctccgaagagcataactgtgatggcacaatttttggtactatatgttccatcagcctttaacaatgtgccgaccagccttatatgacttaaatgttgttatatcagtattccattcatgcgtcaagttcccaataaagaatggggtaggatgcgtgagagggaatcaataggtttcacgggaatggtttcacgggaatgttaccgggaatgttacaaccttgccctaaccaaggctaaaaagaatgaatcctccagtcagagtttggacaaggggaagagcattgccaaatagggaaccgcccaaggcagggacaaagatgtggatccccgacttggggaaccaaatacaaatgttgggcaggtggaagagttagaagaaattgaaattgaccaaagtgttccgaccaggaaacttaaaattcgaaaaggtttgttgcttgaagtaaaattagctctgataaaatttctaagagcaaacctatacattttttcctggtcacatgaggacattgtcgaaatcgatccttctataatttcacatgccctgaacatcgatccaaacttccatcccgttcaacaaaaaagaagattgttggacaaagaacgagccctaacactaaaagaagaggtcaaaaagctgcgcaacaacaatttcataattgaggctttctacccggcctgggtagcaaaccccgtactagttcccaagcgtaacaaaaaatggcgagtatgtattgactttaccaacctcaacaaggcgtgccccaaagactattttccacttccaagaatagat

SEQ ID NO: 105624 - DNA, 717 bp, Cannabis sativa
gtatctttgaattattattttctaattttgattctttttattttcttaacttaatagttatataaagtagtttatgcctttttcttacaacaatatatatatagtttaaacttttaacatataaaattaaattattttttgctaggtgaaatgttggtgatttgaaagctctttaactatatgtggttttttcaaaaaaataaataaataaataaataaaatgaactaatttatacatttttcttgtataatttgtacatatagtttaaacttcaatatctaaaaattagtgatgagtgtgatactttaaaattattattttgtaatgttgattctttttattttattgtttttttatttttttttattttggtttaaaaaaatattctaataataataataataatatattttccttcaaaataattaattttttttaaaaaaaaaaaataaatttatctcacacgtagcacgactgtcctaactagatgttatttaatatatgcgctaatgctctacgtacaagatatcaattatattatatgttagaaattgttatgctccaatagaaatatcaaaccaacaaaataattacaactctatgataaataataccaagacaaaaatatagattaaataatgatacaatactaaacaaaatatacacataaaatagagaatatagagatgattagagggattacaactcaaagcaat

SEQ ID NO: 105625 - DNA, 764 bp, Cannabis sativa
tttgaaagagataaactccacagtacttaccctcataccaaaagtgaagtgcccgaacacagtgaaagacttcaggcctattgcctgctgcaatgttgtttacaaaatagctaccaaaatgatttgctctagattgaagaacatcttaccaagccttattgctcaaaaccaaagtggctttgtaaaaggacgacttattgctcacaatgtaatgatatgtcaagatctcatcagacattatggaagaaagaatgccagggaaaattgcatgataaagctagatcttaagaaggcatacgatacagtggagtgggactttatagaagaaatgatggaagccttacagttccctagtcaatttgtaaagctagtgatgaattgtgtaagaactccaaagttctcattgatgtttaatggtactctacatggattctttgagtcaaaaagaggattacgccagggggatcccttgtctcctctcctctttgtactgggaatggaatacctgtctagaattatgcaaagaattggttctaaagaagattttcagtttcatgaaagatgtgaggggatcaaactaaatcacttaagcttcgcagatgatgtgctcttgttcagtaagggtgacttcaaaagtttttatctcatgctacaaggactgaaggtattcttattatcctcaggtttgcatcctaatcctaccaaaactgctgtctactttagtggaatgcatgacagggaaatacaacgaatattagatatgt

SEQ ID NO: 105626 - DNA, 630 bp, Cannabis sativa
agtatatatctagcttgagggggggtgtaggaaatcaagctagctgtaaattaggtgtaaatttacatttaatatttttttcatttactctagtgttttaggtgttcacattgtattatatatgcccgttgtatatactaaaattaattatcagaaaatacaaatcattttctctcatttgcttcaacgtaaaataaatgcggttaatatttaaatatcacacagctctgattagtccgcttttactgggtcaaagtaaatgtgtattaaaccgttataaatcattatattctaggatttctcgataggaactcagtaccaataaccttaatagcaagctggagcttttcccatatctttctgaggttgataatgtaaatctcattgcttctactctgaagacataacgctccatctgacaattgcagtttttggtggggaggtgatcttcaactatcaatatcatttgaatgttagcttctatctgagagaactagttcgtcggagctattaatctcattgaaagatatctagagttgattagtgaagataccgcgagtatgccttcctatagcgagatggatacctcgctattagttgtatgtgcttatacgactatcttaccgtgta

SEQ ID NO: 105627 - DNA, 518 bp, Cannabis sativa
atacataattatctagttagggttttgctaatccatttcttatataatttcgttttggcatcttggatcctaatgtctttgctgggaggtaggttaatcagaatccagaacatttattgttattgttattattatgattattagtaatttagtatatttattggatttacgaaagtgatttatatattttaaattgtctacttttagctgtgatgaagtaactgcttgtaagcggcttctagaaaaggtggatctcaagggttatcaggtaatcaccagtagatcactttttgcttttaatttcgttcttaattacctacccccaattgtattttccttagcattgcagctttagtttcataggttcccgaatgttgtaaactactttagtttcctaatcttattctactgctgaggttagaagctacttgaaatagaaaatcgtttgatcttttttgtcttttaaccattttcaatgacagattggtaaaactaaagtttttctcagagctggccaa

SEQ ID NO: 105628 - DNA, 512 bp, Cannabis sativa
  modified_base (196)..(198): a, c, t, g, unknown or other
ggcctagcggtaggcgggcagaccttgtctagtaattcatcagaaaaggtcatacctgatagttccaaccaagttaacggtgccattctgcctgtcaaccaagcgaatgaattgctaaaacagccaggcgcttctgtattcgaaaggttggggatgactcatgacctaaggagtgacctgaacagaaggagaggannngatgatcagattgtcacgacgatcgtgcagcctggagcccgtgctcaaattcccgcttagaaggatactgatgtgattcaaatcgaccagaatgctgagcaggttagcccggccgtacatgcacaactagacgaactaaaaaatatgttccaaggcatggttggacagagaaataatgatctcgagctggaccgagcacgcggaactcctttctctcccgaaatcaatcttctagcattgccccaaaagtttaaaatgccaacattgaaaatgtacacaggaagagaagatcctctttcccacctcaagtattt

SEQ ID NO: 105629 - DNA, 2487 bp, Cannabis sativa
  modified_base (2462)..(2462): a, c, t, g, unknown or other
cactatataaaaggcattagacaacataaaaagagacctaaactctaagtctcacacgccccatagctcctctctctcagtccttcaagccccttcactcactaaacacttagtctatttccttcacacaatctcacaagttctgaatctgtaacactcaattctcactactgtaatattgaagagagtcatggctagaaattacaaggtccaagcttgtaatctgcgtggtactgtctcaagaataaatacaaccaaaaggggagtaggtctttacccgttcatcaagagccccgaatctctataagttcttgtgttacttttattatttattgatattatttacacgtggtgattatcaataattaataaggctcctctgtagttgaccaaattttgagttaacattctggtgctttcattgagagctttatctcattccgatcaatcaccgtggttctaaccagaagaaccactttctccacttcctcaggtcctcctcaggatcttatgacagtcgatcctgatgttcgtgttcctccaaacatggaaggcactattaatttggctaatgtcgccaaccctacaaatcctaccaatcctaccaaccctactgatcatgccaatccaacaaatcctaatgatcaacccctaccgcccaggatagacccaccaacgacacattgggtagaaggtcctgtcaacatggaatagcctccacagaacacagttgtggttgtcccctagtactacgcaggagaaacatggctaggaattggtgaaccatccgttggtgagcctcacttggaccttggggatgatattgagttggccaggctcagagaagctataggccaggtcactcaaacagaacaagaagaaccatgcgctgctagttatgatgctttcacccagtagagacatgaattcctaaagtggatggattactaagaggccatccttctggcccatcaaaaggagatgaaccgccgtaatagggaggccaatgatatgataaggcgattcaatgaaaagactgtcggaagaggtcaggatctgataagaaatccttttaaaggaaggctcattgacaggttaggcagggtctacaggtaggtaagaaatggatagatggtccaactaggtccctcgaacacgaggacaggccttccctgcctgaagatggtcacatctttccagacagaccacatggcaggaacaaccaattcctagtattaggaggcattagaggacgagaagacaactccgggtagggaacattgccaactggccaggccctagcagggcagcacaataattccctcccccaaaatattcgagatcaagctgttctaagacataaggatcatatttttgacaagttgggtcctagtataggcaaaaacacacaagacaataataactcgaggagaaagaaccgaagtgacttttttccacctctgaataattatttcaggcaggtggatccaccaaacccaagcagttggtacgacaaacccactgccaacccacagactgatctggccggcccagggtatctgtctagccaagaaaggctgacatgaggacactaaaatagatccatatgtgcaaacatagttaggtcaacttaaagacttgatcaaaggcttgtccggcccaaagctgtcagacttggaattggacacatcaagggaatcacccttctcaacatatattaatgcattaccccttccaaagttcaaaatgccagcttagaagatgtatactaggaaaaaagatcctctagtgcacataaaaaatactttgagatccaaatagatctccaaaaagtaattggaaatgtgtgatgtaagatctttccggcaaccctatctgaaactgcccagcaatgttatttcaagctagccccaagaaggttcaactcttgggagaaattctcttgataattctatactcagttcttgtcctcgagacaaatacattcacagcttgaagaccttgttgaaataaaacaaagataaggtgaactttgaaagactacattcaatgttcatggctaaggctactaaggtcaaaggcctaacaaaagaaggtcattatacgaccatacttggaggtatcttaccattgagtgaggaaagatattagaaggatctcaacaaacaaaatgaaagagtttcttgatcaagttgatggcttcataaagttggaagaagctgtttgacaagcccagatagaaaggtaggtcggtgtcgggcaaacttagggtgtcatgcagttccaagttcaatccaactttctgaccagcacatgaaatatcagtcggacctctaataataagaataatagggacgaacgcagcaacaatagatctggcagagatagtggcaaaaacaagaagtttaacacttcccctacaccacaaaatcaaagggagaaggtgttggaaatattttacnaggatctagatttactaccaattat

SEQ ID NO: 105630 - DNA, 1026 bp, Cannabis sativa
aactgtgtagtcccatacctacacaatctcagaattatcccacttgaccttcctcaagcaatgtgagatagcacagcttacccggtattccccttacggatcacaggactactgactgtcacaatagtgagatcaacaagagcattgtattgttcaatataactctcatgggccatgaggagagcttaaacttctttaagagtcaagacatcacttcgagaggttatgctagagaaaacaaagtcatattcaagacctaagtcgtttaacaattgaagaattacatcttggtcacccgtcgtagaacctgcaatcacaattgaatcgaagagagaatggactttttccacatggtcagaaatggataaggcacccatacgaacatgggagctttgaccgttgagctgatagaaatatttgatcgcatttcttccattggagatacaaagtatttggatcatcattaatgagggtgcaaggaggtggcacaccagtataaagaatctcatcaagatcatggcctataactattgggaaaaactgagatttttaggctataaaattggtgtgatcctgcttaacagtgaggaatgcatagagcgaatgagcaaatgaattccacgcaactaaggtacccgactgattcaagagagggggagtagcaatagttatggcaggtgaatgatcgatttgagcagcagaggaagatgtgttgtcgtgggaagccatcagagacagaagtcaatagcaattgataccatgtaaaacttcataatggcaatagagactggtacaaaagagagacacaataatgagaagaaagagagaaaagaattgccaaagaagcttaaccaatcagttagcttagtaccttcttatttatattgaaaaatagagttgaataaaagttgtttgaaatagaaaaataacacacgatagtaatgcacctaactactaactaccattaactaactgttacgaattttatgtttattacgcaaaggtacgcaatcaagtagtatctca

SEQ ID NO: 105631 - DNA, 930 bp, Cannabis sativa
tgaaacactaattaagtttctactaaaatttggaaaaactaaaaatttcttctgaaacttaaggtggccttttcctttagcttggaccgatactaatttgccatttccaactttgagctataactcccctggatttaaataatcccaagtttcaagccgctgcaatgaagaacaaacatggttggtagatccggaatcaacaatccaaaaggatttgtcattttctgaaacacgtgattcaaaaacaaaagcgttaccttcgttcgaattgtctagaagtctgggacatcgttcttcttgatgccccttcttttcacaatatgaacattgaagagtacgactatccattgtttcaatatttgcagcaatgtcagaagcatcatactcaattactatcttccttttattgtctacaaacctggagggaggcctccttgcaggaaaagttttctcgtaaacatgcaattttgtattcagtttacctatgtcggatgagttaaaattattgatcatataagatacaacaaatgcattgtactctggtggaagactattgagtaaaaattgaacatactgttgtcttgacaaagaaattcccagcatttgtgctttcaggattttcatgtgaaacaccattatatgtgacttgatgctctttctaggagacatctgcacatgatgtagtttatttgcaaaggtatgtaaaaggtgagaggaaggaggttcggtgtgtgggtaatccattttgacactacaaatatcaataaacagaaataaatcatttggttctataaattcatacacaagttcagaaagtaacaattcagtaaacatgtttgtaaaaataccaaaataaaacatatttaattattttccaaggtttccaacaaactgatacagtgtagatcggaagagcgtcgtgtagggaaa

SEQ ID NO: 105632 - DNA, 618 bp, Cannabis sativa
tattatatataatactttcactttaatgtcatactacatcagtaatccgaaatgagattacttgcaccaaagaatgagcattagtgaaccatactagcaactgttgattaaagattacataaatttattattctgctaactgttttattcataactaattgattagttctctgtacaactacaagtaacaacctcatatatgaataaagaatttttcaatatttatataaattattcaatactaaatattaataatttaacattcatgcatatatcaaaattttcaactctttattagtaatcaaaaaatgtcttgatacgcttttcagggcataaaccctaataatatcccacttgcccctaaaagcaaactagacatctcacttagtctcatattagttatatgacccataaaagatttcactggtagcgtctttgtgaatggatctgccaggttatgcttcaatgcaatcttcaagaccgtcacatcacttctctctactatatttcttagtagatggtactttctctcaatgtgcttgcctcacttgtggcttcttggagttggccagcgctccactgttgtcacagaagaacactagtagtttttctacttct

SEQ ID NO: 105633 - DNA, 1126 bp, Cannabis sativa
  modified_base (1071)..(1079): a, c, t, g, unknown or other
cctcccggaggtgctttgttatagccttgctctccgggagtatgtgagaccctcatgccttctccgggaggcatgttaaatgctgatcatattgatcaaggggacttagtcaaattatcccaaagtcttgcttcttcaatccacgtgtcacagtcaggttggtccacgtattttggacaaaataaagggtaacatttaccccccaagccttgtttggtagaaagtaaacgaggcttgcttaggtgcctctggttgccttattaacttcctggcacgtgccctgggcgcgtggggatgcatttatgaccatcattactgcagttatttgctttttgcaggcagcgattcgtttcctatccatttaatgatacggcgcgttaaatgggtgtcagtcgagtactcaaacgtttcctaccgccttgatgaacgcttgtcccaaccgtcgaatctgtagaatacgaatcgattgctattctgaccgtacgatgatggtcgatcacagctgtctcacacccgttcaggcctataaaagctagccttctcattatttcatatggttactttcaccatttcaccaaattttctcagagcttccacagagaggaaagatttcagacaccatagattacttgcttcttttccttcgccgttgtcagtattccctttaccggcgatcaacaccaactcccaatcttcaaacttcatgtaagttctcaggatactttacactcacttactgcttgtttgtattgcatgtttataatttctgggttgaatgttgaacttctggggaatgattttgcttgagtttgttgtataatgcataaaatctccctttttgtgccttggttgtctctttttactacgttttcttttgggaatcgcctttttctatcgtaataacgcctttagggcttagagtggttcgtgctttctcggctttgtcttctttccctttttctctttctttttgcaatgtcactgcctttgggatttttgcatccgatgcttgtcaggaaaagtctcttgggggtttccttatttggcaagcatctggagggggcctctttnnnnnnnnnaggggacccccattccctttttaaacattagggtttggtttggggcc

SEQ ID NO: 105634 - DNA, 734 bp, Cannabis sativa
aaattttacatcataacaaatgttgtaccaaatttgccacaaaatttgctatgtgccaaatttatatcactttttggcacaccattgaaatatattttttattaaatgagctatattttagttttttaccacttatttacactttcattaacgatactcttatgcatgcttttcaatgaaaagtgtctgtagagtttatagtaacctatatatatatatataaatatatatagggaaattctacagtaagggatatactttttacctcaacctatagggaagaaaattgggccaattaaaaattaaaaataattgattgtataaaaattttatttgagcattatagatgattatttcatattctttttgtttaatgatgattttttaaaaaaaaaaaaattgatgaatttttttttattttatttatttttgtagtggccgaccaagaccggccctaggtataggcgggttaggccccacttattttaggagcctaaataaaaaaaaatacattttaaaaaatatacatatttttttaataatttctaaaaataccatttatctttatagtaaaggcctaaaatttttttttgcctatgactcatttcaactcagagccagtcctgtgtccgaccaagccaatttattgatagttcttagcaattttaattagggaaattctaaaattggagcactgatgcacccttatctgttccgatattcgagggactttt

SEQ ID NO: 105635 - DNA, 1719 bp, Cannabis sativa
tatgtatatatgtgtgtatgtatgtatgtgtatatatgtatgtttgagtataagtgtacgtatatatatgtgtgtgtatccgtaaagtgtatttttatgtcattatatataaatttatgtgtgtatatgtatgttcatattttaatttaattttatttttatgaaatcaagtccatgttttaccgcctcagagcatcgctagctacttgttgttgttgtttttgcactgtttcacgtttgttttttttttctttatattagtattgtaaatttaatagtttttgttataagttagtatgtttatgcatgttagtgaagtatgttcagggccggcccaagcattcggcagcttgggccattgattgcacaagaccctccctcattttttttaggcccaattttttttttttttaaagaaaagacctattttttttcttttttttttcctattatatacacataaataaaaaaaaaattacaattgaaaatttatggataaatctttttaaaaaaagctagcaataaaattgtagttttaatgtacacgattttttttttttaaaaaaaaacccaattttaaaattttgcatgaggctcccaaaatatttgggccgaccctaagtatgttctatgataaaatatactgcagtcggatgggtggatcattttttttgttcatatattgtcgtggaatgtttgtttgtgttatttataggttttgaaaattttgagtttacgttttcaagctgttatgctgccaaaattttggtagatagttagattatgtaaaattaattaatggtttaaatgaaataaaattaatttattattaagaataaaataacaaattaattgttgataaaaaaaataatatataagataaaacataaattttaaatatgtaattaaaaattttgtaaaataatattatattttttaaaaaaagaataattttaatttaaataatgaatgattaaaaaataattgaattataacgtgtaacatatatggtgagtacgagatgtcaaagggtttacgtgactgacagtctgattgtaagaaaaaatagatagaaaatattgaggagcttggacaagagaaggcatacatattaccgcctgactaagtaactcagaaggtatggagtgattgcattgcttactggagcacaaacaaacaaaaggtaattaataaaatttttaattttagtaatgttttatattatatagtcaataataaataattaattgtaagaaaaaaaaatattaatttcagttaagaccagcaaaaaataaaggaagttggggtgagatgaaacttcaaggaggcttgggatcaaagcctgctgtattacatgttgtcgctggggtaagtttatataatacattatcattgataagttttttttgtaaaaatacaataataataacaatttttttttcttaaatatataggggctaacctcgacacagaggagaacttccaactgttgtagaaactttctaaagtttcaccataaaggtaacaattggcgtaacgaatacgtgcaacaagcttacagaagtttacctttatattgatttctatttatttctttcaattaattttgtatttaaattaactatttaattaatttatttattttaggagtaaatagttgaattagctgctactcaaccagcgcccactgaggatcagcctgatgagactgttgtagat

SEQ ID NO: 105636 - DNA, 578 bp, Cannabis sativa
ttctatgcttaactttatacatatataggtaaaaatcttaacatagaaacacataacataatggaatattgaatgacttaattgaaatttaatttgtatgacttttagtttctatagaatgcaaagagttaaaaattgattattattaaattattacatggtaaagtttgtttttaaatgctatacattattattaatcaagtcatttaaataataaaataataacaaaaattgatataattgtgaaaaaataataaaatagagaaaatagaagaaagctcttagattatgccacttcactctctttaaactttcctttatatatatatatattgatattgatattgattatatatattgtgttatatttttcgtttgtttttttaaatatattttttatttgaaaattaaaaaacctatttgaattaaatatttaactttaaattacgtgacattaaaataaaattattatatgactaaaaaatatatgaataataaaaatatataatattaaaacaaaactaaaaatatatagctaattggataagattaatcttattaattagtaaaaaaaaaaa

SEQ ID NO: 105637 - DNA, 667 bp, Cannabis sativa
  modified_base (223)..(224): a, c, t, g, unknown or other
acaaacaaaatatcccaaaactgagaaaaaaaaaaaaacccgaaaatttctcccacaaaaatctccatctataatatcttgaaaaagaaaataaaaaagtaaaaataatacctagaagccttctcttctacactgcttcaacagtctgcccagaacatcatcatcttcctctttgcaaccccagccttcaagcttcccagatcgagagggagaacaagcttcnntcaaattgggatgcaataaacaaacaatagatgccattgatgcccaaattaggtgcggtaaagtttgtttgggccatggacggtcggagttgctccgttcggctttgagttagagagaaatcgagaaagagagggactgagagagtggagagaactcaagcgacatcgagagggagaacaaactccgatgtgctctgctgatgcgtagatgaagagagacgtccaactgtgatggtgttggtttccgtccaccattgatgtcgacgaagagaaaggagattggcagaggaaggtgcgcaaagaaggaaatttcatgcgattgaagagagagaagaagaagaaactgaaggagagagaaagggtgaggttgtataattttagggtttcatttttattttttttagaatttaatgattttttatatataataaaaaattataaaa

SEQ ID NO: 105638 - DNA, 543 bp, Cannabis sativa
catcactggtcttttgaactaactcaggacccaaataccttctttctccagtttcttcctagtgaataggtgatcgacacttcctaccacaaacaactcatagggagccatccctattatactctgatagttgttgttataagaaaattctattaatggtaggtacttactccacgaaccttaaaaatctaacacacaggctcgtaacatgtcctccagaatttgatttgttctttcagactgaccatctgtctaggggtgaaaagttgtactaaacttcagcttcatacccatggacatctggagactttgccaaaatttggaagttaattttggatctctatctgaaactatggattttggagctccatggaaacacactatctccttaacatacaactttgcatactgatccactataaaggtggttttcactggcaaaaagtgtgctgactttgtgaaacgatccacaattagccaaactgaatcatacattccgatagttctaggtaatccaaaaataaaatccatggtgacatcttc

SEQ ID NO: 105639 - DNA, 638 bp, Cannabis sativa
gcctattaaaggggataacatgacttgggacaatcatagagacggtgataatcacattaagtcggccctggacaaagctcttgtaaataatggttggctacaaatctttcctaagatggtcgtccggtctctcaccacctgtaattcagaccatcggcccctctttattaatactgacacttcggtctctaacgccagaaggcctttccgctttgaagcttggtggacaagggaccctcgtagttccttggtggtggatcaagcgtgggggtctgtttcccacgattgggcccccgctagagtctttaagaaagttggtgcgacccgcctggccttgagtagctggaaccgggtgcaatttggcaagttggactcttgcatctctaagttggagggtcaattacaagctatccaaagtttgcctgctggtgatagaaattgggctacagaggttgaggtgaggaaagagcttaatgaggctttaaggcggaaagctatttactggcaacagagatccagggtttcttggattagggatggtgataagtgtactaattttttattcatttctgccacgattcgtgttatagtgagatttttctcacctagaaactcgagaccagactcttatttaaagg

SEQ ID NO: 105640 - DNA, 1605 bp, Cannabis sativa
accattgtctcggccttagggccattaacctaaaaaaaacaaagcctacatagtaggagacttggacagttctgcttccttggctgcctcctcgtcttcttcctcctttttggtcatctcgcagaaagcaagaatttccttctttgattcttcctagaaacttgtgtccatatccaaattttccatctaagctcggaaaatggtacggaggccaacaacattgcatcgttctttggtctcggcctcttcccatcaagtgtcatcttggctgcagcaagttcccctttgagcttctcgcattctttggtcttatcctttgcctcattctcggcaactgcaagcttggcctcaagattcttcttcaccttcttggtatccttattaggcgagtgttctctgacttggaatcatgccatttttttgtcagagtcctacattggcttccccagttcttaacctcgctttccaagaatttcagttttcccataccatggcattgggcgacgaaggaaaggaaagtttgttgaagacgaattaaaaaaatgggtaagtaagtctgaaaagttagaaggaaaagtaagatgataaggaaattagagtctacccgagaggcatgagcaacacttctcttaagcatattctccaattcccgttattaatctaatcccattcatgggagaggaaagccttgaagtgacgctagcaaactgcgccaaattctccagtgtacttcgagccaagactgttggcatcgatagggagagtctcgagggcttgtctccaagaggcagaagcttggtttgcattgggaaggggcttgtcggtacttgtgaaggctggaggaggaatcaaatcctgggtttcagactcagagacctctagattaacggattgtgaagctcgcttcttcttagttgtggtcttcctctaccttttgagaggctctacctccacgtcagaaggagcctctgaggtggtcactctcttcttttctttccttgagggtgagaccctcgaggttcatttctacgagacaagataaattgttagcatttattgaaagacaagtaaaaacgggagattggggataattttctgcctaaggaatttaccataatcactagaagacgaggtatcactagaagatggggtagaaggaccataatatcctctaacatccctacaacccgtaatcctgaatatatcatagggattaattggttttaaattccagctcacgtctaaatgactcgccctatccatcatagtcccgtactgttcagccattccgtagtatgactcagtacaactaatttggacacggaatctgggataccaactatcaaacctatgtgtaatgtgatttacgaggaggggatgccaagtataaaagttaaagcgactatcttaaaatgtacgtaactagagtgttacgttcagccctaagcagtgtgggtgaccaaccacattgattacctcgggatgctccttcaccgacttcctgaggggtagtattctgaaggtattgtgcccgagctacgcgatcttgagccttctcatcgtctgggacaggaacctgctgccaagaagaatacttgggatatt

SEQ ID NO: 105641 - DNA, 3425 bp, Cannabis sativa
tagagttcaaagctctcactacaatacaaccaaattcttttcataattaaggtatgtgaattttgtgataatacaaatcacaaagtagaaaaaataacaaaatacataaataattaagagagacattaagatagagaagaagaccttcagagggagctgtagtgggctgagttccattaataatctgggctcttgttaatgaaacatcaatagcaacaaaccagcaaaccacatagataatcaaagtactaaccaatggtactaataatgatgaggttcctgatcttcctgacatgatgataataataataataatcctacatatatatatatatatgtatgtatacaaataactggactatatatatatatacaataagcaaaacgtattatatctatatatgttgagaagaatagtcaattccgatgacccatcaatgtaaaaagacttctattattagatctttcaaatattggagaaggtctaatctgactattcttctccacttcatttaattgcattttcttttgtggcatcgctttcgttatttattctggttgcaaagtaatttcatatacccaaaatgattgttggaataattgggtaagacaaatattataaatgagccaaaaatgtctgactctgcagattgtgtccataaacagctctcgggtcataactttataaccacgccacatttaaacagtccatccataaacgagaggactattcttttgaggggtcttcggagggtaaccaatgagtaatgaatcattcaaaggaggactctatgcacatgaacacatggggctatgcagggaatacaatttccgccccgttcccatgcatttctcagtatagtagtgtgaataatcaatcaccttattaatgatgcagtcacgcatgcatacacaagttgcagttgaagaaaataatatagcgtgggactggttaactatataagtagagttccatgaaagtggctattcctgcaattcgaccactattacaattccaaacaagcaagcataacacgagggtttataattgaaaatgctaagtgacatctcaccgcacgatgtggtatacatactgttgttgtattttagtattgagttctatatattttaatttaataaatattttagagaaccgccaataactcttaattgtctttaataagcttattttatttatttttagtgttattttttaaaatctttaacttttttatttgtgacttttggtattttattctatattgagtcatttagagtagttgtggctgattgctcaatctattgttaaataatgatgaggtgatcgatgctacattaattgatgtgacaatttcgagactgaggtggggggatgggattagtgtgcagctgatctacttggaacaaagctttgaagagtagaagaaatggaaagtatagaatataacctagtctccatcattccatacttgtgcttcaccctttttagagagaaagacagcagaaaataggaattatgaagaaaaggaataggagaaaagaagtacaaaagagaaagaaaaggaggattcatctctagatatagttatttctcatccttttctttatgtatttccttttttacttcttattttatagtatttttgtgctcttgagtatgaagtaattttgttgtagttagagcttttaatcaactttaaattgtaaattttattgatgttttatgaaagtttttagccattgaaattttgttcatttaaggatgcttaattttatctatccacttttacatgatcactaattgtaggttagctaattttgattttgaaaaataaaaataaaattagtgaaaatacttgaacgatatatacatatgattatcacactaaaaatatgtgattgtagatggtatagaaaaaatattatttatcatgtatgactaattttggaaattagtgtataatttgtattctttaattctagatgtgcataagactatatgttaaatttagtcttaagagcccataatatatagatttgaaaaaattgtatgtttattcataaattttcgattgacaaaatttaattgctaatgcaccttcaatgaaattacattaaatttgtattctagggagatttaattgttctagctcatcactttgctcattttcatttcttattttatttcctttcatgcttagtttttagcctaactcaaattaatattatttgttttatccaaattgtttagtactgatttttataattaattgctaattaatctctgtggagacgatactctatacttatcactttattacttgaaaggattgtgtacacttgcacattaatttttcacaacaacagttatccaattataaagtgtcacatgggtttatgttggacaccttaaagtatcaaattcaaaatgctcgtttataatgttataattatgtatattctatctttctatatatatgtacaacaactaacataatttttgtattacgtacaaatatgaagaattgttaatcaattataggatgtcacatcaacatcttaaaatattgaataacaatactcatttataataaaataattagcaattttgcctcctgaattttcgacactaattgaacatgctccttaaaatatactgtttgctaaaaatttccccagaacttttacatttatagaaatttagtcattctgttaagttttgtctcattattctgtttaaatgatgatgtgtctttgtaaattagaaattttacctcctaaactttaacaactatcaaatcgtactccttccaaataaaataagaaagattcaatatttttttagtaaatcttaaaaaatttagtttttagatcttaaaaaaaattattttgaatgattaagaaaattttaaaaaataataaaaattcaaaactaattaatcgataattaattattttaataaaaaatatatttagacataaaaaaaatatattaaacatttaatttttgtaataactaaattttacaagaacaagtttgagtctatttttttttctttaacagtctagatttgtttaagtaaatatagcatttttttagttttaatgtctatttattttttaaatatttttattgaatttcttattatttttctttattttttaagatatgagtttgtaaaaataaaaaatttaattttctcttggcaaaatcttaatttgtttaaattatttattatatttttaataattttagtttgatcttttaagatatgtgtttattaatagaattctcaagagtttcgtgatgtggcaccccaaatgggttaaatgtaataattacagccgtcattttgaaaccctcgatgggacaaccaaaggtcaccatcttgtgacatcccttcacctgtctctcgcttatagtt

SEQ ID NO: 105642 - DNA, 1290 bp, Cannabis sativa
  modified_base (61)..(61): a, c, t, g, unknown or other
ttttaaatatttatataataaaataataaattagaattttactaataataataataataanaataataataataataaattagaattataatattgagtagtttttgatcagagaagggatttttttttttttgaataaggatgagattgaaagaatgtaagaagccttaaaattaattggtaaatggagaattttaaaattagataagggcaataggatcaagtgaaaaattcattaaaccaaaattgtagcttcccttaaaagttaaaatcccaaagttaaggttggtcaacttttcttaaaagctataaattttacttaaatttttataaaaactattttttaaatttttagctttttaaaaagctccccaaaccgggctaggacagctgatagtgaaagaaatcaaatatatttgaaatccacttgatgagttgattctatatttttttttagaagcacgtgattctatatttgatttacttacttttttttgaaggaagatttacttaccttttattgaatatcaaatcgtcataacttcgaataaaacgcttaaaaaaaattcgaatgaaacaaaaataaaaataaactggctggcgagttaggtgccttcctagttcctcctcttttcaaattttatcttgtttttaatcctaattaataaatcttgattatttcaaaaaaataaaaataaataaatcttgataaataactcttggaacttttattagaaattatctttagagttgaatgttgataagtactcggtagtacttattatttcttgttagaccatcgtgattagtagtgtgcataaatctcgattcaatccaagataattacttgatctaattacaattaatcacaaattaaatatctaattatagtctgattggattagatattatttttgaatatccaattagatgtatcgaatattggataagatgtctaaaaatctaatatatctaacatccaatcaaagtaattacattttattttattataagtaagaaaatacacacacatatatatatatatgaaaattaacattaaaatttttactaatggatattgtataatttgagctaaattttgctcaaaaaataagttaatgttatatttggtcaaaattttataataatactccaatataagagtatcttcaatgaagtgctataaaaatggtgtattttcagtttttaaaggagttttttcatttttacacttcaaaacagttttttttatttatttatttatttttttttacagaattctatatagaa

SEQ ID NO: 105643 - DNA, 717 bp, Cannabis sativa
atagtgatccaattaaacttttgacattgagctacgacaatcatattatttttaaatcaacaaaagacattcataatcacaaataacaaagtattaaaccgacatggtcaataattctagtagtatggtaaagaactattttcaacatgtgatctatttaaataacataatattcttatcagtcctcaatttcactgataatgtgatgcttaataaataagccaataaaattaaccatacactacttaataataagttagtgtcactaaacatgcttaaaaaaaattaagccaataaatatcattgtcattaagtaaataattaaaagacaataattacaacaagatatgaagttcatgctttcaattcaatcattctcaagaatataacaaaaaataattgaaaatataaacatccaataatccaaaaattatttgtccacaaaacaaaccaagtagttcataacatccaaaagaaaattacgtataaatgtgttgactatggatttagccaaccgacacagagtctaactaggatcgtcgcttatgactgtcaagtgtggaacgataataaatgtaaagagacaaatacatttatagaagttcatccccttttatttaggtaatgacttactcaccttgtagttgtattcactctcgagataatgttgggattttatgccctaaataaaattcatttcaatgtaatctgatttgt

SEQ ID NO: 105644 - DNA, 1072 bp, Cannabis sativa
agaatgagaagggtgtattgggaaatagatagagagacatgagataggaaaagtgtgtgtaattatgtaattataagtaaaatacattttataccaaacctgtggtggatttattagctcacttatttccttccacatgcgtcacaacgtaatcttatgtggtacaaagttagttaatttagctagtgtggaattaagccttggacagctccaaccaacaactatataaagagcagcccttccacttaatttcatttcggttttttggattcattttgtatagaattgagttgtaattctagaaagaaacttgtgtgatttgagggatgttaaagctactctcacgtgtttgattgagagagctcatgtgaggtttattgtaattttctatttctctattttgcaataatatgtacagtttggattcaattcctcttccatgtatatgttgatcgagattgaataaagggtttttagttttctcactcatttgtgttcattaatgtttctaatttgttgcttattgactaagtgttattttctggttttggtaaataattttgtcttttatttttggtttgagcaatcttgttacactgttaactacataacaatggagctttaggggtgaattcttcaccacaaatggtatcaaagccaaggctctaagaagaggtttcaagatctgcattcaaatcttcaagatttactttcaaactttcaagaaactgttgaacgtgatggctgctacaagattctaggtggacaaaatggcacaaatgatttcagtttatgaagaataaagatgaaagctttccttgtgtgcatcggggaatccatgaagctcttgatgaagagattgtgaacctggtacaagaagtgccattcttagtaaataaaaaaattcttttctttttacgtaatttagttatatttgttattttaacttggggaatttttaaaaatatagaaattgaaggtatagtttatttttttatgacataaataaataatactatagggttatagattttattttttattttttttttacatttatatgagttttttt

SEQ ID NO: 105645 - DNA, 754 bp, Cannabis sativa
ccctctctcacttactctagctcttttaggacccatctctcaaaaattctaacactcaaaatttaagaaaatttcggcagcacttccccttaaaaattcacttttcgggtaacaacctaatcacaaatagcacaattctaagtcacaaaaaactcttcaaaataatgtaatgaacaatatcccacaaataacaataaaatttcaagattctccaacaatccaaaattattcactaataattgcatagagagtctaagaaattgttacctcaatgaaaatcccccttcactctacctccattgaagaaaaccttgaagttcttgaggtagaagatgatgaatagtgaaattttgagtttgggtgaggtttagggattcgggtatgattttgaaaggaaaagagtgtttgatgagaggaaaagtggtttagcatgatttgggatgaaagattgtgaatagatttgaagaaaaagggtttagaatgagattagatgaagaaaagtggctatggggaggagtttttcggtggtggtgggttagatgataaaaagatgtgtttttgaaaatgtgtgattttccctctttataaaccgcctgaccaatctcgctgcggccacaagtgggctcaccgcggcaagatacgagtgaaaaacatcgcttttgtccaggccttatagccgcggtggcaatccttctcgtcgcggtgagataagccttaaaaaattgcctctctgcccaaattttatggccgcagc

SEQ ID NO: 105646 - DNA, 505 bp, Cannabis sativa
  modified_base (26)..(27): a, c, t, g, unknown or other
  modified_base (169)..(177): a, c, t, g, unknown or other
agttttagaatttaccaagtaaattnnctaacttattaattcctccttgcttcactatagattcagaattgcactcttaattatatagaacactatatatgtcccaagatatagataccctattaattatccattgttataatataaataatcaatgatcctctatagnnnnnnnnnatcgagtagggacaaatttatcgttctacccttcaatgtcttttatccttaagacacttagctacctataaaaaatatttcagtaaactaatataattactgaaatgagtacttcaccatttatctctattaagttaagctcgaaggaaattatcatttcacttttaattacttatagaagctatagattccatatcaatgatgtgctcccactcaatttccctatcatgttcccaagatataaatttctacctgaaccattggttagctttcacgaacaactctacgaacataaataatacaatttagatcgaacctaaccatctca

SEQ ID NO: 105647 - DNA, 1015 bp, Cannabis sativa
gtaacatgtggcaagcatcatcattcaatacgaccctcgctgttagttagccaaattttgaggtcaatagtgtctgaccttttttggtttgttgatttttggttttgttgaagttgttggtcattcatttgtcattgatttcactatttttactccatcttgtcaaaattaatagttattttctgggtgttttcatgtttgtatggtggttatgttcgtgaatttggaagatggaggcatcgtagttgagtttctatgcgcaaagtataaatgaaaaaataatataaaaataacgaaaaatcgataataaaataacaagagtataatatacaaaatatatatgaagaccgcagtttatgtaaataaaattttaaaaactataaaaatatttaaaatttcgtacaatcatatttttataattttaaagtaaaaattacccaaaatatgagatttattttactgttttcttttttatggcatttttaaataaagcctttgtcatatgggctttctgttttgtgttcctttttatgggttttatgaaagccatatatttgttatatttgggtcatattcccatattttattcttttttttaaaaaaaaaaaaatttaagctacagctagtatagcatttgcatggaatagcttagctttgtactcattgtttcttacagttcaatcaatcccattgtcatttcatattctgagcaagaggttttctctcacttttactctctctcagcttctcttcgcttccccttagtttcagcttagggtttattcttttccttcatatttttcttgttcttcgtcttcaagcttcgacagtgctgccattgttgctgttttttcaagcttcgactagtgctgccgtgggttattcggttatggtcattttggagcccagttacttgtttaagtgaggtaagttttcagttgttcattatttttttgtaatgtctttagttttagtgattatagttcggtattgtgatgtttgttggttttttttt

SEQ ID NO: 105648 - DNA, 512 bp, Cannabis sativa
tttttgacgccaaatttggtgacagtgtaacactaaatttggtgttcccttagagatgctcttacttctgaaattactctaatggtatagcactcttcaaaaatactataattatgatctcacacattattatttaattttttagcaacaataattttttagttttaattttttattaaaaaaataatgatagcatcaatgctatagtagaataacatttttttccctccaatagtataacatctcaatattttgttacttcttgttcaaaaaaataaaaaaaatattttgtcacttcatctatccacctataagcaagtatccattcattttttgccattagagatgagtaatagttatataagccactaaggctagcttagtggtgagagagagatagaaaaaagagagaggtcatgagtttgaacccaaaatctttaacctattaagctattaatagattgtaaatacccatactaaaaaaaaagagtgataatgatacaaatggaaaa

SEQ ID NO: 105649 - DNA, 588 bp, Cannabis sativa
acaccgactactggtctgttccaggccccgttaccggaatcccgggtcgagatcttgttcactgtcacgggtatcggtttggttaaggtttaggtccaaggtcccatttcaaagtttgggttagggatcgagactggggtactgttctaggtccagaccttggttctgtgtccctagtctggttccatgtttgggtctgagttaaggttcgggttcaggtcctgagtccaggtttcggttgggatccgggtccggctcccaattcggctctaggtctgatttggagtacgggtcctagtccggttacggttctagatctacttccaatttcagttatgattcgaagtccaagtcctagttccagtcccggtcaactttcggttttttttccaactgtgggtcacagggtacaggttcgggtccactttttggtttgggactaggttcaggtccgggagtgggttggggtccttctcagggttcgggtccagtgctagatccctaatccagacaccgactacgagttttgtctaagccttggggccagatccagatcccaatctcgtgtgccagtctggttccatttct

SEQ ID NO: 105650 - DNA, 1458 bp, Cannabis sativa
  modified_base (1388)..(1401): a, c, t, g, unknown or other
gacacactctaaaacgtctttggtcagcacattgggccaagacaactaatctctccaaattgggcatataggcccaaatggcccataattccttataaaatggatgtgctcttgattggtgaagagtgagtgaggtgaaatgggtgtggctagtgtattgagagaatgtaagagtagtgttcatcaaacccttgcacactttgtttttctttgatatgaagattaaaggaatgggaagagcacaagtgaacataagaattcatggccattactacaaggtaagagtgctttttattatataactttgatgccttaaataagatgatattgtattgctttagattgagcataattgttaacgttaatctttccttttgtttgatggtcattatttttaacattgaatacttatttgttaaaagacaaaagtcattgaagtagaaatcatgagcacaaaatggattacttctcttaccaattgactataatacaaaattaccctaaacaaaaggagaataagccacaaaaaatagcacaaacgccataaaaggcatataaaccgtgaaaggcatcaaaatcattctgatgtgaaaattatgttatatttagcacaaaacaatcaataagtaaatatttcgtccaacttttccataataaataaaaaagcaagttataaagatgactctaaatacaccttaaaaaatatttttctaagtaaacatacataatgttatactttgtgtcaaatttaatataacggtaaacattcgccaaattttaaatagatttttatacatattgaaggaaaagtaaactctattttagcattgcatcaccaatttatatctctatactcttagaggtacataattttttattcaaaaattcaaatataaaagttgcatcttatttttatttttattgataaaacttgatgcaagttttgttatctatattttcagattaggtgacacttgtactttcaaggcccaaaatcaactcataggcctattcgttaggcccaaacaaacacaatgggccgacccataaagcagagtcggactacgactccaggttcaactataaccctatctcgacaaaattagatgtctttggtcccagaagggtaaatctcatccagagaggtgaagattcagagaaagacaaccagataccttcagggctagtcctggaggagtagtcgaagaggtgtttgggtattatcctacgtggcacccctctgacatcgaatcccaaagaatttaagaggtttgtcccctatgtcaaacctaggttaggcacacaacacaaaaagcaacataccttttgtgcaacgtccactactctgacatttactgttcacgatcatgttggaaatattttaccannnnnnnnnnnnnntaccatgtatgtttcattaacatcctaatatgaattctaaaacaatcaaataaacac

SEQ ID NO: 105651 - DNA, 900 bp, Cannabis sativa
taaatctttacttctatttggctaaataaaatttgagagaagattaaaactagaaaataataaaaagtgaaagaagaagcaattaaacaaataaaaaaaaaataacagtgaataaaagatagggctttcgatttcaattgtatctattgattatgacctaatatgattatcttcctattaccaatttctatgtaatagcaggtttactaaggtaatttatagtcttcttagatatataaatctcaattacatgtaaattttttactctcgtgataaattaaacatgcaacaggcattaaacacagaacccctataagctatctaaaccatataagtactctcgttctatattaaaattcagtttctatttcactatagcataattgacactcacttctcagatctcacatcaaaatcatagacagttaattggtgatcaggcaatataaagtaattaagtacgaatgaaatagaatacatagaaactgagagaaaataaatcatatcaaaaccataaaacgatgtcaaacaatatccatctagatcctaatcaagtgtttagctactcatgttcatggaagtaaaatcacacatattaacttaagaaaagagaagaaagaagaaaagaatactgaaaaaccctctgaagaatgccttcagcattgtagttgatctctaaaattcgtactctgtattctgctatttattccttccgaattgcttccccaaatcaattgaatttcactccttatatagcccttgagggactaaaaagatagaaaaatgcacatgctattcaacattgaattaggaaaccacactcaacccacgtgagaaaagaaaatattatgctgcaggagagcggcaggccgcggtgccctctttgttgggtcgtggccc

SEQ ID NO: 105652 - DNA, 673 bp, Cannabis sativa
tcgcaacaagaagaccttgtcaaagtcaaacaacaacaaggagaacctttaaaggattacatcctaaggttcatggccaaggctaccaaggtcaaaggtcttacaaaagaaggtcgatatacgaccatactagggggcatccttccactgagtgacttctggaaacatatctgaaggatcttgaccaacaacatgaaggagtttctcgagtgagctgacagtaccacgacttgccagaggtgcatgtaggggccaacacttctggtcaaacctctagtggtaaaaacactgggggaaagcgcaacaacaatagctctggaagaaatagtggcaaaaaagggaactacaacacttcttcaagaccacgaaactagaaagacaaggaggagaaatacacctacttcaccccttctgacggaggccatcttcatgaccactgagggaacggtcccatacaagaatccccctcccatcaaaagggagttgagtaagagggatatgtcaaaattctgtcagtttcacaacgacttcggccatgacaccaacaagtgtcaaattttgaagagggagatcgaattcctaatatggaagaacaattcccacttgtgtcgttatatgcagaatgactaaattcaggcacaaggtgctcaaaatggagatcgtatgccacctc

SEQ ID NO: 105653 - DNA, 965 bp, Cannabis sativa
agagcttctttagcatccatactctgtacctgcaacataggattttttgggagcttgttaaatggttttgcttctaacctttttttactcttgaaaacacaattattcgtgatagaataaatgaattgttatctcattaattttcattcatgctttaattcctactcatccttttgaatcaatgatttttttctattaagaaggttgggatgtatacataactttttaactttgtgagccatgaaatattgatcaaatgaatcatagtccacatgtatattttttttcttccaggaagttgtcttatttatttgttagcattcatcatatactaataagttttatctgtgattatgtgattaggcttttgtatgagatataaagtaatttggtttttgattgtatgtgtttagagcctaaatttgttgcttctgaaaattctaagctccatatttcttttgtgttttatattgtaaggttatggtgaatgtgtatataggattctaatagattatattttcgataagatttggtagatattaaggagttgttaaatttatgcagttcaataatttagttcgttgtagtgttgtttctactgtccaacacatatgatattggacactttgttctattattattaaaacatatatatatatattatatattacactctcttgattacaaagtaactatttcatcactgactgaaaaatattgttcttttctaataggactacttttaattgtggctgctatttctacttttaattgtaagtacgacacaaatgcacgaacaattagtacagatgctatgattaatcatattataattaatttattccttgtttaaaacccgacttatggtaatataaattcattgatgatgataaatatggtaatttcacaaattgaagataatattaatggtgggaactaagcttcaagtaatcattacaaagatg

SEQ ID NO: 105654 - DNA, 546 bp, Cannabis sativa
ctcctcactccaagatcaggttggttttgtgcattgttttcctatgccaccctggctgcagctgcctcccgttccaactcagtgtttcgttggtttgcctcctccagtcagcgcttaagatgacaattttccaattcgacaattggtacgtatcttgtgggataataggcaccatcatccatgggttgagcaccaccaacacctgtgttgggtacctcattccatgtttttggttttacgccactttcaagttgggtccttcttgaatgtgtggaccgtgtagattctaggttttggccaccttcatgttgagtccttcttgaacgcgtggactgcgtagatcgtgttgtccgtgaattgggaggcctccgtgagcccattagctcttttctaggatagtgagtagtcttttccggatgagtatcaacattttctccgttatcatctatggaaaaaagattttccttttggttaggagggttttttctaagctttttccacgtaggctctaaatgaaagcaccaaactgttaacacagatttttgt

SEQ ID NO: 105655 - DNA, 946 bp, Cannabis sativa
aaaatatgttccaaggcctggccaaccaaaaactcactgatctcgagctggaccgagcacgcggatcacccttctctctcgagatcaacgtcgtggagctacccctcaagtttaaaatgctgacctagaagatgtacacagggaaggaggatcccttatcacatcttaaatattttgaaattcaaatggatttacaaggggtacgaggtgatgtgcgatgtagagtattccctgctacactttcagaagctgcatagcagtggtattttaagttaccaccagaaggtttaattcatgaaaagccttctcctcggagttccatgcatagttctcttcttctccccaacttctgttacatttaaaagacatggtcgaagtgaaacaaagaccaggagagcctctcagagcctacataagcagattcatgacaaaagctacgaaagtagcaaggctaactgaagaagggaggctagcagccatactgggggcattgaagtactcggagaactatggaaggatatcaagaaaagttccctgtaggatctatagcagagtttttagaccggccaaatgggtttaccaagctcgaagaggccattctctgagcagatgttgaacctaggtcgggcaaaccacatgtccccttagcaggagcttctgttcagaacccacagtatcctagcagttcaactccgtgcagcaaaagatccaatatcaatggcagacaatgcaatggaaagaagggaaagttcgcaggcaaagccgaacaaacccctaaagaaaatgcttccaaattcactgccttttctatcttaactgacgacctagagacaatcaacatgcaacccaatctgtgatcccgtacaaaaaacctgctcccatgaaaaaggacataagcaagcgggatatgtccaaattttgtcattttcatggagactatggccac

SEQ ID NO: 105656 - DNA, 882 bp, Cannabis sativa
agcatgtcttctaagatctaaatagtcctctcggattgcccatccgtctgaggatgaaatgcagtgttaaactttaactgagtacccatagctcgatgcacactctcccataatctcaatgtaaacttcagatctctatccgaaacaatggactttgggacaccatgaagacgagcaatttctctgacatataactcagcatactggtcaatggagaaattcgtccgaacaggtagaaagtgcgctgactttgtaaacctgtccactatgacccacacagaatcaaagtgtcccttggttttaggcatacctaccacaaagtccatagcaatatcttcccatttccactctcgtatgttcaatcgctgcagcaaccctgtaggcctctgatgctcagccttaacttgctgacaggtaagacatcttgcaacatacttagcaatgtcattcttcatgcctggccagtagaacatggcctttaggtcttgatacattttcgttgaccctggatgaactgaataaggagtcgtatgagactcatccattatctctcttttgataccatcatccataggcacacaaacacgattttgaatcgcaacattcccgtttcatccacttaaaaatcactagtctttccagccgaaaccctatctcgggtttttaccaattctggatcttgcatttgcacttctttaattcgctctaaaagagtagattgcagggtaatattgctaactgccctacaaccaactcaatcatagctcgggtcatctaatttgctagttgatgggagatttgttttaccgtatttatctgactctgtccctttctgctcaaggcatcagcaaccacgttggctttaccagggtgataaaggat

SEQ ID NO: 105657 - DNA, 579 bp, Cannabis sativa
atttttttaattagattcaataagatgatgttaaatgcaatatatgtatgtttaatttttttaattaggtaatctattttttttttaatttttgaaatgaaatttgagattttgatctttaagaatttttttttagctattgctacattggtgtgtcatttgaatgtgattatatatatatatatgtatttttaaaatttttaaaattttttaatcaggtaacgtatttgataatccatatattgtaatttacttattcttaacaaaaactcacataactaaatttgagtatgtctatatatgagttagattcgtaaatttgatatataagttttttatttccaaactttacgaaaaatatggtatgtgaattcaatctatatatctatatatataaagaagaagtatgagtcggtgacatgacgctctagaatctctctaatagtgatatttgctctctccttaattctttaattttttaatcttttattaagtttataaattccttaaaacctatttatttatttttttgggaaattatcctatatactattttttaactttttttttttcaaattt

SEQ ID NO: 105658 - DNA, 772 bp, Cannabis sativa
ctaactaatcatataaacataataaaattcatgtggggtaagattattatatccacataattaattataatttatatttattatgtgactctgatccacttaatatatataattttatataattaaggatgttgtgcctactccctaattatttaaaattatgtgattcactagacaccaaagtataaactgaagataaaatttttactaaatctaaaattgataaaattagatgaaccttatggtagatttaattacacaattagtttaggaaaaatgaaagtttattatctatcttaaatttgtgataacactattttaaattaaatccttataaattcttgtggaataaattaagagaatttaacttaacatattatcctaattaattatataaacataataaaatctctacgcggtaaagttattatacatacataattaattacaagttatgtccattaaagtgaatattaattaatatataattttatataattaaagatgctatggctgttatttatatgaaattatatttttacaaagacattaggtattaggctctaccttaaagtaatttcattattgtaacaccctactagtttaggcgtgttatcgtgaatttatattaattgtgcagctcgttgctaatcaacgagtttattgaaaaattttgagtaattaaaaccttacttaattactattaatactaaaaataactaacgttatatatatttggtatcccgaatttaaaatatttacaactgattca

SEQ ID NO: 105659 - DNA, 682 bp, Cannabis sativa
acataaatccaaattaactaatttttaatgactgaaaatgagtgcatgtcaaagtttagcctaaataaaatagttataagtttaggggcaattacgtaataaacaaagaaaaacccttggtaattcttcgcctcttcttcccatttcacttcgttcttaatattagtctgataaacctcaccaacagtctcagccggaccatcaaaaaccgcggccatggattctctatctccatccaatggagcattaaggaagagagcgaagagaaaacggaatcagaaacacgacgctgaactcgagcaattcgactccctcccatggagctcgtcgttatctggcgatgaccctttctcttttgtcgttggctccaatgaactcgaaggaggtttgttcttcttcttattccactttcatactctagaaggaggaggatattgtaatgatacatttaattgttggaagtttcgattgcattagtagcttaacttttgctacggttatgtgaaaatcaaacgaaatcgttcgaaattatgtcgatgaaacagattgtgtagtaaaacgtttatgctttttaatttttatttatctatatgtatatatgtacaggttttctttcgcttgaagagattaatgaagccgaatatggtttggagatccctaaacctgagggaaatattaaaaa

SEQ ID NO: 105660 - DNA, 788 bp, Cannabis sativa
  modified_base (597)..(597): a, c, t, g, unknown or other
gagtttgcccctctgcggacctttcccttttgggaaatctgagcggacctttcacggatcctgcacctttttctttttccttgggatggaagtaggacttttccattggtttccttcagagggatatcgtatgggactaagctccctggacttatgcttctgagtgcttggtgaggactcttccggtgtttcctcaagtcctgcagggatggctttagggtgtatgtggatgcctgctgtctccatggctttttgcatggtcaccatcacctcttgcatccttttgttttgttctttttggacggtgatctcagcttcatgattaacagtcttttatcttaaaagcatcaattctgtgtaactgccttcgtcgtaggcgtcgtactcgtcaacgttttcctcgtattttccatcggtggcctcctctcgctcttcggaatccacgttgactcttgaggccacttcctcatcttcagggttttgagcgtcttgaggaggacggggctgacatgtgttgcgagtttccaccattgatgtttagcttacaaggttcttgtctacttctagatgcttccttcaactctcaatgaaagcacnaaaatgttgaccgaggttttcggcaaccaatttaataatatatatgagaaaactgtaggaagtctaatgcatgagattgttacgtggttggggcatgaatgagccttaggccacgagtctttcttatttatgagagtatttattacagagaatgttcttggtagtttttcctcttagttgctctctttaat

SEQ ID NO: 105661 - DNA, 514 bp, Cannabis sativa
caatgactctgtgagtaacataacaacctgggaagaactgcaaccgaatcagtttgctgatgagttttgtgcaaaaaatacctccatttgcagcatgaaagtattgtttctctttcttccaatattcttttggaagaatatcagggttcattatcgtgtatgatgctcctgtgtcaaaaaattctaccacttttatcagccctgcatattttattggaagaacttgcacagtgaggacaggggatggttgcatcatgtaaatagtagacatttgataacattttggagtgtctgaatcactccattgttcgagttcacaaagggattttgagttgaattcatcatctgtgtagaagattgactctatgtcgttttccttaatagacatcctagtcgtttgttggatatgtgatataagcttgactatttttcctttagggtactattttgcataatgcccctttttgccacacacaaaacatcaataagatttttttttatgaaagtcgagttt

SEQ ID NO: 105662 - DNA, 1066 bp, Cannabis sativa
tctattctacctctttcatatatatatatatgcaatatatacagtgtatatatgtgtattgtgcaacatataatcaatctcttttattgtcattgtattatttctacaattgagttatacatatcttgatttatcttccattgtaataattctctaacaatcaaaagcttagccctttccaatggaagaggagataaatcaagattttgagaatacaaagaataagagattttgtgtgaaagccattcataggtgagcatggtggtgtatattatgtgatttactattttatatgatagtaatatatataatatatatatgtgacatatatgtgattatatgtttgtatcatattaatatatatagtagtatataatatgatatttgaatttatatcatgttattatatgtatatatatgagatatataatatatatagcatgaatatatgtgttatatgtattatatatatgatgagatataatataatatacatatatattgtgagattaaatatgtagaaatacttattttctatatatttatatgagacatacatatataatatatattatgtgtatataatatatatcatgcatgtatattgaagtatataaatattatctatgtgtgaggtatgtaacatatataattgtgtaattaatatatatatatatattatgtgtatatgatatatatgtatattatagtatatgtgttatacatatatgaaatatgtaacatatgtatttgtgaaattaatattgatattatgtgtatgttacacataatgagattttattttgtaacatacatattatattaatgtatgagttatatagtatgataataatgttgacagtaatgtaatattatttattgctattgatgtggagattattatcatctatattgtgaataaagtgaatatttagaattttttttttcaatattgattttgagaaaagaaatagtaatacttatgagaagttacattctttgagaatttaaagtgataattatctcattttatgagataagaaaagtgaactatgagagttacact

SEQ ID NO: 105663 - DNA, 587 bp, Cannabis sativa
cgatagggtcgatgggtccgattgtgtccgatgtggaattcgatgggggtccgattgtgtaaatgatggtgatgtaaatgaggagtattttagggatatcataaaagttgtcatatcctataaatattagttattatttgattaggaatttttttttaaccaaatgtaagcataaaaaattaaatttccctttcaaaatatatataatttatttttttatatatataatttaaaataaaaataaatattattctatatatatatttttatcttttgaatttattattttttattttatttttattaatttattgttggagatataaaataataatatatttttttttattaattatgttaaaaaatattttttaataaatattaaataatttgatattaaaaagtgaaatataaaattaactatttagttcacacttttatatattgaatttaatatattatgcgaattaaggtggcgtttggttggagagaatgaaatggaaaggaaataatttttattctattcatttgtttgattacattttaaagtattggaatgacattccaataaaatgctctttccacca

SEQ ID NO: 105664 - DNA, 608 bp, Cannabis sativa
  modified_base (245)..(250): a, c, t, g, unknown or other
  modified_base (352)..(354): a, c, t, g, unknown or other
gttgtgcatcacttttctatgggccacgttgagagataaaatagttttcatgaactaacaatcattttaatcaaaatagtgaaaagatcacattttttatagtggtacccttttgtgaaatatggcccagacccatctcagaatattttttgccactagtcacaatgaattcgcactactaagtcatgaatataaagattggattcgcatcaaattttgttaaaatatccccctaattaaaaaannnnnntatatccttcttttaaaagtttttctttactcttgcactgttattgcactgttagttttctcttaaaatctcaccccacacatctcaaaaaatcatgaaatnnnacaagcacaaagccaagaccatagtgcatcacttttctgctagttatattaatagaaaaagtagttttcaagcagtaataatcattctaaatgaaatagttaaaattttacatttctaatagtggtacacctttgtgaaatgtggcccgaacccatctcgaagtattttttccccactaatcacaatgaatttgtactactaacatgtgaatatgaggattggtttaaagttaaattttgttaaaatgactcct

SEQ ID NO: 105665 - DNA, 502 bp, Cannabis sativa
tacactacagctaacttgattacatactatgtgtcacgggacccatagacactgccagtgatagtgtgagtgctacaaatggttgagtgtcactctgtagaaccgtagctcaaacgggttcagtgagttcgttaggagaatagttactctggtacaccacaactaacttgattacatactatgtgtcacgggacgggacccataaacaccgccagtgaaagtgtgagtactacgaatggttgagtgtcactcagtagaaccctaactcgattgggttcagtgagttctttacgagaatagtgactcccttaatctacatttgtagaatatcgagaaagtggttttaatttcgttactgtaatcctctagaattattataattaacatacctattgtcatatgattaaaagaaataaacatacaaattgcaaactcaattaatagagaaaaagtattgtatagtgtgtttattaattttggccgacatgtgtatttggacata

SEQ ID NO: 105666 - DNA, 528 bp, Cannabis sativa
tgttctctctctgcaatgcacgacagtgctactccggtcaccgtaggcaaaaatggaagttgtgggtggtctcgtcgagttctgaaggccaatacccttgagccacgaagccaccaccattgttccacctccgtgaagaagtgcaccagaactgcgagtgcacgcccgattgcttctgtgaagaagctccttgagctgatctaaaaattctatggaaatttaagtatttgtttttctattttgattatgtatctatatttttttttgtttttgattgttgttttaattataattttacaaaatggtttgaggtacctaataaattattaatttttgtgtatgtattttttctaaaaataaaattataaaagttattttgagaaaattatattattttttttagaaagatatttaatatggcactttttgtttgtcactatacctctaaaaataataataaagaataaaaaaaaagatatagtgacactttttgtgtgtagctgttactttttcagtctgacaaaattt

SEQ ID NO: 105667 - DNA, 1191 bp, Cannabis sativa
gagatctcggcttcaggaaatgtgatctgatgatgaggagaatagggtttgtgcagagatcaaggctctctacgtgcagacggtctttcttgtctatgtgtagccgatctttttttaagctatgtgtagacggtctttctctctcatcttctgcttaggagaatgacttaatggtttgcccctagtagcatttttgtaaagacaagtttctaaccagtcttaggtttttcttatcttaaatgcctcgtactgttttcatttgaacttaatacaattgtattttcttgtgttttgattcacaatgtaaacaactacattttgatcgaatatacagcactttagggtttctccattgcttgtaatcttcttgtttaagtagttagtaatctaccaaactttatgatttttgagcagttgtcaattctgcctcacaattgctgttataatctcccttgagcaaacttaaatatactttaaggatttatcaatttgtgtatttttaatttgctcgtatgaatagttatattatctatctattttctaggtttaagaacttttatcaaggcgtcaagatgcctcgtttagtactttcctagcttgcgagaaccgttagtattcagttttatacgcgagttataacttttgattttcctctcccgttagataggttataaatcaaaaattatagttgtttgatcccttctttgtcaaaaaggtttgatcaaggtgttataacgatttgacccctttctcgtcaaaaaggtttggtcagggagttatcacggttcaactctacttttgttaaagagatttagtcgagaacctttgcatttaaaaaaattgaaatgatgggttggcattatacaatgtatttcgagatgaattcccgttagtaatacataaatgctccttaagtaatttttaatgaatgaaactttgtaattacttaatataaatgatttactttattcataactgaagtttaaagtttacgtcataatgcgagttacatcatttatttattgatggtagggtcgcaaatgttctacgttccagtagttctttattagcgagccatcaagtcgaacgaatttatagactctaactccaactactgcttcgatgacatatggaccctcccagttcgggttaaacactcatactgatgcgtctctcgtatttgcaaagact

SEQ ID NO: 105668 - DNA, 1415 bp, Cannabis sativa
cttacacttattctcgagctaagtttgctgcctccaagaacacttccatgtccaacaccatgagggcagaagtggacttggccaggaaggacgctgatgaagtcagggttcaactcggagccgtccaaatggaactaggtgaagtcaacaaaaagcttcttgctgctgagaagaaggtggccgagctgaccaaggatttagaggcttctgaccaacttgaagttgccatgacctccttgtcccaagaagtgaacaacattcaggaagaaagggaggttcttcgaactgtcttctgtaggttggaagcagagaaaaagtccaaggaggaggagcttaacgctgaagtagaaaggctcaaagggtaggtaaatgccttagagatagctggtctcgagattttttacgacttttggaaggctaatcctcaggcaaattttgattacctgggcgatgccaaagacatgtatctcgagtactgtgcttcccaggtggcctatggagagtccgaggcgaccacttctactcctggccagaacgttgacatccccccgcccagacaacagatcctccagctcctaccggcctagaagacccgaacaaggagcctgggactccagctgtctgaacacttctctttttatctttctttttttttatatttgtccgaccataaggcctttttaagacaaagtgaccggccaagcggtttttaaacttggaattatttttcatttttccaaacaacagctgaccaggcagcttttaatctcagttttacgtacttttgttatctttaatgaatttcatcctctatttataatcatcgtgcaactatgtttgttttattttttaccaaatgctttgtccaggtttaggtgccccccaagtgacggagcagacttatgactcttggtcacttattttttttttttgcaagtatactcttttgtctgttcgaggttttgggttcgaccaaaccttttgtacgcactgaatggtaaattaacaacacgctagtaaatttgactcaatttgaattttgacataaacatctttattcattattgatcgaaaatgtgtttgttaccgtagtaacttacatcatagctatttgatctaatctgatattttagcttaacatgaaataaaacaaattgcagaaattagaaattgtactttaaatgatggtcatccgacttgagtacttcgtaatttcatctgaacctttgggcatggtccgcctagaaggccattcacttaagagtaaatgttctttttgtttagtacttgaggtggtcatccggcctggtacttctattggtagtattttcttttttgttccccattccaatatcgtggtactagaacaagttgcattttttcatcatacttacccaatttgtatgcccctgatt

SEQ ID NO: 105669 - DNA, 1111 bp, Cannabis sativa
gagttttcgttatattcttaagaatatcactctagattttacctttgcaaagaaatttgaaatgtttgagaaatttcataaatttctagcaatgtttaaaaacattaacgtaagtggttaccgatcttgcaaactgataggggtggagaaatatttggtggatatccagttcaaaaatcattaagttgaattttgaattctatccaaacttacctcccaagaaatttgatttgcatattgatgatagtataaggtttatgattagttactagcagctgcctaagtccttctaggaaaataccctagtgataggaaaattttagaattatggaattgttgtgtacttagtgtaaaccattactattcatggatgtcctaattgtgaacttaacaaagctagaattgttaactaaggtttgcatgtttgatagctattctgagtgattagggatggaccatcctattgtcattaagataagaaagtctttgtttcaacaaatactatttttcttagagaaatgactaagtctacaaacaaagtagcaaagttgagaagatattttttttcttcattccaaaagtgttctatcatcttattctaaataagatgatcccactacctctgttgtcttgacacaaccgaagacgataataccatttagattcttagacagatcgtcacggtacctcgtcgtagtgggagggtttcaaggaactcaccttgttatgacttggaagaaacttgtgacgaaatcaattgttagtttaaacaagtaatggattgtcagaataagaaaataagaagcaaagccaagagacctatggttaaaaccattcatatggagttaacaaaagtttttctattacaaggacaagaaagaaaattttgaaaataagtctattcaatggacctaacaaagcttctagttccaagtattataggtttgagattatctaaacctatggtttgtggtctacctggttatttaactactttagtgtgagcaacttactttgtaagatgctggtgcattttctaatggcaatctatagaagcttctcgacttctagacatagatttatttatctacggaaaagtttcaactattcc

SEQ ID NO: 105670 - DNA, 890 bp, Cannabis sativa
gacccaagtcggtgtaaacacccgaacctggaaccatttccaaaccaggacccaaataaaaactcggacccgagacagaaattggaacaagaaccgaaatcaggaccttggaataggaattggacctggaaccaaaactggatctagacgcgaaaccgaacacggacccaaacccagaccgtgatcgaactcgaacccaaacccaaacccggacccagacttgtgccagtacctacgacccaggacccgaaaccttaaccataacccaaactcataccagaacccggacctaaagctagacctagacacagaccaaaacccggacctagacatggactgaaacccagacccagagccaaacccacacccagacccagacccggactcatactcgaactcggactcggacctatatcaggactgcgacccagaccctgactaggaccgaggcctgaacctggactaggactagaactcggactgggactgggaccgggacccgggactcgggacccgggacccgatacagagacataggacctgagaacctaaccgtgacccagacacagactaggccaagacgcgagacctgcactcggacttggatcctaacccggaaacagtcttgtacccagaccgggaccgagacccggacctagacctagacctaggacccgatcctggacccagactcggacctagatagggatctggatacgaacctggactcgaacccagacccagacccagaccgggatcgaaactcgagacctagatccagacccagaccgtgacccagacccagacctggacccgcacctgggactggaactcggacctggacccgaacccagacccaaactaggatttggacctaaatctagactcgg

SEQ ID NO: 105671 - DNA, 925 bp, Cannabis sativa
tatatatatataaatatattttcagtacaagagtatatgctaaaataaaatacgacattagaagcgtatatgtaatcatgtttagtcacgaagccgaacaaattttaaattgttacaataaaatattctgaagaggtatgattttaatatacacatatttatttatttattatacactacaataattaataattgaagattaatactaatttttataatttatttttcaagaaaataataaatatatattgaaaatatttttaatgaaatgacaactaaatgttagatattataaatttaagttgatcaagagatgaagactcaaaagtacaagaatttcaatgtatgctatattaaatgtaaaacaagaagaagttactaaatcgtttaaattataaattacatataaataactaatattttaagaattagaataacaaccttatgtaatattttaaaataattaaacatctaatttgaagaaataaaatttatgacttaggtaatatgtaaaataatactttcggtaaataaatatatacaataaaatttataaataatatctatattattatatcaaatattttaaatagaaaaaatacatttacaattgagatcagtggtggagggaagggggcatgtggggtcatttgccccccttaattttttattcataaattttttttagtattttatattttgaccccataaaaataatttttttcatctttgtccttacatatttttatatttatccccataaagttatatttttcactttaattctcacgtatatttctttttattctcatagaatttgtattttttttcaataaaaattatatttttcattaatgcttcaaaaaaaaaaaattttttttgccccaactaaaatgttaggctggcatctcattgagatgcatcc

SEQ ID NO: 105672 - DNA, 968 bp, Cannabis sativa
ttacctcattttgttcattttacccaaatcaatcttttccttatatttacaaatatattagctagctatcaacatgatccgcagggggctttggttacacaatttggttccatcttttagagttggtgcttcttcctcttcctccactttattcaaggttataaatttttgctcatctttctcttactttttactttctattacttggtttggttctcaagatctttttgtacttataataataataataatcattatttaaaaaatgatcataaaatagtcaaagactatgtgatagtttgtttcttgttttacttaagagaaaatgctaattatattactactctttctttgttgtaattgttttgcagctcggatatccttacaataactcagcaccttattatgtggaatcctcaaaacaatcatgtgaattatccagtaagaggtatacaatattatgtatatataatgtattatataatattatatcaaataatattatatgtcataatattttgtcatagtaatatatttggtattattaagttattaacttacatgtctatacataatacctatttatattaatataaaggaagtacaaaatattggtgatatgctaatcttcttccattttcaattatctttaatttagctctcaaaagatcactattcctattaatatgttaatatataaaaaatatgatatacaactctatttaatataatattatacaatgtaatacaatttaataaagtgtatcaaataaactaataaatatatatatatacatatcttaaaaaatatgagataattaattagaaagaaggattaatataatttaatagtttgacaaatctcctcacaaaaagaggtcccaaattatatatagggtaaatattattttggactctgtgtttcgcaaaaattattaattagaccatttattttgttaaatgacaaa

SEQ ID NO: 105673 - DNA, 1348 bp, Cannabis sativa
cgacacaaaaagtttaaaaaaaaaattatgtaaacttatgtgtcaagttgtaaccaacacaataatctaattagcttcggttataatttgaagctaagttttttgcttcattccaaaactggcgctaatgtagcgtactttttgcttcggttgaaagtttgcgtcagtttagaaatgaagcaaataacttgactatttgcgtctgctgttattacgtcggtttacacaaccgacacaaaaagtttttgtgtcattttacaactgaagcaaaaagtcatttttgtagtagtgtcccagaccctgtctggatgtaccactgtaaacaacgaacttttctcgatctgatggcaaagctaacacaggagcttttatcaaccgttgcttcaactcctgaaaacttgcttcacatttgtctgaccatacaaaatgctgatttttcttagttaactcggttaatggcatagagattttagagaatcccttgacggcatgtcgataatacaagctaaaccaaggaaactttgaaattttgtcacagattttggcctcggccaattcttcactaacttgatcttgcttggaacaaccataattccattctttccgacagtatgccttagaaaagatatctcaaacaacccaatttcacactttttgaactttgcatacaacttataatccatgagtcgttgcaataccattcgaagatgatgctcttgctcctcttttgactgagagttcacaaggatgtcatcgataaacacgataatgcagttatcgaggaaatccttgactactctattcatgagatccataaaagctgcaggagcattagtcaatccgaatgacatcaccagaaactcaatgtgccaacatctggttcggaacgcattctttggtatttcttcttcccatattctgagttgatgatagccagatcgcgggtcaatctttgaaaacaccgtctttccatgaagctgatcaaataaattgtcaattctgggtaacggatacttattcttaatcgtcaacttgattagctttcgataatcaatacacattctgagggaaccgtctttctttttcacaaacagaactggagcttcccagggcgatatcaagcatcccctgaagctgtaacttaagctccttgagttatgttggagccatcctatacgaagctttagaaacaggttcggctctaggttccaaatcaatcacaaagtctactactcgttcaagcggtaatctcggcaactcctcaagaaataatttaaattattttcaaaaaaaaattaattaaataaaaaaattaagtctcttgaactaatcatcttaatttgaaaaa

SEQ ID NO: 105674 - DNA, 586 bp, Cannabis sativa
ttttataaaaagacagtatttttgaaaaataaaattgtatgacaataaaattgtaaatttttacctaaaatccaatatttttgtaaaaatctaattgtttataaggggcctaatttttaaaattagaacagagcctccaaaatgtttgagaccgccctggttggtaatgatccaaaggaagtagtgagagagacagagagaaaagttaggtttttttttctaattttatttaattaaattgatttttttttttcaaagaataaaaactttaatgtgtaatagccaaataagttggtataactttaaagtcaatttttagataggcagtttaggttgacgatatgtgtcccaataaattataactctctaaaatcatttaacatataggcaagttagattatttttaatgaatgatgtaaaagttatgctatgtataatataataaataaatttgtttaatatttaatatagaaactagaaccacacacctattaattaaaaagaaaaattgttgtcacttttcacaaaaagtttagagtaatttgcggcataaatacttaagttttatgccgagtagcagataaat

SEQ ID NO: 105675 - DNA, 753 bp, Cannabis sativa
tatatagtgtgtaaaaacttgcaaatgttccacctccattgtatttcttggttggatcggatgtgtaaacaagtgcatgctattatattcaaattcaaaatataattatatttcaattatagagtatgccatttaatttgttaaaacactatgtaaatctaaaatatgcttacatgaaaagtaggaggagaattaattcttgaagtatatgactttgtaaataatttggctctgataagatcttccttggtaattcttcttattggaatgaacccagctggacatttttcaccttttaacccattatttatcgatacttgtttcacattttttggaggtttgttttccctaaccatcggattgggatgagaagaaggtcccatctataccacaaatactcatgtttattcactatggttttagaaaaataaaaaataatgagctattagagaagtaattatttgagaaattaaaaacatacttgaaaatcatatttgtgattcttcaacaaaggatgatcaaatgctggttgttcgtaaaaatcaatacaatcataaatatctccatgttgtgtctgtacatgacacaaaacaagttagataagtaggagatgaagattaaattaataataatgaaagaaaaaaaatacttttatagttttgattgatgatttgttcagtcgctcaagttgattctctatttcaagaagttcatctcttgataattttactgattgttcttgagatttgcaat

SEQ ID NO: 105676 - DNA, 1024 bp, Cannabis sativa
  modified_base (981)..(997): a, c, t, g, unknown or other
aataatttttttatgaaaaaaatgtttaagtaacatatatttacacatgcatttgcatgtgacttacgcctagtatatatatatacagtgacggacctagtagtattaatatggggtatagcccctactaataaaaatattgtcttttaaaaaattaaatgtttttttttaatttaataattatagactaaaataaaaaaagcctctataaaattaaataaatttagcaataataattataatataggtataaatattttttaataataaataaacctttacaaagaaaaatttttgagttcgtcactatatatatataaatatatatatatatatatatataagagcacttctcattaagtattatctcattgggtattttctattgatgttatttactacaataatttaactttaaatattaaattattagattttgatctaataacaaataataaaagaaaaaattaagtttctatgcttaatttagctacttaatttaaaaaaatattaaaaaatatttttttacactatataaaaaaatatgtttatataaaaaaatatttaaatcaagttcaattttttttgtcttttttgtttattatttttttcagttgatggaacgatctcagcccatataatgtaaaagttagatatgttaattaaaaaattaagtataaaaacttaaattttcctaataatatctatttatgggtaatacccatttagcaaaggagcattgccaactttcgacgagaaaaatccacacaaccacccgttgtggtgaacggtgatgctaggacaagagaagcacatccctttgggtaaaaccctagtctagtctttatgtcaacaacactccgaaagctattgagccattgtgcattggagccaggacgcctgaatagaaagccacgagcacacatcgagatctgaaaaaatagaagagaaacacaactctatgttggatattattttacnnnnnnnnnnnnnnnnntcataagtatgttgattaacaccctaa

SEQ ID NO: 105677 - DNA, 1339 bp, Cannabis sativa
tatatatatatatttatagtatatttattgtacttatagtaactatttaggtaaatactattttggatcccatgttttgtaaaagttactaaattgaccatttgttttattaaataataaaatggaccatgtattttttaaaattgtacaaacaagaccctgagctcactttttaacaattttattttaatataaccaactttaagaccatttttaacaagaacagatacagaaaatgtaactagttttgtcataacatctttagatcggattataattaagttttattttgacaaagtatcagttcagggtgtcatttgtacaattttaaaaaatacaaggttcattttttcatttaacaaaacagagggtcaaattaaaaacttttgcaaaatacagggtccaaaattatatttaccctaagtatttctacaaaattttgaataatttataagcatttaaaatagtggttcgatcggtgcgtaacgtccttggtcattggagtgttgctcaatctcaaaagttgggtctgttgttagtttttgaggctgataatggtagtgagcagtggcgtaaactagagttgcataagatcacggttaacatggatggtaccatttttgattccaaacatagatttggtttggttccgtggcttgtggtatggacggcaagctaattgaggtaatctccagctgtcggcttggttcggttaagcctaaaatcgctaagttgattagggtgggagaagctttaagttggatcaaacgaaagggtttgtctgatgtgattattgagtcagatgctttgatggtggttcaggctgttaataactccattcaaatgccatctcagtttgggttattggtgaatgattgtcggttgttgatcttctctaaataatgtttctttactgtttgttaagcgatctataaataagactactcattgtgttacttgaaagtcttgttttatgtcagattatatctttaatgactttaatgctttttctgctcttaaatttattttacttgctcaaaattattaatgaaagattttccttggttaaaaagaaaataaatagtgcacacatataaaagccaaaactaagtacataacttcattataaaatcaattgttattgtgttacaattctttcttaaaaatagacataaaaaaaaagtggcactatcactataaaaatcccctatatataataaaaatatatataactgaatttaaaataaaataaatttaattatataacccatcacccatgtcacacttggtaccttcaaaagcataagaaacttgcccttttccatccatggagtttaaa

SEQ ID NO: 105678 - DNA, 526 bp, Cannabis sativa
aacgtaatatatggattacatataaacatgaatagggttatgcgagcaaggcataatcaagttagactcggtaactataaacgagataaacttttctaaggccttaatgtaaatagacgcatgagtgtaacatgtaggtctatgttacatagacataaatagacgtgtgagtgtaacacgtgggtctatgccacatagacatatatagacgtgtgagcgtaacacgcaggtttatatcaaatagagaaatagtgcggtggcaccattaattatgtgttatatatatagagagattaagggttgtgcgttcaaggcataatcaggttggactcggtaactataaccgagataaaccctactaaggtcttattgtatctagacgtgtgagcgtaacacgtgggtctacgtcacatagacataattgggtgtgtgagcgtaacaggtctatgttaaatagacaaatatgaatggcattattatatatgtgctatgtttattataattgctaatagtatttactgtcttg

SEQ ID NO: 105679 - DNA, 995 bp, Cannabis sativa
  modified_base (291)..(298): a, c, t, g, unknown or other
  modified_base (365)..(382): a, c, t, g, unknown or other
  modified_base (964)..(969): a, c, t, g, unknown or other
tagtataattacatcttatataattattggtattttaaataaagtgcacacacgtggcgtccctgttggacagggcgttacaaaacgtgttaaaactagtggtgttttactataaaaaaaaatcttatttttagttacaacaaaatttgtgactaaagataaaaaagttatggctaattgtaaattattattattgtattgtgactaaaagctccgtggccaaaagtattagtcacaagaattacaatttttcgtaactaaatgtgtttttagtcacaatatttgttgtgnnnnnnnntaaattagtgataacttgtaactaaatactatattttagtcaaaagtaattttttgttgtgactaannnnnnnnnnnnnnnnnnaaaaatttatgttatgactaaaaagttgttactaaaaataacaattttttgtagtgtttagtattttctcgatatatcgcgttacgattagttagcgatactgcctaaaagctattatattaaattatataggatcagatacttagttagactaatatcgatattgatacataatagggcgctaaatactactgataccctttagcatttcactttttgaatcagtgaggattaagctaaactaaatggaaaataaatggagacacaaagtggatgatatgattttattgcacaaatatctattttcgttttcaaggtttaattattgactttgaaatatgcaataacctaaactaagctataattaattgtttggcaaggaagaattatactttgatattattgcatgacaatgagatcgcaggggctgcaaaaatgtcaaaattttaaatgtgaaattagcatacgatatacaatccgcatattattacagggttgctttagccagatcaatctacaatttctatcttaattcaattggtaaaaatttgatgtgtgtgcatatatctttatatattaaannnnnntatctaacggcatttcttggtttaac

SEQ ID NO: 105680 - DNA, 959 bp, Cannabis sativa
taagaaggatatataatttaaattttcatagataatcttggaaaaaaatgtacatatatattatagataacgtttaagtaactcagtgatttagtttcaattcctgccccaaagaatgtaatatagttagaatcaaattttgattattgtattcaaaaaaaaaaaaaagagatgataaggttataatggtaagaaatcagttgatatggtactatataattgcttgaagaaaaaagattttgaaggcattttctgcaaaagctctgtggtaactgcttaaagcagtgttactgcgttgagtgacagagtatgttccaaaataaatttatttattttttttatttttttagaaaagaccattatataaatgaaacattaaattacataataataataatattcttccaaccaagaagaatctgtattcattataagaacaaatttagctaacacacgagctttagtatttgcagatcgataatcatgtgagataagtagtcgtgaaaaatcggatacaagaagtgggatatcatttaagatgtcataaaaagcagaacgatattcatccatttgttgccgtccttaaactacaatgagagagtccgttttaacaaagtggacatccacgttacaacgaaggagccattgtaggctgtggacaattgctaagacttccatttcttcatatttaaaattacaagaaattgattatatgaaagaagcaacaatgttgcccgttacactattttttgtttgtttttatcatgatttacttatttttgtttttactattaaagtactatttcctagttttgtgaaacaactctcgtcaacatttcgtttttatgactactaaatttaccttattgatgaattccttcgaaagggtaaataccattttggaccatgtgttttgcaaaagttacagattggactctgtattttgttaaatgacaaaa

SEQ ID NO: 105681 - DNA, 1435 bp, Cannabis sativa
  modified_base (33)..(70): a, c, t, g, unknown or other
  modified_base (144)..(148): a, c, t, g, unknown or other
tttttagttaaatttttttttcatggtcatgtnnnnnnnnnnnnnnnnnnnnnnnnnnnnnnnnnnnnnnaaattcgaaaaagtttaacatgccgaaaactgagttcaaacattgtgtcgcacgcgtgactattttattttatnnnnntgtaaaatagactgtttgaattttattttctatattgtaaattattctgaatttctcaaaattttgtaggatatcttaaatagctataaggtacatgaatatgaaaaaaaaattaaattaaaaaattcttctggattctgaaataagtagagggtgcatcagtacatctcttgtaaaggggtgcattctagaatcacccttaattatatatgtcatataaacataatatttgtaaaatgattttctcttgccataatatctaaataataaagtagacaaccttgaagatgttgaaacataactgcagcgtttcccactctcttgatgaaactagctctattaaggtggctgatacccaacgcacccgcaaggacacatgagtttcatcaattggaatgtttgtgaaatagggagcaactgagcgttctgaaatctctctctcttagtgaagcaatgtaaatcaatccttttgtatgttatggagattaaactcttagttggtgttgtaaaaatgtttaagaataaacttaagtttcttaataatggtcttgaagtctctagagttggctttagtggcggtttactttttccctggactaatgacattgatgtaactttgtttttcctataatataaatcattttaactgctacatcaatttctccaataattactttgtttcttttacagtcttttactgtgctcctaatcattatcatcgcactcatacttggcaactgttgcatcacattggtgttaatgttggtaccactctctagctcctgatgggggactttaatgatttccttacaacctttgataatgttggaggcgcttctgatgctgatccttcgtctcaatttagattgttcttggacacttttactcttcacatacactattcctagatatggtagtccttacacttagaccaacatataatctcagcttactcacacgcaagaacaattaatttggggcatttctaaccttgcatgggactctttatagccccaagttcatctttatcatggtgattactttggctctaatcaccgtgccctcattctttctcttcgtggtcgcacttagaataacagttagtgaccatctcgtttccattttgacaagacatggcttactgaggatggctttgaagattgtatatgtaatgcttaattggtgctctgctcctatcatgcatgttcacgatcctattgaaaatatttcccttatgctcactaagtgtgaatccacactccaatcttggaagaaaacccttggccc

SEQ ID NO: 105682 - DNA, 511 bp, Cannabis sativa
aaattaattaattaaaattaaatacaaattataccatcaatgcctattaaagcaaaagcatcgcccaaagtgttatctatattatttttctaacaatggaaaagggaataatatatagctagtgctagtataattaattaaataaataaaaatcatgctactttcatttatatcttcacatgtcacaacacaacttttatatgatataaattatatattattcttgttctttgtgttctctaataaatatataaaaataattaaattctctagctcttgtggccaatttatacctttatacaatgggaataataataaataaataaataaataaaaagtatatgttacataaataaaagttggtataagctactccaaaagcaattattaataatatggaacaaacaaaatgaattctttttagaagtatataatatccttctttactatatagtgataattatttttattaattaataatatattaaaattacgtttaagtgatgattct

SEQ ID NO: 105683 - DNA, 510 bp, Cannabis sativa
tttttaagttaatttgaattatttttatataggtatttattttaaaaaaataatgtattattcatgtaaagatacatataatatatattaatgtaatatgaatactattgaccacttttcttatcttattattaacgtatgtacataaattgtgaaaacagaagcattgagtgtaactttttataaaaatattagtcttactagctccatatttaaatttaaaatttacatgttaatgtatctttcctcattttttttttaaataaatatttatataaaaataattcaaattaattttagaaaaaaataataatcattacaattaaaaattaatacattttttaatttattaatagggaaaaaaatagaaaaattccaaaaagggaaaaatattacaaaattacgggccgacccattcaacatttatacagcccacgatgaaaaaattacaaaaatatcacctggtctataccttaagccgcacggaatgaatggagaagatgaagatac

SEQ ID NO: 105684 - DNA, 540 bp, Cannabis sativa
tccatggtaatacacatatgactattgctttctcgatagccttaattacaagaaatgtaaggataaaacagaataacagatccaattacatgatgcaattcccatatgaatgatattctatttttgaggtgataatgagaaacgattacaaaaatatccaggcctttctctatgacaagcatgtatatatcttattgtcaaaaaccgaattataatattatgttggtataataaaattctaaactcttttagaacccaatgatatatgtaatacctggatcatgagggaacttgcatcaggatcaggagtattgatttgagcaatactcttcaaagtaacagaatttccaaagtacaatatgtagataaacatcgatgaaaagaatactacaaataaacaaatgatgaaaagaaagacaaacctggcttagagagcacaatagaataaaaaaggggtaaagactacgttgaagattcttcgatcagttaagcaacttacaaaaaccccctcgtctcattcataccccatcccatatctat

SEQ ID NO: 105685 - DNA, 525 bp, Cannabis sativa
aaacatgcctaaggtgatcaatctcaaacatgaaattaagctcaaatatagataaattcacaatcaagaaagaagaaatagtaattattattaactcaagaaataatgtcaatcaacagtcatcatctccccaaatatgagtttatgtggaggtaatgaaatagaatgtaatggaaaagaaacaatttttattctattcttttgtttggttgcatattatataatattagaatgtcattccaatggaatggccttttggtggaatgtctattccatttcaaaatagaaagaaagaccattttaatgcatgatgagaaaaaatttaataatttatttatcaatttttttatgtattttaaattttattccatttcattcatattcaccattcccattcctatgttttcattcctcccaaccaaacgtcaccttagttcataatcaccataatcaaatcccacatagtcaaatttaaaacaaaaaatatcgtagaaattaaacagagaagaaagaactggttggaga

SEQ ID NO: 105686 - DNA, 617 bp, Cannabis sativa
  modified_base (174)..(177): a, c, t, g, unknown or other
  modified_base (233)..(237): a, c, t, g, unknown or other
aggcctcatacttttgttttggtattgacagtataaaacaaaaaaaaaaagggaggacagtataaatgtaaattctaccgtgtggcagtaaaatcgaaaagtattacctcaaattcagtatttttgtaaaatgcccaataaaatatcacccatgatagttttatttaggcccannnngtattgggcttattcaatgaataagaattatttaaataaaggttaaattcctctcnnnnnggccttgtgtgagagttaggaggtcattagtagagggtacgacatactgaacccaaccctccctcacatgaacaacccgattgtgaatgtccatttcccttatttaaattattgtattaggctaattatactagtttaacctaatttaaaattgaattagcaacataattaattttgaaataaataaaattaatttttcaatggattattttaaaattaatttagaaaaatacactaataaagaaaagattctagatagtgaattttagtaactaatttatattttctaatgatttaattaagtaaaaaattatatttaagttgaaaattaatttgctaattaattttagaccaatttaaattaggatatttttcttaga

SEQ ID NO: 105687 - DNA, 559 bp, Cannabis sativa
caacaaaacggagtaaaaaaaaaacatcccaccctgactttgtagatttgtaaatttttttgcttaagttcgagcttgagattttaccctatatttggaaattagattttagaaccaaaaaaatactactataaaaaaagtctttagaagcaattattttagctgataattaaaaaaaggaagttaaggcatcgacatagtgagaagcattagtaaaggacatatgtcattgcttatttgataataattgatgtcatagatacacgctttggctaacatgtgttacctgagaaattagaggcccaaggtgacataaaattatggggttctttaattttttttttcttttgaaaaagaataaaagaaaattaacctttaaaaaaatttcacataattaattatataaatgtgactcgtcttttattttgttgtagatcacgaaagctttgattgtgaatgaatgattaaccattaagtaggatgagaagatagcagtctaaaaacgaatgggagagttgaatgtttaagaaaaaagtgataacctaatttctagaaagtt

SEQ ID NO: 105688 - DNA, 512 bp, Cannabis sativa
  modified_base (296)..(297): a, c, t, g, unknown or other
aacgatttctccgctaaaagcggtggtcggagttaaaccaccacctttttttaaaataggttcgggtacagtgtaaatgggtgaaaaaacaaaactgttttagcgtatgggattagatattgaaaatagaaacttttaagacaaaaatgaggtgaaatggtgaagaaatgagagagatatgtgggtttttagaggtggttggcgagggttttcgtgggtttttcgtgggtttctctctggtgtaagtggctgggtaggctggagaagaataagtgaggaagaagaagacgatgcannggttattaaggggagaccctatgccgtcggttcttagcaaaaaaccgatgacataggtgcacacgtgtcaataaagtgtgcacctatgccgtcggttctttgctaggaactgacgacatagggtctcctagaaacccttaaaaaatcccaatttccaaccgacgggatagggtttactactatatatacctacggtttttaccaaaaaaccgcct

SEQ ID NO: 105689 - DNA, 580 bp, Cannabis sativa
catgtgtcacctcttctgaaacacaaataacagaaggtggttaatttatttttaagaaaacatgttctaggtagttcaataattagattatttattgaaatacgtgttagtaaataaaatatgggcaaaatatatctaacattaattagagttcgagaatagactcatttattatgttttgtttgttagaaaattaaaagtctcttaaaccctagctttctctatagtagggaaaaacctcaaccctatttctctctcaaaattcgcccaacacttgtgaattgagtattgtccactctaatgtatattgatacctaagacactgaggaagactataaagaattaagttacatttatgagatttgaagatcaattaaagttcttgattataccctcctatataaatgatgcaagggttagaaaatttgaagggtggagtctttattttaccacgttaccacggtaagtattcttatacttaaggtcactactataaaaatagatttcctgacgtttttaaatagtcgtttaaagtattcccgtcagtttctattatcgtcgcctatacgaccgtcgtaaa

SEQ ID NO: 105690 - DNA, 608 bp, Cannabis sativa
cataagataattcttatcaaaagtttccttaaccaaatgagagaaggaatctttccttagaagaaaagagtaattagaggcacaaaatcaatgtaataaaataaatttaaatgcatgagaaaactacatattaattaaaaaatattttgacaactaatttgtcaaaaaaaagactttacgatctcttcttttgacacttaagataatcaaaatatttttaattaacaaaaacctacaaaacaaaggtagcaaacaagcatataagctctccctgagaagcacaacattaaactaaaataaaagactaactttgaccaaagttgaatagtatggcctaaaaatttaaaaaataaaattatagtttcaaacttaactaatcaaataagtaaccaaatgtgtatgagaaaaaaaaaatttatttgaaagtattttaattaataaaaaataactaattgatatattatttaaaacttgcaaggtactgaaattttaagaagcgattttttctattttcggtatttattttggatttcggtatttatgctgatgtggcacatcattttttgaaaatattattgtaaataaaacctattttaggtataatatta

SEQ ID NO: 105691 - DNA, 955 bp, Cannabis sativa
aaatttttaaaaggacaaaaaactttgagcctatagaaacttaaactgtgagagtttgtgttactattgtcttaacaagttttttttttttttgataaaaatactcagtcatcataaattaagggaagtcatttacaataacagattacactggaggaggaaaattttcaataaaaaataagcctcatccaactctaaagaatacttagccaacccatgtgctgccatattggtagtacatttatatgtataatagtagctttaaggagaaaggataaaagattagaaatattaataattaaatctttaaaagtagaaattacattaaagtgttcatttaaagtagtagaaaccattaaagcatctgtctctatgtgtgtgattggcaagcccatttgaagaacccaattcagactatggaaaacaactttcgctttcatttcatgagaggcaaagttacccataatcaacttgaagagagcaacaaccgcagtgccatatgagtcacgaaccatggctccaactccaatgatattctttgtcacatctagagttgcatctatgtttaattttagttcacctggtggagggggaagccttggtacatgaggatgggtaaaggatggcaatagtatatgctggtttggcattaccaccatggacaacactgttacgttcattccatatcgaccacatgatgctgatgatgtgttctagctcagatctgtcatatatgcttgataagtgcacaaggtaatcccctttaaacattgaggaggattgatgccaatccaaagttattcctgagcagcgccacacaaatcttgcatatttacaactgaataatgcatgacctatagattcccatgcttgagaatatgtgataaccttgcatttgactaagttaacagcgactgggagagcctcatggacaacttttcaagcaaaatttttg

SEQ ID NO: 105692 - DNA, 1068 bp, Cannabis sativa
gtaggtgaaagaaagttcttaggttccgaggctgtttagagaacaagtgaggcatttgataaaattagagcgtgaatgctcgcggctcagagcagacaaaagagttatgctaatccaaagggaagggacattgattttcagatcaaggacatggtatttctccgaatatcaccgatgaaaggcattaaacgctttggtaagaagggaaagcttagcccgaggttcattggaccttttgaaatccttgagaggatatggcaagtagcgtacagggtgactaggcccccagtgctgccagctgtacatgatgtgttccacattttgatgcttcagaagtatatctcagacccgtcccatattcttagttatgaagcattggaacttcaaccagactaatcatacgaggaacaactggtgcaaatacttgatagaagggagaaagtcttgagaaacaatacaattgcactgataaaggtattatggaggaacaataaagtggaagaggcaacctgggaactcgagacggatgtgcagcagaaatatccagagttgtttaggtaaattttgggacgaaatttctataaggaggggataattgtaatacccgaagattaagaatcggattagcaaaccctaactagttaaatgtgtatttattatggaattatattattatatactttattatatgtgaattaaattgagaaatgacatgataagaccccattggtgagccaagggcatctttgtaattttgacccgagagaggtaaaactataaattgaatttaattgtgtgcttatggactatattattatatagtatacttgttagtccttttacaggtgttttctgacaagttggggcggtatagtcacaatcgggtatttcgggcagaacgttcgggcaatacattttcgggattttatattgacatttcatggttgagtgaataaccttaaatttatttgagtatgtatgtgatgaaaatgacatttttgcctttgaaattgtctatgttttatattaaggccctaggggtattttggtctttttgaccctttaatt

SEQ ID NO: 105693 - DNA, 1016 bp, Cannabis sativa
  modified_base (175)..(175): a, c, t, g, unknown or other
gtcaaagttgagggggcaaaaatcataattagccaaaatttaattagcaacataattagttttgaaatatataaaattatttttcattagattattttaaaattaattttagaaaaaagacacttagtttaatgagatatataaaatagatagttatttctagtaactaattatnttttctaatatttaattaaattagaaaaatatatttaggtaaaaaattaatttttattaattttaggtcaacttaaattagaatatttttcttagacattaaattacaattaagaattatgttgattttattcaagatacttaattatttgtttcttatatttaataaatttaattaaatatttaagtagattttatctagacacttaaatattagttattttcaagatatttatatagatagaaaattatagaaattttaatttcagaacaacttagattagaataattttcaaaatagattttattttattaatcatttcccactaaatttcgaaatgcattgtttaatgtatatagttttgatttttttttttttgaaaaatagattaaaattaattttagaacaacttagatcaagtaaatttttttattaataatttatcaaaacaaatagactaaaatatattatattttaattagaaaataagtaattagttaatgaaatatctagacagttattttctgtatacttgtggtatttttctagttttatttaattaatagaaaattaattagaaaataactctaatatttatttctaaatattgggatccataaataaatccaacaatctcaatagttcaaggggcatttttaacgaccttaaaagttcagggggcattatttggtatacagaaaataattttctattaattttcctatttaattaattttctattaattaattcaatagaaaattatatttatgttgaaaattaatctattaattaattttggaccaacataaatttgattaattttttttaggatttatttta

SEQ ID NO: 105694 - DNA, 532 bp, Cannabis sativa
atatatatatatgtcattttaatcaatcttattatctaaacactcgatctacaaaaaggaataccaaccactataattttcttaagaaaaaatatttggtttgcacaaaatagatatttcttctcaatttcattgttaaaaaaatgagttggctgccctacgtttataacaatttaataaggcagattttcgttcaaatatctatgactacttggcaataatatagtactcttgtttatatatggagactaaattattaattagggattaaaaaattacacaattaataaacacacttgcatgatctattggatttctattaaaaatcaataggacgtactattgtaggaagaaaaataaatcaatagagtttttatgtatcattatcagttagcagtcagattggatttctgtgtttaaaattaattaatttctataaattaatgtttataatacttaaatattgataacagtacgttaatttcacctcagatgtgcatatatataaacaatttataagtatatatgttat

SEQ ID NO: 105695 - DNA, 740 bp, Cannabis sativa
ttgatagcgagctaaagcttttagcttttcctatttcctatttcttatttcttttctttcaaggttgataatgtaaatctcgtcgcttttaatctggaaacataacaccctgtccgacactcacagtttttggtgacgaggtgatctttttcgtgtgcatgtcttcctatggcgaggtggacgcctcgctatcacttgattttgttcatctgtctgttatacttagtttgtatactgtattttatacgctaagtgtcttcacaatcattatatctcatgcatgtaatcgagtttggtgcctcgtcttatacacttgaagtaacatggtttctcgttgatgcacaaggcaatagtttgtatatctttacctcgcataagactattcagtcagccgagttataaatttactttgtcaattatgcttttaacgagttattccacctcaaatgtaattataattacgtgccttggttcatactcttcccagcttgacacgtgttttcctctgatgtgttagtcgaattttgggtataacaattgccccttaaaaagtttttttttaataaaaaatactttttaatgattacaaagggtatatttgtcataattccttttgaaaaaaatgcattttctcagattttggcagttttgcggttttgaggtacatcaacattaaatgaccatctttccacttctactttgaatgttgtccgtaagatcaaagatctctctgatccgac

SEQ ID NO: 105696 - DNA, 882 bp, Cannabis sativa
gtgattaaatgactaaccattgcatcagcaggacccaaaaaaaaagtgggagtgaaagtatcacagccaggaatccaaggatcagttgcaatccgaatgtgtcttccttcaccaattttccaacgcaagcctttaaggagcaaagcacggccccaaatgattccttgccaagttaaagaggggctatgtccatgaggagcattgagaaaatcattattagggaagtatcgacttttgagtaattttccaagaagggaatcaggtttctccaacagccgccatgcttgctttgccaacaatgcttggttaaattgctcaaaagatcgaaaacccatcccaccatctattttcgttttacacaataagttccaggccctccaatgtattttcgatccattttcattcgatccccaccagaaattagccatcatagattcaagctgatcacccacataggctggaagtcgaaaacaactcatgatatatgttggaatagcctgaaccacagctttaagaagcacttctcgtccccccgcagaaaagattttctcattccaattatgcataaggcgccaaatcttctctttaatgtcgctgaacaggtgttgcttatctcggccagtatacgacggtagaccaagatacttttcatggcattcacagatgggcatggagagatgtctgtggaaaaaaacttgtgatgccaaagtggtgttcggagagaaagacatgaccgacttatcatggtttagaagctggcctgaggcacgatgataaatgtccaagactttctgaatagcaaggcatgagctatcattggcatgacaaaaaaggagactgtcatcggcgaatagcaaatgagaaatcggtgcagcatttcga

SEQ ID NO: 105697 - DNA, 675 bp, Cannabis sativa
  modified_base (342)..(346): a, c, t, g, unknown or other
  modified_base (571)..(578): a, c, t, g, unknown or other
tccaaattggccctaagtaactaggttttttttttattattgcagctagttttcatatttattatttctttaaacacacatatatatactagattattgttacgtgcattacacttatacttagttatatttttagtttttatttttattatgtgtatttttaaaattttataaattaaagaaaactatttattatttattttttaatttttttaaaaaataatatttaaagttttaaatttttttaaaaaataaatataaaatttaaaaatattaaaattgaacatgctcccaatattaaaaataagtataataacaaaataataatattacaaataatannnnnatatttatatatttaaattaatttaaaataaataatatcagtatttatatatatttataaaataaacactatttataataccgttaaatttaatagcatattcttatatttttaaaatgtttagttaaaccaataaaaaaaatatttaataaccacatgttatatataaaaaaaatatataaatatatgggatataaaggccatcactacaaaaaatcttacttnnnnnnnnaataaaacttgtgactaaaagtgaaaaagttgtgactaattataaattataatttttatgctgtgactaaaaggtttgtagctaaaagtattagtca

SEQ ID NO: 105698 - DNA, 576 bp, Cannabis sativa
gaagcacggtcctcctttcctctttgtagatgtttccttctttaagggggacttggctagcttcggacttcgctgcctttgagggctgcgtcttctcgggcttcttcctcaagaattctttcctctaggacttcgagatcatgaccgtggtacgggtgactcgcatttatccttccctctttctagcttagccagagaatttttgattctcttatgtggctcagccatagcaaaaaattgtaccagcgattctggtcttcgagcttgcaactctttccaaaagtcgattctcagaaagacacctgtaatcaacatacaaagtaacaaagacttgggggccttctcaactttagttactttagcattaaaacgtttaaagtaatcctgcaatgacatactgcttgatgttagccagggttgtgtaatgcggtttatacgtcatcgtggcttggaaatgtgttaagaacaaatccacaaaggtttcccaagtcgatatggatgccttaggaaactggcttaaccaatcgtgagcattgtcctcttaggtgttgcaaatattttaccatgatctagatt

SEQ ID NO: 105699 - DNA, 503 bp, Cannabis sativa
ataataaaaaatgttatttttttagattactttacttgtagttaataattagataatagttaatcatcaagtggccatagataggtgtgtgagtgttggaggttctgggttcgagtttcagctaaaatatgttgtaatatataaacgcttaaataaaaaaaaaaaaattagataataatttatttgtaataatattattatcttattacaactatgtcattacaataaaattatattaatagttttttacataaagttgctctaatgttaaaatttaaatttagtattaaatcaaaactaaaaaaaaatactattttagtattaatattcacaacaccgagtcaatacccttataaattcatatttacagaacatagagacattaacaactccaaataaccaaatctattttagtacctagaatagaactcaactattactcaaatattacatattaaccccacccggataacaaatttttactaagttatcctccattaacc

SEQ ID NO: 105700 - DNA, 2746 bp, Cannabis sativa
  modified_base (482)..(483): a, c, t, g, unknown or other
tataaaataaattatagttttacataattaaatacttatgggtaaatactattttggactctgtattttgcaaaagttaccgattggaccatgtgtcttattaaatgataaaatggaccatgtattttctaaaatagtataaataggaccctgagcttaatttttgacaacttttctttttaatataatcaacttgaaaataattcttaatacgaacagatacaggaaatgtaaacaatttagtcataatacttttagatcagattataattaaattttattttgacaaaaaatcaatttagggtcttatttgtacaattttagaaaatacagagtttattttgtcatttaacaaaatagagggtccaattaataacttctgcaaaacacaaggttcaaaatatatttacccaatacttatattggtaacaaaaaaatattgagtttatgacactatttatcttaataataataataataannataataataataataatagtcattcatgaaaattaagcaaacgcgtttgtgtcaataataaaattttcatacacagtagactcagactacagacttacccatattccaaatctttctctttcacattttctcgaacactttgctatcaaacaacagccaaaacccaaaaatcacttcacattataattcatttatataaatatatataaatattacttaccaaaaaccacttcacatttctccaatattctcatcaatggcggaaaaagaccaagtcagacccttagcttcaatatctccaaatcgatttcccaccgaagaacaacaacatcatcatcatcacaaccttcatcgcaaaaaatcctacgccaagtgctgcggctgcataacagctctaatcctcttaatcgccgtaactttcttgatcctcgctttcaccgtattcgacgtcaaaggtccgatcatcaagatgatctccgtcaccggagatccacgtcagctggcgaacatagctgccgtagtagccgtatcgtcgaatctgacgctaatcgccgatatgtcagtgaaaaaccctaacgttgcttcgtttaggtttgggaatacgacaacggccgtctattacggcggcgctgaggtcggggaggggaggaatcctgggggaatcgctagggctagacggacgatgaggatgaatctgacggtggatgtttctccggcgaaacttgtggcggcgccggggttttgggcggagtatggagagaaatcgttgacgatgaaaagctttactaaaatcgatgggagagttaagattttgaatatggttaagaaaaaagttgtggttagattgaattgtactgtaacgtacaacctctcaagcaatgtgattcaacgacagagttgtatacgacgtgttaatctttaaaacgacaacgttttaattccacttcactactaagttgtaattgtaaaaaatagggtaaatatactgttttagattctatgttttaccaaaattatggatcggattatctgttttgttaaatgataaaatagactttatatcttcaaaaataataaagttaggaccccgagattaatttttgataattttttttctaagtataattaatttgaagacaattcttaatacgaaccgatacaaaaaatttaaataattttttcatatcaatttttgatcggatttatttgggtcatttatttatttgtctaaaacaatgtgtgcattattatttcatttgggtctaaaaaaatatgtgcatcatattaaatatgtaaaaatttaaaatgggacatgtgtgtttgaatttttttaacaatttaggaataagtatttttttagaagaaaactcccaaaattccacctaaagagcaatagttcttaaaaaagaaaaagagagatatcattaaatttcacgagatcattgtattgttttcataatttacaaaaagatctctagcttaaataaagtgctaaaaaaaataaacttaaatgatgtaatacaaaacactaataattaatgggaaaattttcataaatatacgatctttttttttaaaaaaaaaaaagatattttatagggaatttgaattaaaaaagggaaaaactatatggttaacttaaaaaggtaactggttacacgctaaggagtaattggttactttaaactatttttctaactttcttttgaattattctgacaaaataatttgttgaaagggaaaaaaaaaaatcatattttttttactcacattgtattcaaactcatgaaatatgtaattttcaagtaattaatctatgttggagttttttcaacatttataattgatcactacaaaaatggcaaaatgttggccataactttgggagatgactaagatttgccaccaaatttaaatatgagatttttaaatgggtatttttatttatgacaaagaaagcaccataaaggggcaaaaaaaaaaagtatattaaggtggcttaatttcagttaatagtgtattaaaaaggtctcacaaagagaggctaatatggaattggatagtccaaaagagaataaactttttaggttttctaattatatgattatcaccagaaattatgggatatttgttggtgatatatattgactactttaattgagatttgaaatggatatgattatatattcattatcacactctaaaggagttcagtaatttggtactgtaatttctaacaatatccaaaagtaaattattctag

SEQ ID NO: 105701 - DNA, 658 bp, Cannabis sativa
attaatttgcttagtaagacatagcattttttttgaggtaccactttaaatttttttaattgtgtataaagtgataactcttataactacacttttataactgctataaaataatctttttcagctatgaatatactaaaaactacatttcgcaacaagatgaaaaataaatatgtaagtagtcgttcgctagtattatatattaaaaaagaaaaattatcaaaaaaaaaaaattagtatagattcacttatggataacttttatgatatgtaagaaagaggttctacatcttaatttaaattataaaattaataaagtattttgaaaacatttatcacctaaatttagaaaatagtttggcttcccctaactttatattctcgctccgcccttgaagacaacaacagtcttaatatatgtatccattaaaaactaaatatatatatatatatttaatttttcttaattgaataactaaataataataaataaataaataaatatataataactccactgtaacataatatttaaataggcatcataaaataactccatagattgcataactccaagggtaaataaaaatacgattaataaataaactaaacctaaaaggaactacaaagcgtttcaaaaatatatgtacccataaaa

SEQ ID NO: 105702 - DNA, 627 bp, Cannabis sativa
  modified_base (517)..(529): a, c, t, g, unknown or other
taattgtatcacttttaaataatatataaaaaaattagcataaaatttagtatacgtgcctcgcacgtagctttttgctagtatatatataattagctaaaaatgttaggtggagaccaataagacaactatttttgctaccctattggagatgccataatgggctcttatcataaaattttaaaattatgagattatttcataaatacataaaatgctaagattgacgaaaaatttacttttattgatctattattttttaatatatctttttatggattttttttttcaaaaatacagattcttatttttctgttgtcttcacgttgccaatacttaaaaacaacatgaaaaaaacttttttactagaaaaaaaaagtgaaaaacctataaaaaaatgtaaaaaagtaaaagaaaaagttttattttaagtgcattgtgtaaatttacctaaatttatatctgttgactggatttttagcaaaccgatggggagtcgtaataaatgagatttaannnnnnnnnnnnntaataaatgcagttaataacaccgaaattcgcaataaatataaataaaagacaccggaatttaaagaggttcggccccgaatgtcggtaatagcctac

SEQ ID NO: 105703 - DNA, 540 bp, Cannabis sativa
tatttctttagcaaaactttttataacaaggattcccggaagagactttttatgccgttatagtgtctgcttttaatattttattttagtcaaatttttaatattatcacggtttttaataattaattattctactagtattaaactagtttataaaatcacacacgtggcgtccttatagattagggcgttacaacttggtatcagagcagccatggttttaaaggtcctgaaaactggtcgaatatgtacatttgctgcgaggtgaggtcgactcatggtatagtaagtgtttatattatttgctattggattacctgcctagactattataaagtatgttggaaaagtagtatagtgaaaattttgataagaatatgtgtatggtacattcatattgatattgatacctgtctgagttttaaatagttagaagatgtagactaaatgtgtgataagttatgcaccaagggcaatcaaatagtctgattagcgagctatttgggctcagggcaaacaatatggaagagaattatttat

SEQ ID NO: 105704 - DNA, 640 bp, Cannabis sativa
  modified_base (496)..(499): a, c, t, g, unknown or other
aaaaaatgacaaaaaaaaggggtcggcagtgggagatcggttttggtttgggatggggccgatgttgtggacggtggtgagggggggtttgggttgtggatggtggtgggggggggttagggttgtggttttgtttgggttgtagacgagcagagagagagagagatggggttgagttatgagaggggtatttttgggttttagataaagtagtcatatattttcaatggtgatatgtatgagtttagggataaaatattaggtatatttaagtatagaaaatcaaatttcccgatgctaataatgcaggacacgacttagcgagatttgctcttcgattggatagtaattgttcttggttggggaaaattccttctccaatccagtgcctatctaacagcaattgttggtttaatgattttttgcaacgattacacgattaacttaacaaactgttaacgttaaacgttaacaaataaataaacccaataattannnncaaaaaattaaacaatatttttttaaattaaaaaaaatcattttacccacatatctctctaacaaatcgtatatccctaatttttgaaaatcttttacacgattaggcttcattcaaatttcaaaaaataaacccaataat

SEQ ID NO: 105705 - DNA, 717 bp, Cannabis sativa
aatataatttacttggtcccaaatatattcttggatagaggttctactgtaataatagacttgatactcaagcactatcatttgttcaaaaaaaaatgcacaacactatcataaaagggcagtgattaataatactagatcagttgatttatctaatgcattaatattaaaaaagtagtgtttgatgatagattttgaaaaattaaatatatatagttttttttttcgctaaagaaaaaaataaatatagttgtgaagaatgttctacacaatttgcatttgagaaatgtcaattttatttcataaacccgtgtggaatcaaatcttttcttttctctcttttttttttttaaaaaaataaataagttttagttttgaactaattgattatatacaaggtactaaactaataaaaaatgaacaataagatgccaatcacattttcaaatcttcctccaacgtttttatcataatctgaaatgaaaaaaaaaaaacgaaaatgaaataaaaacttgttacctgaaatgcgtatgtctgctgcgcctaaggaggagcatcggtcttcgcctgagagggaggagctcgcgccggcctcagatcgggaaattttttttgggtctggtggggtatcgcgagttaggcagtggggtactgtgaggacgtttgtggggaagaagatgaataaattagggctgatatatatttttttaaaaaata

SEQ ID NO: 105706 - DNA, 663 bp, Cannabis sativa
  modified_base (634)..(637): a, c, t, g, unknown or other
catttatatgataattaattttaaaaacgtaacattcacactaataccaaattaattataaaaatataacatacacataatttaatatatgtattaattctcttcaatataaatatgtaggaagaatatgtttgatgtgttatgtggaagtgtactattagtaaaattttgtaagaatagtttctttacaatttaaagaattcttcaaagaaatccaaaattatttttgaagtccatagaaaagaagtctcgatctatcatattcatgggaaagctaaatacttcttattcaaagtaagtttatttcattttgacaactaaaaggtaaattacctttaatatactattttatatttaatgaatttttggttttgtaggaacaaattttttttgtagctttttttttttgttcaaggatgaaaaatgacaaacacaaatatgataccaagaaatgagcattcttcacattgaggaggaggtcagcggtgtggtagaaatattaataaatactatataatataagagtataaatacaaagttaatgtacattttaatcactattatatattatcttaaatttttgacaaaaaaaaattgtatgtattatcgtttgattatgttgggttttatgccnnnnataaaactctttacaatctgattagt

SEQ ID NO: 105707 - DNA, 693 bp, Cannabis sativa
  modified_base (507)..(511): a, c, t, g, unknown or other
ggacccgagattgggatccggattttgacccagggcttggacaaaacccgcagtcggtgtatggatttgggacccagccctggagccaaaccctgacaaggacacagacccacacccagaccttaacccagtccaaaacacaaaagtggacccgaactcttaccctgtgacccgaaattggaaccaataccgaaagttgaccgggactagaactaggactaggacttggaatcataattgaaattggacatagatctagaaccgtaaccggaccaggacccgaactccaaatcagacctagacccgaattaggagccgcacctagatcccaaccaaatctaggaatcgggacccgaacccgaacctgaattcggagccaaacatggaaccagactaaggacatagaaccagggtcggtacctagaacagcaccccagtatcgatcccgaaccaaaactcagaaataagacctaggacctgaactagaacaagaccgagacccgtgannnnnatctagatcttgactcgggatttggataacttggcctggaacagaccagtagtcagtttcaagatctgggactcagactagtaccagaacttagacgaagaaccaaacccgagcccagacctagaccaggaacccaaaattagaatctgaacaagaatcgccgaaccaggaccctagaacaa

SEQ ID NO: 105708 - DNA, 616 bp, Cannabis sativa
  modified_base (27)..(33): a, c, t, g, unknown or other
  modified_base (120)..(127): a, c, t, g, unknown or other
  modified_base (154)..(155): a, c, t, g, unknown or other
  modified_base (581)..(582): a, c, t, g, unknown or other
gaccaaaacttttgattcatatgatcnnnnnnncattccactatgttgacgatactgtaattatgaataaacatatgatctggatttaactgtaattatcaatcacttcaaatttcttannnnnnnnactaatcagattgtaaagagttttatnnagggcataaaacccaacacattaccctatggccggccacttaatgatgattttctgattaatattttcattattttaatgccaagtaattcctaacctaaacctagtggttacctataaataaatagtgatggctcgcaacaaaaaaaatgtagaatcagatgaatttttctcgtcagataaattgagcctcctatcctattgtctattgccgaacttctctctccctcttttcttcttcaatttttgaaaaccttgagtgatagagtgagtgcccacacacatcaagtgctatctcaatcatagtatggaagattgtgaataatccaaatttaagagaaggacattcgggctcagatcttggtgatactctgcaacaggctggatacaagggttaaagatctgaatggaaggagacatattattnngctgcacccaatgtaagggtttctgaaactttat

SEQ ID NO: 105709 - DNA, 557 bp, Cannabis sativa
gtttaaataacttgtactgacaaaattatagaaaaattacagttttacaaacattgggtacttatgccactaaaaataaacaaaataaacattgggattatgtgttaggctattttatgcctaagttctgggtcgatttcataagtgttttctcagttaatgttgttttttgaaatggttttacgcttgatttttcttgttttgggttcccaatgcattacagttcaaattgtatcgattggtgaaaagacggggcattctggagaaaaatctgctaaagctgtcatattagcattagtagtcgcgaccagactgacccatggtcgcgacctgggtcgcgactaggaggcttggcagaaagggtgtattttccaattggcctatggtcgcgactagggctttatgtagttgcgaccatgggcgaaacacgagatttttggccagttttgaaatttcttccttcagaggtagcaaccctaattcctatataagggactcgagttttatgacgaaatcatcaaagattagccccaaaaagtgaataaaggaggagagga

SEQ ID NO: 105710 - DNA, 526 bp, Cannabis sativa
tggagtagaaataatttttgacaccaaatttggtgatagtgtaacactaaattttgtgtctccttggagatgctctaactattgcctactaattctgtaaataatatttagttgtgtttctttaaacttaaatgtatcaattgagtgattttcattttgatttttaaaaagcatcaagagcattattgaaagtacttgctagataatatattaacttagttgtatcattatttagttactagatatatttcaattagttaattattaacattaattataaattaatttttattgaaactttttagggattgtcattgattcattattttaaaagaaaattaaaaaaaaaaaaatacatttttattattgacgacacttaaatgttgttggcaatactcttactattaggatttgtttggtacgccgtattatactgtattgcagggccggttctgagttgaaatgggctataggccaatttttttttgggcccttactatatagataaatggtatttttaaaaatt

SEQ ID NO: 105711 - DNA, 1426 bp, Cannabis sativa
tatagttttggtcttatgatagaggatacacattattttcttctcttaaacaaggctttcctgtcttttctgtctttccttaattttaaaaactttagagcatatttcattttaattttagaattggaaacaatttttttttttaaagaatcaaaatgtaattgctttttaactcattttgtaaatattttacatctaatttactattcttaaaactttatataatttaattaacttttctaaactaagtatataattacgtatacgtgcatttgcacgtaacttctgcctagtatattctaataaatatcattgaattattcgttatatatgtaggttagatcctatatatatgctcccctatatatatataatgtatcaaatggactatgtttgaagtttgattagtgtagggctattgaataatatttaattatgcacaacctataacatagtcttgtttttttagtgaaacaaaatcttaaaggaacacacatacacataatagtacgatgtacgagaatgaatgtttgtgtccttgcttttaatggtatatattaatgataatagatcataactttgcagttaatttagtttttgaatagggacatttagaattaaagagacatatattaatacgaagttggtgtgaaaaagtgcatattagctttttttttttttttttggaatgaaaatgatgtttttattagaaattaagatcagtcaatttagaaggaggattgctagcaataaaagtgcaacgtgacaaataacaagaactatgtgcaaggaagtgtgcagtcttatagcagaacgctttacaaaatacaacttaacatgaatcaactcagataataggtgttgacaagtcttgcaccagcataccaaatgtagaaggcagagacatttggctgtgaatagcttggactgcaagaaggcggtttcaagcacaacactatcccatgctttgaccttaattcaactaagagcttcttttattccacctagttctgcaatctcaagggaaattttaccattcttattagaagaaataacttcaattatattctgggtagagatttatatccaatttaatccgtactatttttttatagtacatctgatacacactaagtagtgcagattttatattttgaataatccaatcaaataatccgtacaataattcaaatccaatcaaatctatttcaatctgcaaaagtgctgattggatcggttactttagatttgttatttttttaatatttattaaaaaaatatatttttacataactaataacaaaaaaaaaaaattattgtttttttatatctccaataaaaaattaaaataaacaaaatagcaaattcaaaggaagaaaaaaattatatgtagagagaaatgattaattttattttaaattatatt

SEQ ID NO: 105712 - DNA, 823 bp, Cannabis sativa
  modified_base (748)..(794): a, c, t, g, unknown or other
ataaaatggattacattgaaatggaattttatttagggcataaaacccaacacacctcttctttaagtctccatatagaaaggcattacggacatcaagttgtctaataagccatccttttgtcaaagccaatgtcaaaaccacccttattgtaataggtttaactactgtaaatgtctcagtaaaatcaaaactattttcttgatgaaaccccttagcaacaagccttgccttgtgtttaaggacagatccatctggattttccttgatcctgtaaacccgtttgcaaccaattactttcctttctggtggtaatttgacaagagtataggttttgtttttgaccaaaactaaaactttatcactcatagctttgttctaaacaagttgactgagagcctcttgaagatatgttggctctctggtaactagtagggctttaggcttgtgtataccagacttggatctggttgtcaagagatttatgacaactagaaactgtagccttgttatttacaaaactaggagcaatgtttgtgttacctgtgacagttatgtctgtaccggtagcaaattgaatactggttgcagtaagaggctcaacaatagttggaacttatgtgtccagatgttgatcagtttaagaaccaggaggctcaaggcatgttgtgggagaagagcctacttcacatgtttctattagtgaaggatgtggagtagatgttattgttggatatttattttaccnnnnnnnnnnnnnnnnnnnnnnnnnnnnnnnnnnnnnnnnnnnnnnngaactttctaaaacgataaatgaaacaca

SEQ ID NO: 105713 - DNA, 634 bp, Cannabis sativa
gctctgaccaaacgagtaactcggatcacagacctctctgtcttctctcggagggatcggatcccaagtttaagagaagttttaaattcgaagaaggttggacccgagatgatcgaagtaacctcgttgtagcccacgcatggaaatcggtccgtcatgattgggcccctgctcgtatctttaagaaggttggtgctaccagggtggctcttattaattggaaccgtgcccagttcggaagattggatatggttataaaggagctagaacagaagcttaattggatccagagcctcccggctggaacccgggactggaaccaagaatctgatattcgacgtgctttgaacgaatctagggaacgaaaagcggtctattggaagcaaagagccagagtgtcttggctcaaagatggagataagtgctctaagtttttctttctctcggctgccattaaaggtagaagaaatgccatagagagtatcttgaacaaagataatatctggatttctgggcgagtggcaattggacatgaatttgctgatttttttaagggcatctttgcgggatctgatttggtattgactacaactgtgctcacttgttcccagagaaaatctctcaagaagactcg

SEQ ID NO: 105714 - DNA, 1109 bp, Cannabis sativa
tgatctgcttcatacaagacttccttaagctcgtcaagccaattcctcacgttgttgtctccaagttgtttctcctcggcatcattcagcagcacattagccgaaagcagcatagtcttcaactttttgagcagcttttgattgagcttgtctccatgaaagaagtgaaggacgtcttttgaagcaagcctatcaaagaggacattgatgaagccagagagaagagctcctcccaccattaactcagccatggttttcagtgcttaagaaaaagagagaagcagcgtatggtaaagcagattttagaacaaaacaggagtatttgtaatatatgatatattagttatattatgataaagacatttacctaattaattagggagataatttaatcaatttttccttgtaaataatggccaccattggtgatggttccaagaagttgccaagtaaagttttgttaggagtcttcagtctatcatattttttatgagtcactacagcacaaactaataaagcttaaagtagtagctataaaaaataaataaggaaataaagacaccaacacagacaaaagtaggtcacctgaaaagatcatttgatttgattaattaatgtaagcaaaaatactttgattggtttctcttcatgtgggtggactaaggctaatttctaaccaaaatacatgtatagtatacggaccaaaaacacattaaacaaataaaaaattttgctaccaaactccaaatacactgttcgagacttaccttttcaagaaatcaacaaattatccctattctctcttgtgagtacacaacctgaattttgctgaataagtaaacttatagaaaagagttgtactcagttccgaatttattgaaactcttaggaagttaaaacatgccatggacggaaactcgagtaaaaaatcgaagcaatggaaaccaaaattcaacaaatcaaggtccttgctagctccatggcagcctccaacacctttgatatgtactgtttataatttcaaggggtttttactgaaaaacggtgtttttgcaaatgtcagttgtatataagaaaatataaaaactgtaagcgtttgcagcagcaga

SEQ ID NO: 105715 - DNA, 624 bp, Cannabis sativa
attcttcaatgtattgcgaggaaataagaagtttgagtggacagaagagtgtgaagaggcctttcagaacattaaaaggcatttagcaatgcctctagtttttgccaaaccaataactggagaaatattactcctctatctggctatctcagaagatgcgattagtgcggctatagagcgagaagagggtaagccccaacaacctatttaccatgtaagtaaaaggttactgggggcagagtcgaggtatccccctcttgaaaaactctctttctgcctaatccattcgtctcgcaagctacggccttacttccaagtgcaccccataaaagtgttaattgatcagcccttcagacaaattttatcaaaaccaaatgcttcaggaagattgataaaatggtcaatcgaactggagcagttcgacataacataccaccctcgaacatccatcaagggccaagccttggtagacttctcaatagaaggaataactccagaagaaattccgccttttcaccgagacgcagacacgtggaagttatacgtggatggtgcatccaacgagcagggcttaggtgcaggggtaatattaatttcaccagaggtctttaagtttcattatgc

SEQ ID NO: 105716 - DNA, 701 bp, Cannabis sativa
  modified_base (223)..(223): a, c, t, g, unknown or other
ttagcactaatttttgatatttttgtaatcgtttatgaatttaattatttctggaccccattattagaaatgagcattagagttataatttctcaattccggagattttattaaactctagggtattgtttgacttatatgtgaattatgttatttttgtaatttttgctcggcgacgacggaaaatgcgatagatgactaatttgatcacatgggtaagttnagaaccttatttcttagtgagaaatattttggagaaaataaaaaactgggattaaacggggttatggaatttgaccattttacccattgttttggaaaatagctaagttgtaagattaggggcattttagtaatttgccaagagggtgatttggtggctgcctagggtgtggacacctggttattttaattcagcaagagatcaattagtttatctcttctcatttgaagaaaaataagaaaaaaacccaaaattcaagaacaacctctttctctcccttctctctcttcgaaccagccaaaaaccaggggagttgctgctaatctttggtgttttcaggaaggaattcaagtgggattcaagctaaggtaaccctaaaatccatagacttgttttttttgaagcttttactttggtttgagtaggtgattttgaaaattaggggttgttagggtttaatttttgtgtagttcgaatt

SEQ ID NO: 105717 - DNA, 532 bp, Cannabis sativa
  modified_base (220)..(228): a, c, t, g, unknown or other
ttatgtaaatatagctttatttacttatttttaaagaatattaaggatgtaagctctactatataaagagcattagtctaaccctaattctctaagtctcaagccctaagtgttaagtctctagctctctaagctatcaactctaaagtatgaaaccctaattctctcttctccctctcttctacatgccccagggctctctctctctccctctctctcnnnnnnnnnctctctctctctctcacttgagatatgcctacttgattcatatattgtaaccttaagagagctactacagattccacaacacttgagtagtattatgtctagtattaatacaactgaaaggggagtaagtcataacccgctaactcatggggtcgaacctctgtaaaatcttgtgttttatttatttatttattcttattgggtaactcgtggcaagtatcagtaataaatacgattgcgttgtcagttggccgaatctgaggtcaatagtttggtgctttcattgagagcgagttgtcaattt

SEQ ID NO: 105718 - DNA, 750 bp, Cannabis sativa
  modified_base (100)..(118): a, c, t, g, unknown or other
aaaattgaaaatttagattctcaattataaaattaaaaagtgaaaatagttttacagaataagtttttgaaaaatattttcactttttcaattttaaaannnnnnnnnnnnnnnnnnnagtgttaccaaacgccaccctaatcttaagaatacaaaattgattaaaaaagtataagtattaccaaaagctaccaaaaatatgaattatggtgtcgtttggtaacacttttatttttaaatttttttaatcgcaaaaataaaggtaaaatttttgtttttaaaatcctattttaacaaaacacaaatgtattctataactacttttgtttttaattttaaaaataaaaaataaaagtgtgttttgtaaattttatttttattttcattttttatttgttgattttatttaagtcgggtccaaggtcgggtctaaggtcaagaccgggggcgggtctaagtttgggactggattggagtttgattttcacagtctaagttggagtcggagtccaaaacattaattacaaataaactatttaaaaaaagtaattttttttatttttaaatttagattctttattaaaaaaattaaaaagtaaaaacagttttataaaatataattttaataaaaaatttcactaatctcattttaaaaattaaaaaaactcattaaaaaagtgttataaaaaaacacccttattttcagttttccaatttatatattttctaaatgagaaaaaaaaaatattt

SEQ ID NO: 105719 - DNA, 666 bp, Cannabis sativa
  modified_base (608)..(610): a, c, t, g, unknown or other
tagaacactaagcaatctctctctgaattctctcttttattcttactatcaatagtgaaaagagtagtctatatatagttgtaactcacaccaggaaaaataggtacataaccggtgccaactaactaactaacatactagaaagttagttaagttagttggtgtaggtgagttagttcaaaagttagtttaaaagatcaacttccacaaatttccaccttaattctctaaagcaaactacttgtaatcttttcacagaagccttgatgatgttgatatctcaaaatgttcagcaagaaccaatgttcagcaaactgagacaatgcatcagttttctgaacgtgagaacctttgttcccatgtcagcagggttgtcacttgggtgcacctttttaaatttcaaaaccttatcctcaatcttctctcaaatccaatacagtctaatgtcaatgtgcttgctcttctcatggtatataggattcttacataggttaattgatgacacactatcagaatagactgtccctttgtctttgagtagatgcaactcttgtagtattcctgtaaccaaataacttccttgaaagcttcagtggtggccatgaatnnngattcagtagttgacaatgccaccactggttgttgttgtgatttccaacatatgca

SEQ ID NO: 105720 - DNA, 1415 bp, Cannabis sativa
atcctagaggggatgtaggcatgtcggctagaaagataactaccacgtgcaattgtggagatgcacaacaaaatgtttgaaacttgttggcatagtacaaggttgattgggtagtccatactgtatgcttggtacactaggccaagtttgcctgagtgacatcgtaagccgcaggaggcgcttttgttgaaaaggaagcttattggcaggggtgtggaagtagtgcagggactgccagattcttgttagtcacgacagtggtcgagagttgatgaccaagatggttaaatttggaatagacatggaatgcttcaattgctacatgaatgtgtcaagagggacgcacatggagaccaaggggggtagatgccgcaatcgtcagaggatgattgtacttggaggtgttcgcatgtgacttttattagatccatatggaagtgccgaggcagttgagtgggatgtgtgggcttgtaaaagcgccatcgagagcgtaagtcacataagggcatcaatatagagagatgcgcacagttgtggaatgaatgcatcaaagaagccaacatggctaagaagaccgagcgcaagcctcgagatggcactagagtttgtgtggaggccagagggccatgccaatgagacttagtagtcatgtgagcttgcgaaggtcgagaagggttttaaagtttgcatgatggccagagggttgaatcattggaacttagtacatcgtgtgagctagaagggtgtgagacaagtgtgaatcagttggatggttgagcggacaatgcatgcatacaaaaatcgatgggggtgctatatgagatagttgactcgagagtcacatcctgtgggatgcacttttagatggcatggtgtgcatgaagagttggggcggtcaggcattcgagtgtcggcatgttgtcgaggatgccaatagatgaaatgggggagagaccttcacggttcactcaacagactacttattcattacaagcatcaagatgagtatcatggagattgattgttgttcaggatgtaaagtcaagaagactcgggacacaggcagtgccagttatctagggtgaaagtctgcaggactcaagtactaagataacaccatggcaatatttgcctaaggtgaaagtcagtaggactaaagtacgaaggcaatattaaaatgtcgaggggtaaagagtcaaatgaccgaggctttagttcagcaacttcatcaaagtgaaatttggaatggaaggaccgtatgtgagtatgcggttagcttgcgagctatatcttgaggggtattcctctaagagaagttctttccaagttgaagtgggggagcccactaattcatatgtttgaagaatcagggtacttgttcagttttggtgtgtgaatccagagggaaacactac

SEQ ID NO: 105721 - DNA, 621 bp, Cannabis sativa
  modified_base (189)..(190): a, c, t, g, unknown or other
  modified_base (329)..(332): a, c, t, g, unknown or other
atttgattaagtgactaattgcataattttattgttaaaagttttaatttaccgaaattagtttaaatttccaattcacccccccctcttggaaacatatcttgggctaacatgtaccaccatcgtacttatcgttaaatttagaatgaagggcgattcttgagttcaactctcaatgaaagcaccaanntgttgacctcgcttttagccaatgacagtgagtctaatttagtaagcaacaagtagtttataacgattgaaataaaataaaacaatataaaaacacaggaattttatagaggttcagcctcgagcagttcggtaatagnnnnatcctcgttatttgtattaactcaagaataaggagcaaggttccttttcttatagatcttacaacagtatctctgaatataaattcttagacaatatctctcaagtaaaatcctacgaccctttgcccagtgaatatgcatcactatttagagggctatgagcttggaaatgaagtatttcccttctcgttacaaaggatataagtagaaagattgcatagtaaatgcagaatacaccgatcgtgggatttgggcagctagccatatctttacaatctgatccccaagt

SEQ ID NO: 105722 - DNA, 1204 bp, Cannabis sativa
  modified_base (1157)..(1164): a, c, t, g, unknown or other
agcataaatattaatcataatacaataaaaataaagatgcatctcaaataaagttatttataataattaaaagctattgaaaatataaattctttttaaatgaaacagatattataatagaatagattttcattcatttatagcaaaacttaattttttattcatatatatttaaattaaatatttttatagagttaataagtataatactcacatagtttgtaaataatgttgaactcttataaaaattaaaaaatatacatcacttagaagatatattataaaaatgatcataaaatgatatctcatttgatttgtgttttttcttatatatagaaaaaaaattgtctagttttatttaaaataatttagtttgaatacttttttgagctaacaaaaatatagaatagtatatataaaattcttaaattaaaattaatttataataaattgtatattattatgtattacataatagattgtatattagataaaaaataaaaaacttgttgacctcgcttttagccaacgacaatgagtctaattttgtaagcgacaagtagtttaatacgattgaaatatggtaaagtaaataaagaaacaagaattttataaaggttcagccctgagcagttcggtaatagcctaattctcgttatttgtattgacttaagaacaaggagagtagttctttttcttagagctcttacaacagtatctctgaatatgaattcttagacaaaatcttttgaccctttgcctagtgaatatgcatcactatttatagggttataagcttggagaggaagtattttccttctcgttcaattgatataagtagaaagattgcatagtaaatacaaaatatactgatcatgggatttggacagcttgccatatctctgtaatctaatcccaaagttatagggattttcttgatgactcacgatgcgaaagctaaattcgctaagtgttggcgttctgtgtggattgcccactgctcggtctagaggacttcattcgagcgaatgtacgaagtgtcctgtttggcttgtgtctagcgagcagatacctggagtcgattccacgtgtcaccatcgaataattccatgtcagagtgtagaaattgggataatattgttggaaatttattttannnnnnnnttagatctactcacaagtatgtctattaacaccctaaata

SEQ ID NO: 105723 - DNA, 512 bp, Cannabis sativa
gattcaaagactacttaaaaatctctctcccgaaagcttgtaaaaccttctcccgaaggttgtgtgcttgaatcctcccgctgcaacacttgaaaagaaatctcccgaaaaagctttgaaaaaaccttctcccgaaggttgtgtgcttgaatcctcccgatgcaagacatgaaaagaaatctcctgaaagctttgaaaaatcttctcccgaaggttgcactgatgttcttcttcgatgtagacttgaatacagactcaagacaatacacactacaaattaacagagtatgagtcgaacaactcttctctacaaaacaaagacactctttccttaagatatgtatacaattttaagtgtatgaaagagatacaaaacctagctactataaggtgtttattgaaagcttacatacggtctgaacaagaccccagcccactagaaacttccctaaaaaaattcttcaattagcccaagaatttcaatttctgtacctacagaatcgtgggcagta

SEQ ID NO: 105724 - DNA, 805 bp, Cannabis sativa
ttttgattgctcctatgaatagttaaaccgtctattcatattttagcttaagtattattcttcaaggcattcttgtgcctcgtttataatacatgccacaatgatgtgagccgttaagtattaaactcgcatataactttatgttgttttatgagttgatctcacttacaattgctatttgatttttcctttttaaagaaaaggtttttcaattccttgactttatattgtctgtagacaattttaatcaattatcctttcctttgtgggaaattttttaatttttggggtttgcaatatagtatatatttctaggtggtttctagtcattatacacttatatatgcccctaagtaatttaaaaaaaaataaactttgtaattacttgaacaaactttcactttattcataataagaatttaactattacagagataaatataacatttacatattacatttactagtaataaggttgcaaatgttcactattccaatagttctttattagcgagccgctaagccaagctaatttgtaaattctggttcccacgactacttcaataacaaaaggaccttcccagtttgggttaaacactccagcagccagatctcgcatgttcgtaaatacatgttttaacaccaaatctccaaccttaaagagccttttttggactcttttgttaaaatatcttgtgattcgatattgatagactgtattggttatttgtaactcattatgtctttcttcaagtaagtccaaggacaaattcaaaagttcttggttttcttcttgattatagaa

SEQ ID NO: 105725 - DNA, 673 bp, Cannabis sativa
  modified_base (61)..(61): a, c, t, g, unknown or other
  modified_base (505)..(506): a, c, t, g, unknown or other
aacagtttctattcactaaatagaacaacgtatgcgacttctaatgttcgagttggctgtncatattctggtgtaagctcgcgggcttaggatatacctaacatttagttaaatctaggctgtctgcgttcttgtatagtcgcacttaaggacattgtataacgagctgatagaacctagacacgcaagtctatattggtttatcgaggctgttgggtcatcgagaccagctcgcatcatagagagtcgatctctatgctttcacaggaggatcgagaggatactcgcacatatcctggtacatgcgagttaagtccgttccttggtcctacataatgcgggacatacgaatgcgactagacttggtcatattcacatcatctcgctgagtctagctcaggcgaggtttaaactcgaggagtctctcattcacatctcagcttttcttgggaaaattgagtacacgtgtcctccacacatgtgtctggtctcgagtttctaggtnngagaaatctcactataacataagtcaatatcactagttgctcttagataaaaagatctcaattctgacatagttaggttcaatttcaagagtgttatttgtgttctttgatttgttagttaaacctaccttttggtccgggtaaaacgtacattttgggaacatgat

SEQ ID NO: 105726 - DNA, 691 bp, Cannabis sativa
gcttgcttgtttcagctatatactgagaaataaggttactaacactccatattttactataagtgtttaggttgtcttggtaaagctaaaagaagtaggaagtttatgaagaacttgaagcatggtgtaaaagttaggaagaggaatattatgatctttcaacttggactgaacattaaaaattttagaataaaatctcgcactccttttaattcatcatacttaatggttgtcatttcatccataagatgtccagcttcagcgttttcaccagtgtcatatagtttttctacagcattgaaaaactctttggcatttgtagtgtctggcaaaccactcaatagatgttcaggaatggatcttttcatagtaagaagactaagtcgacttgacttttcccattgtgcatgatgagttctctcggcagctgtactggagtcagtaagatcagcaggtttttcttctcgtaggcacaagtccaaatccattatgcctaaagtaaattccacatctcgtttccatgtcttgtagttggaagcattcaaaatatggatggaagcattattgttgttcacagaaaaggagactgattgatccaaaaattaaaacttgaataagcaatatgagcaatgtattagaaaatattgtagaatcaactggtcattataaactcccctttggggtgagaata

SEQ ID NO: 105727 - DNA, 1349 bp, Cannabis sativa
aattatttaagtttatatttttctaataatggggtgtatttataatttggtggggtgcaaataaaagtctccatacataaattaatatatattttgtattacatttttacccttgcatttatcaacaagttcctcctctcctctatataatttgatgagttgatgaattacatacagatacataagtcaaaaaaaaaaaacaaagcctctctcttttctctcacttataactaacaaaagatgaatttgattatgggtgagggtgaattagtgagctgtagggagcttgttgaagctcaagagcttatatataactgttcactcagccacataaagcccatgtcattaaaatgtgccattgaattaggcatcccagatatcatccacaaccatggccaaccaattacactatccaaactcatttcttcacttcctatacacccttcaaaagctcattgcattcatcgcctcatgcgaatccttgtccattttggcttcttcacaactcaattattacttccacaacaacaagaagagacatactctctcacacttgcttctaagcttttcttaaaagattgtcctattaaggccacaccattttttcttgtccaactcaacccgcttttgcttaagccgtggcattttctaagcacttggttacaaaaaggggaagatgatgatgatgatcatccaagtaccccatttgagatggcgaatggtataaacttttgggatggcgtaggtaatgatccaatggttaagtacatgtttacggaagccatggccactgactcttatctaatgtcgaaagtgattgtagaagaaggtaaagaggtgtttgaagggttgagttcgttggtcgatgtgggtggtggcacaggtattatggccaacgccatagttgaagccttcactaacattaaatgcactgtacttgatcttccatatatcgttgctgatttgaagggaacacacaacttgaactttgttgaaggagatatgttcaagaaaataccctctgcaaatgctgttttactcaaggtaattactaattttagtataccactgatctaacaaactgcctttttgggcattattataggtatacaccatggtttctttctaatacttttttccctaaattaagtatcaatgagtctcccatatttaagggataattaccttgtgataaaatggacttgtatcctctgtcaaaatttgctgtctaattttctgtcaaagcaattaaaaaaagtcatgtcatttaattaattaacctcaacaattaatcatttaacagcttctattccttccgttactgttttctattaattaatattatatat

SEQ ID NO: 105728 - DNA, 678 bp, Cannabis sativa
cgcttctacatggtaagtttaatgtaaatagttgcatattcgttttacaatagttgcaaaaaagttttgatacaaacaaaaatattgaaaaaaacagggttcgcaattggcaacaactgacttgaaataacaaaaagatcaggagctctcaatcaatccaaatcagttataatgcaaaatacaagaaatcataaataatatagctaaggtatattcagttgcattgtcgttttttttttctaatttccaaatcgaattaatctacaaccatgttaattggaattatattccaagttttttcaagttcatttgtagttgcatcgtcgtttcattatggtatcaatcaatattgcaggaatttcttttgacagcgaaaaaagagaaaatactttgacaaaatggttagtttgtataaaattattgaaaacgttgttgattagttgcattttagttttttaacagttgcataacagtactgaaacaaacaaaaaaataaaaaatacagggttcagaattggaaataaaagacttgaacagaagaaagtcaatagaagtaagtttcttttctatttcataaagatcattttaaattttttttttataaatttgtatcaaaaatgtttggaaacattaataacaaaagcaattacagattcaatatagtttcaaattagttga

SEQ ID NO: 105729 - DNA, 684 bp, Cannabis sativa
tatttctttagcaaaactttttataacagggattctcggaacacactttttatgtcgttataatgttcatttttagtgttttaatttaatcatgtttgtaatattatcacagtttttaataattaattattctattagtattaaacttgttttataaaatcacacatgtagcgttcctagagattagggtgttacagttggtttgggcaattaggttcgcacgaaatcaactcttgtggaaggtaggaaaagttgggttgagtttgttgttaatttggtttatatcactcttgatcagtagataaaagctcaagaaagaagtttgtttcctatatttgatacttggtatcgtttggatgggctgagctatggtctaaaccatgttatgaaaaactcaaggtgaatattgatgttgcattgtttgacgaggagggaagacatggttttggtggggttgttcgagatcacaagggtcgggttgtggctgggattacgagactacgaatttggcaagttcttttagagattgctgaagccatggctctcaggtaagtgttatcatggtttaagcgcgattttctgcgtgtgagtattataaaatctaattgtctggtattggtacaagctgttagaagtttgaatgttttatcatccacttttggtggtgtcgttgaggattgtaaa

SEQ ID NO: 105730 - DNA, 2396 bp, Cannabis sativa
  modified_base (2346)..(2346): a, c, t, g, unknown or other
ctttttttatatcaattcagcctatgggccttttttaagtatagtcaagacaattaagcggcttttaaacttgggaaatctttcattttgttttaagataactggctggccgagtagcttttaattccaaagttatcgtgctttgttatctttttgaaggaatatttcctcttaagtctaaatgattgcacatgtaaatatattttattttttgagcttgttacttacctatgctttgtacgggtatagttgcacaagtttaatttttttagtccagctactaggttcaggcaaaccctttgtatgcatttttaattacataacttgctataaaaaaagaggtaatatagacacgtttagaatgatgattaatatctttttttcatttattgatctggatgtgttgttactgtaataacttacatttattgaattataaaagctattacacgatataactgatctttagctaattaaaacataaaacaattgaatggtataatttgtccaagagacattggtcaagaacaactatttctaaacatattgtactttaggagtggtcatccgacctgagtaccaattatttttccaaacctttgagtgaggtccgctcagaaggccacttatttaagagtaggtgttcaagcattgggcactttatgagggtctttagtccttgtacacccattggtagtattttcttagatgttccttgttccaataccttggtactagatccaataccatgttttcatcatactgaccaagtttgcatgctcctgaatctgtgacttctgttacttgacatggcccatcccagttaggtccaagcacgctagttgcactgtcttttgtgtttaagacactcttctaaggaccatatctcccacaaagaactttcccgccatcacttgcttattaaagtaacgtgctaccttttgatgatgagccagtagctttaggtttgctgaagcttatttttcttcaatttcatccagtgattctaccaggagggcatgattagtttcttgatcataagttagtcctctatgggatggcagttctattttcatgggcaacatttcctcataaccataagccatgccaaatggtgtgtgccctgttgccgtccttttagttgttatgtatgaccacaatacttctggtagttcctctggccagttccctttggagccattttttacggtgtatttgagtgtcttaatgactactttgacttgtccatttttttgagggtgtgctactgcagagaaactcttgatgatttcatgtgtcgtacaaaagtctacgaacatttggctatcaaactgttgaccattgtctgagacaatcttgggctaaagtttgtactagcatatgatgttttttactaaaaaatccagtaccttctttgatgttattgttgctagaggcttggcttctatccatttggtgaagtaatctatcacgaccactgcatattgtactccacctttgcctttgggcaactgtccgatcaggtctattccccatatggcaaaatgccatggactttgtatctgtatgaactcatttgggggtgctcggggaatcttcaaaaatctctggcacttgttgcacttctttacatgggcctttgaatcttccatcatagtaggccaggaatatctttgccttaatattttctttgataaactttgtcccgcagcatgattgccacaaaatccttcatgtacttcggacaggagccgtgcaactttttcttttgttacacatcttaacagtggcatggagaagcctcttctatacattacacttttcactacgatgtaccgtgcaacttttctcaccatcttttgaggctcgtttctattgcttggaagttctccaatattgagataagctgctgtgggagtcatctagtttggtgcagtatctatcattttgatttcttccgcacatgtgatgctgggttattccaagaattgaattggaactagattggccttatttgtcatcgcactgctcgcaagctgtgctaaggcatcagtagttgtgttttcatcccttagaattttctttagggtgtaacccttgaattatgtgagcaggtcctggatcttgttgagataagtcatcattttttctccacaagccatgtactcccttaagacttgatttaccaccaactatgaatcactacagaatttaatctatttggcatgtacctcccgaggaagctttagtccaactatgagtgcttcatactctgcttttttgttggaggctttgaacccaaatctgattgctttatgtagaggttgctgttgggattttatgccntaaataaaacccatttcaatctaatctaatttgttatcaataaaagatta

SEQ ID NO: 105731 - DNA, 513 bp, Cannabis sativa
taagctttagatggagtattgaggaatgtttcctagcttgaatccatgttatattcgttttatagctggtggaaattgattgaagtggttgaatttaagctcaagttcttgaccttgaaggattgagtgtttgagtatgttttgtgttgataattgtaatctgaattgggggtttattgttggaaattgttgcatggattatgtgtttttgatcctttatgagttgtttgcaacttgatttaatgatttgagagtttgggtgtttattgtcttgacttgttggtgtttaaggtctaaaattcgtgttgcaatgctgttggtttctgggtttgaaacccaggtgccacgtcatgggttgagcatgccgcgactcgcccctgttggtggaacctgagattttgcctcaggtgccgcggcatggcttgggcatgccgcgacccgcgttcgattttctgggcagttttgggttccaactttgaaaatgcattatttttattccgaactctgatttgg

SEQ ID NO: 105732 - DNA, 539 bp, Cannabis sativa
tcctacccaattttaaccaaaataaaaagaatgtccatagtagaatttgtgtttgaagagcagaaatatgtgaattaggttgtatgtcaacctgcacatagggcccatcaaccacgtcaacctaggcgttggggccctgttttagccctcatatgttcttgtttgcttctcgagaactcgtgtatctttgttgtttttgaaaacaaaaaaagttccttgaacacttttcagaaaaaaatacttggaactagcctaggttgagaaaacgtaaacttgggcgttgggaccaggcaccaggtcaacctaggctctaggtcccagttttgacaaccagatgcttctgtttgattctcaaaaatacttgtgtcttaatttgtgatgaaaacggtgaatattcctggaagagttctcacgaaaaatgtttggaaatggcctaggttaataatatgtcaacttaggtgctaggtctcagttttgatccccatatgactccatttgtttcccaaaagtgccagtgtcttagttgttgatgaaaacac

SEQ ID NO: 105733 - DNA, 558 bp, Cannabis sativa
tttttttggaccaattagttatgatttcgataagttaccaattggttacttttgataaaatcatcaattttaaaataaaaagatgaggatcagaccaaatatcctatagtcaaatattccaatactcatatatgccaaacaaacttattagtttattttggcatattgaaacaatttttcattttttgtttacatttttcgtatagcctaccatcgtatatgctaataaaactattggtttattttgacatattgaaacaaatttacatttttcttttcctatattggaacaacaattcatttcgttttatatagcttaccattatatatgtcaataaacctactagtttccgtttgttggaacaatattttatagttttcaatacaaagtaaacgataatcaaacataatgatatacaccaataggcctattagtttatttttcgtatattggaataaaagttcattttttatttcaaacacaatgtgtgctataaaataacaaactaattagtctatttttttcaagtctagacatcaaatctggctgtatacaaa

SEQ ID NO: 105734 - DNA, 778 bp, Cannabis sativa
cctaaccaatgaccatttcttgagcctatatatctattctagagtagagtagtaggcaaagttgtatctttttgtggtaaaatgatttagacacaagagaaaaatcaagacatttcaattatatatgtaatgatacaatgatatatcattatattaataattagttaattagtggaagggatgtaacccttatggaatctttttagttatatatatgaattgggtggttgattggcaatggtactttgtaattttggaggttaggtaatgtgtctaattcactttggtcaattccaaactatttagtttgttgtatgttactttggatctcatttcaatgtgtaaaacactatcaatgtattgcacaggattaaagaatgggactacacacagatatggctattctcatgtttgggtgttttatgagaatgagagatttttttcctgttaattaaattgggattattgtaaccctatctagatggtagattttttgttgttaagaaaaggtggatcatggagattcatatattttttttttgatatttaatccttatttattaattaagattattttattataaatatgaaattgaactcttagtaattatagaattatatttattgggtttaactgtagtgtctcctttgttgtaacatagtactgtgaggagccattgctgaaggtttgctcctagtgtgtaatctttccaagtcaccatgatcaaagggattagactcccaaatttatttagggaagttcgaacttctttaaaaa

SEQ ID NO: 105735 - DNA, 1378 bp, Cannabis sativa
tcaaatcctatgtataaggttaacccagtgatttggttcactcgtagcatccgcttcaagtctcctcgctctttacaggagtccaattgtttcctgggacattccctttccttacatgtgaaatgaaaccaagaacatagcctataaaagccccgagaactaaaatactagatcccttgacaaacacagagaaattggattcaactttacctttacgagtggtttcatcagagtttagatcattgtgttcattatatgtactaactccaccattgagaacttgtcctgatgctagaatctcaaccttatcatgttctataccatcatggtttccaatgtatgaaagagtgagcttctccttcgtggcaaccaaccttgtgtacccaaactcacccccacggtacatagaccgaataggctgtgggaagattgggacatctgggtggtcatctcgaggtttccaaataggttgccagtcttgtccggccatgccaatcacaacatgaacagggtatgccttccatttctcgcctgctatgcctaaacttccacaagtgaagttattcagtggacaaaacctttcataccgatggacgtgaccccacaatgcaagagttacattgttattcactagcaaaggctccaagtgcttttgcattctctccctcatcggaccatctctaatttcattgcttgtagtgtacattggcctgtgcccttggaaaaccacaaacggggtctttgttcgatttacaaactccaaatcacgcttgatgaactcatattgtttgcttcccggaagaaaattggtctcagttgatatataaacgaaatgaacagatcccatatcaaatgaatagaatagattcctagtggccggagctcgggttccagtctgctctgaagagttcccgggcatgttaaacttaaggctgtagggtaccccacattcaccacctccatcttttccatacaccgaccaggaccaatcaggtttccaaggttgttgaggccagtcatactcgtgatttccaatgcaaacatgatatggaagtttagatgcaactggttcaatctgattgaagaactggtcccaaatccaagagtagcctcttgcatagctgagatctccaatgtgtgagatgaaagcaggcttatcaccaagagcttcaatgtccctaaggatccacttaatagtggagatgctctcatcttgagtacggataaaggttgagtaaggtgctgccgttcccatatcaccaaacatgaaagctatggtttcatccgagtccccattacgtgacacaaagctgtgagttgcactccaacctttagaatcactaccaacctgttggtaagtttatgggacagaacatta

SEQ ID NO: 105736 - DNA, 695 bp, Cannabis sativa
ctataatcgggtccgatcctctattaatgcttgattcctgccaaaaacagattagatatcctgattgtatcaagatacaatcgaatcaataagaaaacggcaataaacaaggtttccttaaaaaacacaactttccaaaagagaattgcttctctttcaagaaatttccaaacaaaggaaagttcagctgaaaagtgcaactttcctaacaaggaaaagagcaagtaccaaccgaataaacaaggtaagaaatcggttatgaatgcaaaaaatattttgtcaactaacttgccaaaaaaaagactttacaaattttatttttttttgtgaaatgagtaacacaataaatatagtagttgataaatagatgcaaattatgtccttttcaacttttataccttactaattaaaaactaaaaataaaaattattaattattgtaacaaaataaaaactactatcatgtgtatcacttattttacaaaaaaaattaaatataatatgatggaatgaccaagttaatataaaattataagttaatataataaattcaagaagcaaaattgctaattattctaaaaaaaattacataatatttatatatatactatatatgattgtatatgtttctcattagtttgtattaatcacaacattattataaatatctcataccatttatatatgcagggttag

SEQ ID NO: 105737 - DNA, 805 bp, Cannabis sativa
acccaacaacaagaagaattggaagaatagcaagaagcctcttaaagctatgaaaacagttaaaaagaaaaagcctgctaatctcgagggaaagccaaaatgaaaatgcttctattgcaatgaaaagagccactggaaaccccagtgccctaagtttctagcaaagaaacaaggtatttttgtctatgctataaactcatgtgttttagagaattattatccccttgggttattaattctggatctactaaccatgtttgttttcttcttattttagctccagctgcttaaacttggattgttatcctagtgagttgagtcggatggttggacagaagggtggagattgtccaagattgaagatgaagctcgaaatcttcttttttaaatttttgaattaattgttttattttctgaacaatttgatttcaactattggtttgggattttattccctgtttcaattttatgcagacaattcatttaatttttgagaatattaatagagttttctcttttagtaatgaattgcatttatgaattgagcttcatatttctttatcttatgtatgccaataccaattatatttgtatgtttatcatgtatgtatgtgtttgcattttattattgctacaaaacctatggtatattcttctatgtaaagagataataccacataaacattttgaatttcaatttaatgtttatgaataattgttatttcttaaacaattattaagattttatttaataaaaagatcttttgatctgatagcggtagaaaaagttaagaagtaatatatg

SEQ ID NO: 105738 - DNA, 724 bp, Cannabis sativa
taagttcctcctccagtcgtttccaacgccaattctcctcgtcccgaggcaacccccgatactgcttcttcgagcaaggccattgagaccttgtcgaccgcagcaggggaggtcaattctgaatttgcccaagcatatggagtcgcttgttggtgcaaacttcaaacttttcttccccctgattgggattttctcaatcttaggagcccaaaagagatgctttgaggagcttggactataacttcatggtacgttggctttgttattataattatattattctttttatacctctatcatattcatctatttccaattctccaagctttttttgcttccaatcgactattctttgagcggctcgaatacttggagggcaaggtccaaaaattactatcctaatgcaaggttgtgagtaagcatcagaatgacgcccaacaagaaaataaacgtcttatgcaagaagccgagaaagcaaaggaggaagccgagaaggcaaaagaggaagccgagaacaccgtcaaagcccaagccaatgagtttgagaagaagcttgctgaaaaagaagtcgagatcgtagaacgatgcgacaaggttggtttttgcaccgtgtattgggcctggatggcgaacaataatatggacactagcttcttggaggagaaggaagagaaaactttagctctttgcgagaagaccaggatggaggaagaagatggcgagg

SEQ ID NO: 105739 - DNA, 2321 bp, Cannabis sativa
attaaatctatctatttggtgagattatataactgtggggatattattgttctttaatatatgagtggtcctgattttgttactaatatttcttattaatatcggagttaatccattacttttaaattagtattttgtgatataaattaaatgatcatttattagctttatctatctgcaagggtcaaagtgtgacctttgaccacccaagttatggatattacatatctgccacggcctagagctcgagtcgtgacaaagaggattttcatagtaacatcaatgtataaatttttctgtgtgctttttttttttcttgtatttttattgttcactaatgtatactgtagttatagtcttatagaatcttaatttgtagctacggaatattagttttagtattatctttattattctatttaatcaattgatcattatttaaataaaaatttagcaatattaaaatagggaataatttcatttgtttgattgtaaacagtataaagacttttgtccagattatttgattcaattgaacaatatagatttctttgagcaatttctctatcaattcatttcctaattaatttttattaatttatttagtttttcaaacagtcttaagttaacacaagctctctcatttgtctccaatatataatgacactagtttagatattgtgaaacaacctcctttgatatatagcactgatcatctcagccccaaaatataatggtcaatggttcttgaactttctaagatttggaaagttgtttatttatttagaaagttaattatcccctccagtcgatatttggtgtgtcgaagacttgaaaatttttcctttattttccgtacttcagccaaaaagaaaattgttgaaaaggttttgatactgtgttgaaaatgacaagtacataagaagagagaagactttggaggctatgatcatcatctctcctcatattaatttttgtttgggtttttaggcaatattatttaaaggacttgtcagctgtgacaacacaataaattgttaaagaggccttgtaaagtgttgaagctgccaggatatcagacaaagcataatgctccaaactcttctgattactcgatgcttattttgattgacacctttacaataattatttatcactatttctctacataaataatattggatatacatatacttttgagatatatatactacattatttaaagatatttaacttcacatgatgtgagtcacattaattatccggaatttttatcattatcgtaaatatctgtaaacaaaactactgtactaacacaaatttaattaaaaataaaaagcacaaaaacaaaactagtactgttcaataaatacatatatgccaataataaagttaataaaatagatattaaaaaaatggagtttgtaatttcatttgatttgattcgttctgaatagactatgagataatgatctttcagcccagaggagatttaagagtacttgttatttttctttattttgcaaaaagcaactcatccagagaagagttaattctataaaaattaatcagaaaaatgttttttttctaatagtacatattactttttaaaaaggttgaggtctagtttcataatatacaagagtataggatgtatagtctagtaggtattaataaattcagggaatttttgttccatatagtactatttccttagaaatcattaccattaacttgaaaaaaaaaatgggtatgaaataaagtgaattttcgcccaaaaaaagtgaaatccaaattaagtcagcggggcatatatgaatgatttgaacgagaattccaaagcttaaagtcaatattgtgtctatatatagatacgcgtaagaatttgttggactactaagacaaggctcccgtgatgtaagactagtttgtgaaatatatgtacgtattgattaaattagggatgcatagtagttagagtgtgaaagcctccatttatgtggttttcattacgtacgtactagctaacactgcatctcctgactgcattattattccaaaaaaatatcagacacagttgtatactccattactgcactcctacgtacatgaattgtcaattactatttccactctcttttataagtttttcctcccttaaaaaaacaatcaacacaatagcataaaaagaatcactgatgatatgtaacctataaagatcttgtctataacttatatagctagcttgaagaatgatggagctcaaaaatcaaatcataattgaataaaatatggaagtatatgtggataacatgtttgtc

SEQ ID NO: 105740 - DNA, 541 bp, Cannabis sativa
tcgagcttcttcttcttctcccggaatttagcaatcatctccgcgggtttggggtagaagtcgagcttgatattctggccattttttgagcaggccatgtaaacgcgatcgtcgaagcgcttgatgcactggctgcaaaagacgggagaaaggagctcatctttcttagccttctccaaggcttggtctttgaagtccttgagctccttcagctccacgaccaagtttgccctagactccaagtccgcctggtgcacttcctctaatgacttcaccttggcggccatttcatctaaggcttccctagcctcccagagctcgcgtctggccttggcgacagcctcgccctccgccgtcagctcctcctggtgcttggcctcaagcttgtccctccgaagggcctcctccaggatcatcgcctccgcttgggcttccctccgcctggcctcttcctcgaacttggccttggaaagggcctcctgtcgctcagcatcctcttggtacgtctgcctttcaacagacagatcctgcagggtcttca

SEQ ID NO: 105741 - DNA, 527 bp, Cannabis sativa
  modified_base (276)..(282): a, c, t, g, unknown or other
attgcgcctgttccacatgcaccttggcctataaaagccaccacctttctctcatttggttactttcatcttttcgccaaatttcttcgagctttccagagagaaggaaacccttagaccagaacaccttcaaacacttacagatttcttattaacctttgttcgttactgtcagtctacatttcttcgtcgatcaacagcaactcccagttctaacactttatgtaagtttttcgcatccctcactttactgtttgtgttcatggcatgctttannnnnnntctgtttttctgggtttaatgttcgatgtttctgggagttttttcgcctcgattttttgcgtaatacgtttagatttctcttctctggtgtttgggtcactcttattttgcacattatatttttcaaaggcccctctgtacctttcgtgatggccttcaagggtacagagaagactttgtctttctcgatttctgccctttctctttcttttccttactttgcttatgtgtaatgtcaccatctg

SEQ ID NO: 105742 - DNA, 505 bp, Cannabis sativa
acttagcttctcttgctcgttgctcgtcaattctgccatgccttataaggagactttgtcttactgttgacaaggttgtattccacgtgttctcagtctcagcttacgtggacatgccacgtcaggtggataaaatttaggataacatttttctctaagtccttgtttgaacatctggtcatataaggactttccaactctcgtcttgcttgtaatagcctctatcgagcgaccttgtctggccaagtgttggctttgtgcatgacatgcttttagatctttaatcttcactctccatatatgcctcatcttcttttctttgacatctcttctttgaacctaccattgataagtttcaagctttttaagcttttagaaactttttaattctcacattagattttaatctttttggtattttaattcgcatgataattttagagaccaagttcccttggtcgaacggaagctcccttagttcggaagtcacttcttggtcggccag

SEQ ID NO: 105743 - DNA, 1040 bp, Cannabis sativa
  modified_base (331)..(331): a, c, t, g, unknown or other
  modified_base (359)..(371): a, c, t, g, unknown or other
  modified_base (988)..(995): a, c, t, g, unknown or other
tgacacgctaaatcacaaccgggacaaaggttttaaaaccactcttaacctactgcaacttaatacaaaattaccccaaagtagcagggaacaaattgcctgaaaacctgaaactagcacaaaatgacaagctgagaaaaaccagttttcaccgcctgctgcaaaatccgggtaaccagttttacaggcagtgtaagccgattttacccagaaaaccctcaaagctcaaacccctaaccaaaatgtttccaaactcaaccaaactttacagacctgctaattagaccctaataaacatttcaaaagcaacaaaacaaccctacacgcacanaataaaaatccaccattaaagctccaannnnnnnnnnnnnaactcaaacttggttaaatctaataaccatgcatcaaaacttaatttaatctactcaaacaagcataatataactacagaaatcaaacccacgcacaaacaaccactacaacaactaattcctcatttcactttgaaaatcatagtttttgagccaaaactccaaatttgaacaaaggtaactagcatgcatcacaaccagctctattctactcaattaaacatgtttaaacttctgaaaacaacaacaacaattaacagcaactatcaacatcaaaaccaagcatgcaaccattttctacttccttaaacttcaagaaactaaaaggaaaagctacaagagtcttaccaacaacttgagatcaaaatctatgctagaaccagcttgaattaccaaggaaaacaccacttttcttgctgctcaaagagggccgaaagagagagagagagttgagagaaaattttgggttttgcttcttttcttttttccaattttgaataaaagacaaaatgcataactcttttttatttcagctaacataaatcaataaatcatatgtttccatatcactaagtccactaaaggacaaaaatacaaatggggcaaaatgaccattnnnnnnnnccacactaaaataacataaaagggtactaaggggtattttgggaa

SEQ ID NO: 105744 - DNA, 582 bp, Cannabis sativa
ttgaaaccgagtataggtggtgtccatgccttccacgaaataatactcgtcaacaaaacccctgagcttgccaacgaccttgtccacggtgcctatcaaccacttgaaatctggctgagagaagtagaagtaccccaacctgctttgcttggggtagacttcaggtcaaaaaaccaactgatctcgtgcggagacggcacaccccatttttgaatggcgtataggatgaacagggcacacaaatacttaatgcccttgggaatgaactgggtcggacaaaggaaaaaataatctgccaccttcttgaagtatgagtgcaaaggcaacattgcccttgcttagtatgggcaactaaccaagcagacatccctttctacgggttcgtggctcagtgatttgatgaagggacgtaacactcaagtccgcccagatatccagccttgtccaaggccctcatgtgtgcctcactgatcttggacaaagggctcacccaaatgaagcggtcgtacccttctctgatgatctgctcagagtaaaaatggtgtttccctcgagttttggagtaggagaatgatcactact

SEQ ID NO: 105745 - DNA, 753 bp, Cannabis sativa
ggcatggctgatcttcaccatacactctcccagggtatggtcggccagcccctatcttttcaaaatctgcagcctccccaaggagggccagccaatcaagtccccataacaatagatccttctgtgcaatcacaattggaccaacttagggacatgatccagggcatagctggcccaaagccttcagacattgaacttgatcggtcaaggaaatcaccattctcagcatatataaatgccttacccctactgaagttcaagatgttggtatggaagatgtataccagacaagaggacctactggctcacatcaaatacttcgagatgcagctcgacctccaaaaggtcactggtgatgtgtgttgttgcatatttccaaccacactatcggagatagcccaacaatggtactttaaactcatcccaaggagattcaactcctggactgagttctcacgagaattctacacacaattctcatcctcaaaacttgtaccatcatagctggaagaccttgtcaaagtcaaacagcgacaaggggaacctctaaaggattatattcagagattcatggtcgaggctaccaaagtcaaaggccttactgaaaaaggccaatatatggccttactggggggcatactcccactaagcaacttctggaaagatatccggaggatattcaccaacaacatgaaggagtttttcgatagagcagatgattttatcaaacttgaagaagccatacgacaggcc

SEQ ID NO: 105746 - DNA, 678 bp, Cannabis sativa
tagatcgagacccgggaacgggaccggaacaaggacctggacctggacttggaactcgaaccgtaacaaaacctagacctagacctagacctaaaaccgtaaccggaccaagacccgaaatccaacccagacctaggcccgaacctggatcccaacccatacctcgactcgatgcagaacctgagacccgaaactggaacctgaacaagaaccgccagaccaggacccttgaaaaagactaggatcgtgacgaggacctagacccattcctagaaacgaactcagacctagccccaaacccaaaccgagaactgaactcgagcccagacacggtctgtacccagaccgggaccgagacgcgaacccggacatggacctagattctggaaacgatcccaaacccaaactttgacctagatatccgaatacaaacctggactcaaacccagaccgagatcaaaactcgagacctagattcggacagagaccctgtcctagaaccacaccaagacccgcacctgagacccaaacccagacctgaacccgaacacagacccacaccgggatttatacttagactcagaccccgacccaaacttagaccaggactcagacctcgacccaaactcagacccaaacccgaacccaaacactgaatggaaattgaaactgggacta

SEQ ID NO: 105747 - DNA, 665 bp, Cannabis sativa
agtctattcgggcggcaaaggcagaagagttcatacgtttgactcagggcagcatgactgtgacagagtatgccactaaatttgatcgattggaaaagtttgcttcggatgagggggctactgaagctgctaggaaagcaaagttcattcgagggttggatgaacatatcgtacgagatgtgattattacttctaaacaaccgggggttgctcgagagcttatgctcagacaattgaattggccctagtttttgagggtgcagaagctcagatacgaaagaaaaatattgcttgaagggattcatggaagccaacatcaagtgctgattccggtgatcgcaagaaaagatctagtgaattatcagctacaggcccaaataaaaggttccagggtaaccaaggttttcgtcctggtgggaacgaaaactggcagacttttcctgaatgaccgagatgtaaaaggcgccaccagggggagtgtcaggccagggcctgtttccactatggggtggtgggtcacatgaagaggaattgtccacagctgctacgactagagcaaaagagggatggtacacccgctcttgctcgagtgtttcccctgactcagactgaggctgatactggtccttctactgtaacaggtcagctttctgttgctggtactt

SEQ ID NO: 105748 - DNA, 512 bp, Cannabis sativa
tgtaatcatcaagatgtcttcgaatttccttggattcatccattctgagagtatacaacttcttcttgagatataatttattggccagagatcttttcatgtagatagaagccaatttgttccataatccaagagccttttctttactagacacttctctcaagacttaatatccaaggctgagaaaaatggcactgtgagctttagattcaatctcaaatttccttttcttttcatctatctcattcatagcctcaatatccaatgcctctgaaattccctgatgaacaagaaacgctttcattttaatcctccacaaactgaagtcatttgtgcctgtgaatttgtccacctcaaatctggttgaagccattatgcaccaatcttgatttcttgcacagagttcttgaaactaatccctgatctcccaactactctgataccatttgttgtgcactcaagcaccaacaagaacacaatgcaagaataaaatggcttagaatgataaacca

SEQ ID NO: 105749 - DNA, 1042 bp, Cannabis sativa
  modified_base (993)..(1006): a, c, t, g, unknown or other
aatttaagtaaaattataaaactaatgcaggaaaaaaataagggaaaatagtaaaaaaatctatatttttttttttaaactgtcgcctatagtatagggaacggtttaaaaccgtcacctataccatgttatcggtgatggttttaaactgttggaaagtccatattagcgacggtttttaaccgtcgcctatttttcccgttttgcgacggtcgtataggcgacggttatagaaaccgacggaaatactttaaacgactgtttaaaaatatcgggaaaaactatttttgtagtagttaattagattctaataatatttcaatttagcatgagatttttttttaaaaatattaaaaattgcaatgtattattctttctcaattggcaactacatagttggttgaaaaaacttatgcatgggaagtaattataatcaatgaccttattcatattaaattttgaagaaaaaatcactaaatataaattagtgattaaaaatatagtttttaaaaaataaaattaaataatatggaaaacaataacatccttcttttaaatagaaatatgtaattttattaactcaaatctttaaaattagaacatcacgtaaattacttaaaatcgtagaatttaaatatatacaactagcatttaattataaagctctagttaaatagtaagtaacacgattagtagatcgtttaacaaaaattaaaaaaacattattcaaactagaagatccgtatgcactctgaaatgtaaaactcaaaaaaacattattcaaactagaagatcgtgaccaaactgtctgactctaccaccacattatgttgctccaattctttcaaccaactcaacacctctttaactccaatagcttcaacaagaacagaatcaaaatttttacttatgttatttatctgtaacaagaaactaaacttaattaattacattgcaaattacttttaaaattaaggctaattaggatttttnnnnnnnnnnnnnngacatgtaccaaattatgctccctaaacttttaagg

SEQ ID NO: 105750 - DNA, 950 bp, Cannabis sativa
aaatccagtgcactgatgaatcagagactttgtcttttgaagcatataatcacaatcacattccaatgtgttgacatcactgtaattgtaaatgactatatatgttacggacttaacaaattttgtatatattaaaccataaacttgaaaactacatgtaaatataaatgacttctaatcttttattgataacaaatcagattagattgaaaagggttttatttagggcataaaatcccaactgtttcatcataggccaaccaaatggcgagcatcggattgcggtattattcttgaaaaaatccacaagatgcaccatagttggcctagtaggaacttatcctttactggaggagcataattaattcactctattctgtaagagatgaggaactactggatgagtttattcattctccctcagaaaattactgttgctattgacaaatgttttagagattttctttggggaatgaagggaaatggaagcaaatttcatctaacttcttgagagaaagtttgccttcctaagaagctaggtggtcttggcttttgtgaagagaagaaatggaatattacctgttatacccaaaatttggctggaggacacgtgtcaagaaaagggaatatgaatcgatgcgatagctttttatggaataactcattaattaagtaagtatcagagtatatttttaacttgctgactgtaaggtcttaggcaaggaatcaatgtacaaactggcacttagtgtattagcaagaaaccatatgtcgctaaatatgaatagcgaggcaccagagaaagtggcaagtatcaagcatgaaattccttagcatgcaatgaacaaactaagtataaaagtcagatcagctcaagagcaagtaagcgaggtgaccgtcttgctttgggaaggcttcctataacatctgtaggaatttattttaccagg

SEQ ID NO: 105751 - DNA, 554 bp, Cannabis sativa
ttactcagttcatccagggtcaacgaagatgtatcaagaccgaaagaccatgttctggtggccaggcataaagaatgacattgcttagtatgttgctaagtgtctaacctgtcagtaagaaaaggctgaacatcaaaagcctgcagggttgctgcagccattaaacataccagagtggaaatgggaagatattgctatggacttcgtggtaggttttcctagaaccacgggacaatttgactctgtgtgggtcatagtggataggtttacaaagtcagcgcacttcttacctgttcggacgaatttctccattgataagtatgctgagttatatgtcaaagaaattgttcgtcttcatggtgtcccaaagtccactgtttcgaatggagatccaaaatttacatcaagattctgggagagtctacatcgagctataagtactcagttaaagttcagcacaacatttcatcctcaaacggatgggcaatccgagagcactattcagatcttagaggacatgctacgagcatgtgtgcttgactttgaaggatcat

SEQ ID NO: 105752 - DNA, 592 bp, Cannabis sativa
aaaattttacaaatgattccgaataactagaatgtacataataataaaaattatttggtgtaaaaaaatctctcctagatggaagaaaaagttatagggtgtaccgaaatgaccctttaatagaatgtactatagaattatctaataattaatttgcgaaacatgtaatatacataaaaatatcttgtttaatatatagtacactccttaaaaaaatagttattatggcacacctctatctgtttcagtatccaaaaaaatttgttgttctattttgtttttatgttcgtgtacgtttgtaattatttcgtatcacttgtaagttttttaaaaattccaaattatagtgtcaaaataagattgaaattttttattgcactcataattattttttttatatgcgtgataaataattgtgtgaactttattttcagtactgtaaattattcaaaaaatttaaaatcgatggttaaaaaaataaaaaagatattttgtagttatagtagaaattacaaaagaaaaattataatattgtgatctaattttagtaaaattaaatatttaattgtatattttaattgagaaagataat

SEQ ID NO: 105753 - DNA, 4058 bp, Cannabis sativa
  modified_base (2547)..(2553): a, c, t, g, unknown or other
  modified_base (2599)..(2614): a, c, t, g, unknown or other
caagtggactagcctattaccgctgaaagggggtgaaccactataaaattcttgtgttcgtttatggtgaatttctttttgcaaaccggtttactttgattaactactgcttgtgttcatctttctcgttttacgatcttcttagatccgttgacgaaaaaccgcgtcaacagatcctttctctcaattagttctcccaagcacaaatattcaaaacactcctgtctgtgattaccccacaaacaacaatattagttcttgcctcaacaggtacatgaagacatctcagcacctggtaacaatgataaaggcactccacaacctgagaacaatgataaaggcactctacaacctgattcagctgctgcttcagatacttcaacatcagctcctccagatccaccatcacagcctcccagaagatccagcagacaaacaaaaccaccctcataccttaaaagattttgagtgctactcaattcttcaagaccaatcatctgcacctcactatttgtccaaatttctatcttattctcaattttctgatccttacaaggcttttgtttttgcagtttctgctatgagggagcctcaatcatatcaagaagccatacaatttgaacaatggctgagagccattcaacatgagctaagggcactcatacgaaacaagacataaagtgttgtcaaactacctccaaacaaaagagccatagggtgtagatgggtctataaaattaaattcaatagtgatggaagtgtcgaacggcttaaagctcgacttgttgcacaaggttatacgcaacaagaagggctagactttttcgatactttttcccctgtggccaaaatggtctcccttaaacttttacttgccatttctactattaaacaatggcatatcttgcaactagatattgacaatgcctttttaaatggtgacctcaatgaagaggtctacatgactcttccaaaaggcttaacactcgattcttctcttactacagaaacaaatctggtttgtaagcttcacaaatcaatctacggactcaaacaatcctctcgccaatggtacaaaaagttgtctgatgcattactcgaagaaggcttcaagcaatcacaagttgactacactttattcgctagaggctccaacgaaactttcattgctctccttgtttatgtcgacgacataatcatcactggccctaatcttccacttcttcaccaattacaagactccctgcaccagaaattccaactcaaaacacttggtgaccttaaatactttctcggcttcgaaattgctcgagcaaaagaaggacttttcatctctcaaagaaagtacacacttcaactccttgaagatacgggatttcttggcagtaaaccaagcaaaactccaatggatccaaagcttcgactcgacaatgaacatggagagaccctggacaacccctccacatttcgacaaatcattggcaaattactatatctcacactgtctaggccggacataacatttgcagttaacagccttagtcaatttatggccactccaagaacacctcacctccaagcagtccaccatttactaagatacctcaaaggaaatcctggtcaaggactcctttattcctcaacttcagcacttaatctacgaggtttctctgactcggattgggcatcttgccctgttactcgacgctcaaccactggatactgcatttttcttggagacagccttatatcctggaaaacaatgaagcagcccaccatttcgaagagctctgctgaagcagaatatagggccttggctgctaccacaagtgaaatcacatggctacaataccttctccacgattttcagattccacaacagcaccctgctttcatatattgtgacaattagtcggcaattcacattgcaaataatccaacattccacgaaagaaccaaacatatagaactggactgccattttattcgtgataaaatcaaaaactctactgtcagactcatccctatcccaagttcacttcaactagccgacgcattcaccaagcctcttacttctccccttcttactaatcacatatccaagatgtccatttccaacatatatgctccatcttgaggtggggtattaggaattatgattagttagttagtttatacagtttactggttttactgttgtatagggaagtagttatttcagtaaacttctttccctctttctcggtactatgttatttgttagttgctataactaacttcctattctagctaagcatctagttgagtgatctctctgtatatagatacctctgttttcattcttgtaattcaacacaactttctcagattaatgaaatgtctttgcttctttttcataatatgcatttttacggaactttatataaaaacatctattacaactagcgctgcaacttaaatcgcaacaaaaaattgtatagaaacccctattgcaactagagctgcaaccactttagaaatccaaactgaaaatttaaaaaaaaaaannnnnnnaaaataatatatagggtaattctttttttttatattattattattnnnnnnnnnnnnnnnnttattattattattaaaaaagaaatcaagtaaaaaagagaagaaaaaaaagtcaaagaggtttgactgtaatatttcacactgagataaggtcacacctttttagtgaaggacctaattgtttggtaatgatgtggacacaagccaaataagggcataattctttgagtaaagtgattttgtttaggtaagacaaatactgttagtttttcaaaagcatttattggaaattttgaataaatttttacaacagtgacacgtcttggacaagcctacattttctttcatgccaatttatttatttattttctaaaattgttttcctaccatcatcatcatcatcatccataattctgaatttagacaaaacatttttgcaaaaacctggactatattttaaaaaaaaattacactaaatactaatttttcttcttctaaattttacatttgataagtaaatttttatatttatactactcctgcttaatatttttaagaatttttatataaatgctcatatacaatttataaattacaataataatatggcataaaaaataaaaatttatacaatttcatatttatataaatactgttgttcaaattttttatttacaaatatattgtatagagataaatttaagcatagttataaataaattacctgcataacaattaacaaaaatatttttttaaaaaaaaataacaaaaacaaatacttaactaacaatcaatataaaaataatcttaataaatgtattcataaaatattgcatatgtttattttttttcttaattgaacaattaaatagtaacaaataaacaattagagagcaatgcactttaatatgaaaattaattacacatcagcacatctcgtcaacttagaaaaaactgaaaaataacacataagtaatccaaaaaaatttacaaaatacttctatatcaactcaaatatataaaaacacacacataaaaaaaaaaatactcattttttattggtttaacaatcaataataactaagaagcaactacataataacactacttaaatataattcaattagacattaccaaaaataacctgaaggaaataataaataatctcattgcagcaaaagtaactacatataacctgatttatgtaaaataaattactttaaaataatataatttcaattattattattttgataaaattatatatatgtataaataattgttttttaactttattggacaactaaaaataacaaaaatacaaggaaaattatagcaaatgacccagccgaatcataaaactatattagtaaatatcatcattttaaaatttgtagagaaatgatcttttcagattatttactatttattattgttgtatagtatatactattattcttagatgatatttattttttatttttctatgtataatagtggtatat

SEQ ID NO: 105754 - DNA, 625 bp, Cannabis sativa
  modified_base (470)..(470): a, c, t, g, unknown or other
taagacacttagcaacatattcagcaatgtcattcttcatgcctggccaccaaaacatgactttcaggtcttgatacatcttcgttgactctggatgaactaaataaggggtcgtatgagactcatccatgatctcccttttactaccatcatccatagccacacaaacacgatctccgaatcgtaacattcccgttacatccattgagaaatcactagccttcccagccgaaaccctagctcaggtttttaccaactctggatcttgcatttgtgcttctttgattttgtctaaaagagtagattctagggtaatattagccaatcgccccacaactaactcaatcttagcttgggtcatctcatttgctagctgctgagagatttgtttcacagtgttcaactgactttgcccctttctactcaaggcatcgacaaccacgttggctttaccagggtgataaaggatntcacaatcataatccttcaccaactctagccaacgtctctgtctcatattcaagtctctctggctaaatgttaggctatttttagcatacgttttgggtcactttttatagttgttttccttctttgttattctttttggaatagaattacgctt

SEQ ID NO: 105755 - DNA, 1046 bp, Cannabis sativa
cctttttcaaatggatcccacaactggatgctatcacaccatactgaaggtagcccttttctatgatagtgcatcttcaatataactcttaattacaacgttccagcttactcaaaagatggctttcaaacctcagtataggtagctctatcccagaaaggggcctgagaagaaactgaaacaagaaacgctcaactctgtataagaacattatgaatcccaatcacacataaaatgtaacatgaatcttttaactcaacctcaaaagtatgataagtacaagatcctaactaattataaaccaaaagcatagacaagatttgtcaattaagaatgaaactagattagatgcaagcaaagaacaactcaacaatattgtacaaaaacaagaacaagagagactagacaatgcaaactcccaatgattttctgagggagtcaaagcaacttgagtctaggaccttggtgaaaatatcagctaattgtttctcaggatttttggaaatattgattgcactagtgttatcacaaaaaatagttaaaacacccaattcaaatccatagtcaatcaacatttgtttcaactataacaattgagtacaacaactaccagcaacaatgtactcagcctcggcagtggacaaggaaatagaattttgtttcttactttgccaagaaaccaaattgtttccaagaaagaaataacctccacttgtactcttttgatcatcagcattttctgcccaatctgcatcactaaaacaagccaagttagaattagtgtctttagaataacagattccaaagtcaagagtactattaacatatcaaataatcctttttacagcaaattcatgagatttcataggattactttgatatctagcacaaactcccacactataactaatatcatgacgactagcggtcatatacaataaactaccaataatactacgataaagagtagtgtcaaccttcactccattctcatcttttgttaatttcaaagtggtgctcatacttacctgtttagcctactcaag

SEQ ID NO: 105756 - DNA, 993 bp, Cannabis sativa
  modified_base (795)..(800): a, c, t, g, unknown or other
tcaggtcaagaaaatatataatatatatattttttttttaatcaaaaaaaaaatatatatattatatattttcttgacctgagttgtcctggctagaaaattagaaataatggtgacagcctgtagaaagtttaattcaaccaaaagaaatcacaccaaagaagaagagaattcaatattcaagatttgagatttgatttgatttcacacagcataatatttaataaatatttacagtttttttttttttttttaaataaaatcatacaaagcatcatatttatgaaattattatgtgaaatatttacagaatttagaatgaaataagctttttattttatttttctcatagaattaaaataaaatggggggtacagtatgaacggtgtgggcagaactttgtcagaccaataatacttctatgcaaagtagttatctaaaagtataaaagaacaaataatataaaatgattattttcatttatgttgctaattgaatataaatatatatattttaatattatttggatttataatatcatctctacaagtgttcggataagagtgcgtaggaaaggagaatgtgttcctctagtctctctagtctaatctctccttatagttaaaaaaaaagaaaaaaatttacataagtgtcgtttggtaacaattttgttttctaattttttaattacaaaacgaaagtaaaatattttgtttttaaaaattttgctattgaaaaacaaaaatgcgttcggtaaccatttttgttttttaattttaaaaacagaaaacaaannnnnnttctgtaaagtttatttttattttcattttttgattttatttacgtcgcgtttaggtctgggtcggattttggttcaagtgagaggccgggttcagcgccagggtcgtggggggattcgggtctgggtttgatcgaagtccaagatattgattaagaaaaaaaaactcattaaaaaattattgaaagtcattt

SEQ ID NO: 105757 - DNA, 591 bp, Cannabis sativa
cataatgaatacaaacaagtaacacgcaataactcaaactgattacaattaaaaacaaagaagaaatcagttcttgaaacactcaaatataaattaaagacaaaactagtttcacaataaaatacttcataacacataataccttataaaaccggttataatagtttttttttaaaaaaaatagggatcaaatgtctcgaatataattaaaatagaaccagttctataacataatgaataaaaataaataacacacaataactcaaatcgattataattaaaatataaccgggtctgtaacacaatgaataaaaatacctatgtaataatcaaatataaaataatctttttagcaacacctacaacaaccacatgtacaaagaacaaggaaacaaagaaaaaaatataataactttgataggaatatttccaacaacactatgtaaaaaaataacaaagaattgaatactacaaccattttagcaacacacacaaaaatactttcaataatcttgtgtaaatagaaataataataaaaccgagcaatcattttagcaattcttgcaatttcacttataacaactaactaat

SEQ ID NO: 105758 - DNA, 511 bp, Cannabis sativa
  modified_base (279)..(292): a, c, t, g, unknown or other
tatttaacttttttacatatgtgtatgttgtattattatattttttttattaaagatataatatttaaataatattaaaaaagaaataaaaaaaattgatagatggtataatataaaagtgtaagagataaaataaaaaaaaaaaaaaataccattttagactttatgttttgtaaaatttattaattggacggtctgttttgttaaatgacaaaatagaccatatattttccaaaattaaaaataagacactgagctcaattttcaaaaattttattnnnnnnnnnnnnnnaactttaagacaatttctaacatgaacataaatagaaaatgtacccagttttgtcattatatctctaaatcaaaatattattatgttttatttggacaaaacatgagttcgggatcctatttgtataattttagaaaataaagagtttattttgttattaaacaaaacatattagtaacttttgtaaaatataaggtctattttcaaaaaaaaaaaaaa

SEQ ID NO: 105759 - DNA, 1020 bp, Cannabis sativa
agtttgtgtctaaaagagctgaacctgctactggaaatagatttggttaggccatctgcaatttgatccacagctggaacatgtcgaacatcaacaacatgctgcaagatcttctctctcacaaagtaaagatcgagttcaatgtgtttagtgcgggcatgtagcacaggattggctgtcagaagaacagtgctgaggttatcacaccaaacaattggtgttctggttggagatgcatgaagttctgacagaagagacttaagccatgtgatttctgcaacaacattggcaagagccctgaactctgcttcagtgctagacctggaaactgtgtgttgtttctttgatgaccaagcaaccaggtttgcaccaaaatagatggcataccctgaagtcgaccttctatcatcgatatctgctgcccagtcagcatcacagaaggcagaaacatcagtgtgtgggggtttcttcaggtgtaaaccatgattcatggtgccactaagatacctcagtatccttttaacagccacccagtgagtttgcaatggattgtgcataaactggcatactttgctaacactgaatgaaatctctggtctggtgatggtcatgtattgaagggctcctacagtggatctatacaattgaacattttcaacagggtcactgccatatgcagacagtctgaggccactggtcattggagccgatgatgatttggcctcttgcatttgagttttgacaagtaaatctctaatgtacttgctttgtgatagatgtagaccatcagtagtgtacttgacttcgattcccagaaaataactcagatcaccaaggtctttaagtgaaaactcagtgttcaaattggatatcagttgagtcaccaaggcagggtcacttcctgtgacaatgatatcatcaacatacaccaaaacatatattgtacctcgaggagaatgttgtatgaacaaggaatggtctgacttagaagacacaaaaccaaacttgcagagagagaga

SEQ ID NO: 105760 - DNA, 581 bp, Cannabis sativa
tcggttcgggtttaggtctctgtttgggttctgatctagggtctcttttgggtttacgtcttaatcctagtcctagtcctagttcggttctagttccatttacgattctgagttcgagtttggttttgagttcggatcggagttcgagtcatggtctgagtttgggttcgggtccggatttcagtcgaggtctagatcaggctccgggtgtgggttcgcgtcctgggtctttgtctagggttagtccgagtcccaagttccaatcccgatctgagtcttgattcagttctgggtctaagtccttggttctgatcctggtcaaggttcgagtttgggtccgggtctagctttgggtctgattttaggtgtgggtttttagttcgtgtttgagtctctgtccaggtttgtgtccaggtctggaccccgatcttggtctaggttcgggtccaagtccaagttcgggtcccgagtccgggtccaagtttgggtttgggtcaggaattcaatccagatctaggtccagcatttcgatccttagtctgggtcttggtctgagtccaggttcgtatccggatccctat

SEQ ID NO: 105761 - DNA, 1220 bp, Cannabis sativa
  modified_base (119)..(123): a, c, t, g, unknown or other
aaaatacccagcgaagagacagaataggaggcccttggattccgagaggcaaggggcactaaaacaggaagttgacaagctgttacttaacgattttatacgcgaggtgttttatcccnnnnngatagccaatcctgttctcatcccgaagcctaacggaacttggagaacttgtattgacttctctgatttagtaaggcgtgtccaaaagattgtttcccacttcccatgatggactagtcagtggatacaactgttgggcacgagcttatgtcatttatggacgcatattctggatataaccagataaaaatgtatgtcccaaatcaagaacatacaagcctcgtaaccaacttgcgactctattgttataaagtcatgtcgtttggagtgaagaacgctggggcaacatatcaacgaatggtaaatgaaatgttcgcaaaccaaatagggtagagtatggaagtttacgtcgatgatatgttggtaaaatcaataaaaattaaggatcatacctcagacctcacagaatgctttaagatattaacgaagtataacatgaagttaaacccaaaaaaatgatcctttaaagtttctcctggaaaatttttgggattcatagttaacgcgaggggtattgaagcaaattctgaaaaaaattaaggcattaatagacatgccatcactgactgtaacgcccgtactttttcataaatactaatttagttacaagagttaaaatgataaaaaactgtaatgttgcttttatttgtaaacgtaaaatatttcatatttgagctcagtttggactttaaagacataattattcataaataaaaataattgcgacattaatttaataacacttaataaaataaatagagcgtgccctaggccacccttaattatatggtcctcagcgagtacacacacaagcctccaaggtctcacttgccaccgacttctaatttttacaatattaatctgcacatggtaagtttgataagggtgagctactaaactcagtaaggaaatgcttgtcacgtagtcacataaaataaaagaaaacatataattaaatcttagatgcacatacttagacaaatagcaatatatgtgagcttaatcttgtcactagtaattaatcactagcttctaagctaagtcacataataatgattacgtccgagtccgactttggcaaataaactcgagctatt

SEQ ID NO: 105762 - DNA, 571 bp, Cannabis sativa
actcaatgagtgatatccttgaccgggccgaaggtttcatcaagctcgaagaagccattcagcgagcagagggtgagcaaaagccgaacaaaactgaggttccttccactggaacgtccgccaagcttccccaatagtctagcaattcaagtggcaaacgttcaggcaacaaccacaagcaaggaaacgggaagaagggaaagttcaccgaaaaacccggacagactccctatgatcgcgccaaacacactgcattcactatcttaactgaagatattgaaagtgtgtatatagcgactcagtcgctaattccgtacaagaagcctgggcccatgaagaaagataccagtaaaagggacatgaaaaaattttgtcggtttcatggagactatagccacgacacaaacaaatgctacaacttgaaatgggaaatagaacatctaatcaagaaaaacaacccgcgcatactgaagtacgtcaacgccaaccaaggtcagaataaccaggatctgatgcctccgccaatagatggacacttgcaagtcatcattggaggcccgcacatcgctgg

SEQ ID NO: 105763 - DNA, 863 bp, Cannabis sativa
atccacataattattaatatttataacaattttttattttttcttcttttttatttcatttttattttcaaatttagcatttagtttctttttctttttctttctcatattttcatttcaacactaccttccagccattatcctttcaaaacgcacattcaaaacccacgaaaactacatcccacccataactttcgccatcttcttcttccaactgcctcctttatcaagttttttttatatatatctttcgttttgtatatataatgattattacctgtggctctgtttctccatctccattgaaaaagtttcaaaaatgggtcataaattagttgctaaggctaaagggaaacatccagtcatcgatgatgatgactccgatttttctccccccgtagctaaaggtggttgtcgtccagtaaagaagaagttgaaggtgtctttgcctgaaaaaaaattccaactccgacggtcagaagggaaagaagaagtcaacttcaagacaactgtgatgaaactgtaatgcaatagttatatttgttgtgttgcgagccaactcaactaacataaaagcacaaacaaaataactaataattccacatatttaataatacaaacaaacaaataatattattacacaacacaatcaatcgtgtttgttttatctgttcaagtcgcgtatttgacaattctgggtcttatttttataatactatgatattatagtagcaaaatcattattcaactaacgtgcaacttaattgtaactagaaatgttaaatgtgaatgtgtatgtgtatctataaaaatctatttgccagtatttcttttgtcacgatcgataattaattgtaccttaa

SEQ ID NO: 105764 - DNA, 667 bp, Cannabis sativa
tttttttttttttgtaaataagcttaaccctttaactttttgtacttttgtacataaactttttaagtttttatacaaatttttgtaggtctagttctttataaagcatataaatacaattaggcattggaccacatttaatgtttttatgcctattcagacccgattcaattatatattagatgttatattttaccataatattcgatccaatttattttagtcatccaatcgatccaacatccattagatattagattatcgattctatccattggatgtatttcatgtatatctattggtttaatttggatttatcaaatattttagacctagtattttttaaattggatcaaatccatccaatgttttagatccagtatttattggattggattgtatccattcaataaaaaaaacgtaaaattttaatgttaatttttatatacatttattttttttatgaataataacatgaaaattactcatcaaactaaatgaaaatactaactagttcgattggatgttggatgtattagatttctggacacccaatgcaacatttgatccgattcaattgaatattcaaaaataacgtcgaattcgatcctatcacagttggacattcaacgtttggcggtcgattgtaattgcatcggttgtggtt

SEQ ID NO: 105765 - DNA, 693 bp, Cannabis sativa
gagaagaatttaaccttaaattaaataattattattcattaaataagtcaaatactaattgggcctaaataaaactatcatagggtgatattttattttagtgacctagtccatttatctatctagaaataaatggacttcctacatgcatctaagcccaaaagcaaacatatcggctcacacaggtcaaatttgatttggatgggccctatcatgtttctaggtttacacaaatgaaagtgttgcctcgcatttttcccaaaatacgtggccatgactgcgtgtgacacgtggactaaaaggacgcctcacccgagaattagcttaggcgtatacaaatgaacaagtatagtaagccaccggagaagtacaaaaagcatgcccttcctctccgagagctagacatataacaaagcatctccgagagtaggagggcacactcaaacaatcccttcgcatttaatgcagcatgaggaaaacgtcttggaacgctcataagaggacatgtcaaacaacgtaagcctcgtttacggcaattacacaataatcaaaggggctagtgacggctccattatgaagaatcacattgatcaaggaaggacaaagcttaatctcaccttatccctatgatacctacggcataggttatgcatgccctattttatatcttttgggaacttgtgctcatacatt

SEQ ID NO: 105766 - DNA, 550 bp, Cannabis sativa
attttggcacaccatgcaaccttaatatttccttgacgtacaaatctgcgtattgatccactgaaaaggttgttttaacttgtaaaaaatgagcagactttgtaaacgggtccaccactacccaaattaaatcaaataatctcgtggttctaggtaatccaaccacaaagtccattgtgatatcttcccacttccactaaggtagggttaaaggctgcaacaaccatgctggtctctgatgttcagccttaatctactgacaagttaggcatctcgatacgaattctaccacattcttcttcatttcgctccaccaaaattaaagtttaatatcttgatacatattggtggtgccgggatgcaaggaatatggagtggtatgagcctcttcgagaattttatttctaagttccacactattagtgttgaccgaggtattcagcaaccaatataataatataagattagagaactgtaagaaattaagagtaggatttttacgtggttggggtgttaatgagcctttgtccacgagtcagtgtatttatga

SEQ ID NO: 105767 - DNA, 910 bp, Cannabis sativa
gttggaaccgaaactgacgaaaccaaaaaaccgaaaaaaactactaacagttaaaactgccatagaatggtcagtttttttctaggtaataaaccgaccgaaaaaactgaaaccgaccgttatacatatttattaatttattaagttttttttgtatgtattatagttactaataatatataaaaataatatattactttttttattaatattaaagttaaaataataagataattagttttgaacaattaatttgtatgtttgtagtcgtaaaatgtagaataatgtatttatagaataaattggatcatttttttttaaaaaaaaagttcggtttgggcggttcaaactgaccaaattgaggttcaaaacggtcagttttaagataggttctggattggttggtcagtttttggattgcaccaatccagactgaaaactaaatttcagatttttatatagaaaaaaaccgaccaaaccgaccgatgctcagccctaactgccacacctgatgaagcagttgtgagtgccacgacaccattagatcgtacatttgcaggcaacgccttgtataggtatgttttacctgttccaccgggcccatccacgaataacgcattgtttttttttttatgaaatactttccattactacattatatactttttgttgcttagtattaagtcattctgacactgtaacatcttcttctggaatttctacatccaattcatcattaatttctctggattaaaattcgtcattctcaaagacaatgtcttcgtcaagcaattggtatgaactgatgtcttttctcattgactcaattgttgaagatattgaccgcaatactagatatcttacgtttcgtgtaccattttctgaatttttgatatcgagtgacatttgt

SEQ ID NO: 105768 - DNA, 1121 bp, Cannabis sativa
  modified_base (26)..(67): a, c, t, g, unknown or other
ttaaatataaataaaaagtcacccannnnnnnnnnnnnnnnnnnnnnnnnnnnnnnnnnnnnnnnnnttatatagaataaatatatatatgccgcaccgaaagagattccaaagaataaattcttatgtatatggatacatttgctttaataatcaaagtacaacaaaacatcatgttcttaaactaattaactatacataattatgatatgtgtaatagttttatagtatatatatagttggttaattaacttttgattaatatgtggggtgcaggtgaccgtagttagcttcagcctagtgacaacactgtacacagtggtagcctttttgggagcaaaactgtttggtccacaaataaacccacaaatcacactcagcatgccaccccatttcattggaacaaagatagctctttgggcaacagtcctcacaccaattaccaaatacgcactcgaattcgcacccttcgccatccaactcgagcatgccttgccttcctccatgaccactagggcaaagctcatcacaaggggcttcttgggttctttctttctcttgctcatactaaccctagctctctccctcccatacttccaacatgtactcgccctcactggatctcttctcagcactgccatttgtttcattttaccttgtgccttctacatcaagatatattgggctcacatttctaaacctgttcttgctttgaacctttttttgattggttttggaatttctcttgggctgcttggaacagcttcatctaccaagatgttgattcaaaccatgaagagagctcatcatttgacttaggcaacctcgaataggcagcttactagctgatctgtataagaatgtatcgatttagtaattagcataaataattaagctgttttgctataatattacagcttgagcttgtactccatcgattgattaatcgatgatatgatcattacgtacttctcttgaagcttaattatatgcaagtatttcactttatgtgtgcttttatctttctctcaaattctgaaaatagttaataacgtcattagaagcaacatgcatagcattttgcttagatttacatgcatgtttctacaatctaattatta

SEQ ID NO: 105769 - DNA, 758 bp, Cannabis sativa
ttacttgataaaattatagtaaaattttaactttactattaaaaaatttatgacataaatacttaaatattaaatttgttactaataaataccgaaattcgaaaaatagcaacttaaatcttcatttatggtttaatttttattctgatgcgtatgttaagttctgggtttgaattttatggtgtgtttttaatgtttgagttttagtgttttactggggttctaatgtttgagtttgtgtgttatgagatctgtttttatttatttatttttatagattttgagaacttgaaaattgatgttgtttctattgattattgagattgaaagtttgatttttcatacgggaattaaaatttaccttttcgtttcattgattgaaaaatattagtagaaagtttatagaataagaattttgagtatatgaaaatagaattgaaaaacagaatcgagaattaaagtttattgttaatctccttacaaaaaaaatttattattaatctgtaaagataatatgggtggaagaatatgaaaaaaaaatatttttatttcatttaatatgtatataatattttttttttgaataatatgaatttattttaatattatttttttatttttttattttttttttctaatagaattaatagtttgatcagtactatatttacatgtagcactttattgattaatttgtaaatttatgcttcaataaaatattaaaaaattgagagaattaaggagaaaaaaaataactt

SEQ ID NO: 105770 - DNA, 503 bp, Cannabis sativa
cataagtacgtgtgttgtggtttcgggaattaagttagttgcagggtatcggtgtcactagtagcctcacgagattattattcgctatttattagtacagttgcaatcactacttcacactacataagtacgtgtgttgtggtttcaggaattaagttagttgcagggtatcggtgtcactagtagcctcacgagattattatttgctatttattagtacggttgcaatcactgcttctcactacataagtacgtgtgttgtggtttcgggaattaagttagttgcagggtatcggtgtcagtagtagcctcacgagattattattcgctatttattaatacggttgcaatcaccacttctcactacataagtacgtgtgttgtggtttcgggaattaagttagttgcagggtatcggtgtcagtagtagcctcacgagattattattcgctatttattaatacagttacaatgtaattaatactttcatttggaataatact

SEQ ID NO: 105771 - DNA, 1287 bp, Cannabis sativa
aataatgtcgcatccccaaaaaacattcaagaacgattagactggggcattttcaataaccactgggtagatatcttccctgatgccacccttgcccatttggggttctacggctctgatcaccgcgccctagaactgaacacttccaatcctccgggcacttgccttaataataataacaaacgttttcacttcgagaatgtttggcttaaggatccaaattggaaccaagtttttgaccaatcttggactagccagccgaacctgcatgaacccatcctcaagctagtcgcgactcaagcctctcgtgcagagaaacttaacaatcggaaccacaaaaaggactttaattttaaaaagcacataaccaagcttgagaaagacgtggaaattgcccgatctactcctgtttgggatgacaataccatcagaaatataaaggagctccaacccaggcttgactctcttctgtacaaagaagaaacttattggaaacagagagcgaggacctagtggttagcccagggtgataagaacaccaaattctttcatcgacatgcctctcacagaaagaaaataaagaaaatcaataagctccacctagccaatggaggtattgtctctgacgatgagggcatcacccgtgaaatggaatcccactttaaccagctcttctcgtccacgaacccctcggaggaggacatcaacaaggccctacaaggcattacagtctctctctcagaattggacaaatctttccttgctgaggagttttccttggacgaaattgaaaaagcttttttccaacttccttctgataaagcccctggtcctgctggtttcaattctaatttctacaaagccaactggatatctgtcaggcatgatgttctcaaagcagcaaccagctttctcaatgggaacggggacatcacccctctaaataccactcccatcacccttatccccaaagtcaaacgtcctacttccctgtctgattttcggctgatcagtctctgcaacatcatttacaaagttatttccaagactcttgcaaattggcttaaacttgttcttaacactttgatttcccccaatcaaagtgcttttcttccggatagacttatttcggataacatcattattgcccaggaagttgcgcattccatcaagctgaaaactaggggcaaaaaaggttggatggcggtcaagctcgatatggcaaaagcttttgacagagtggagtggcctttcattgacgctattcttcgaaaattccaatttccc

SEQ ID NO: 105772 - DNA, 1007 bp, Cannabis sativa
  modified_base (42)..(51): a, c, t, g, unknown or other
atcagttccataacaaaataaataaacacaaataataacacnnnnnnnnnnaaatataatataaagaaaccgtatgtttatcaactagttaaaaatttaagacaagaaaattagttccgtaaagctactaagataaaagtttacacacaaaaaccagttaaataaaatagcttaaacaaaaacatccattcaacatgctccaacccaccaaataattacactcatgccacatctacctcaaaaatactcattcattatgcctatataatcggttttattttagttacaaccggtttgagttattttgtgttatttgtttttattaattataacattgttataaaactggttcattataacactgttatagaaccgattctattttaattataactggtttaagttattttgtgttatttgtgtttattcactatgttacaaaaccagttatattttaattataaccggtttacgttattttatgttatttatttttattcattatgttataaaatcagttctatttttaaattataaccgatttctgagttatcgtgtgctatttgtttttagtcattttgttgtagaaccgaatctattttaatttatatcatctggatttttatttaatcaattcaaaaattaattcttgaattatttattttagaaactagtttttaatttagttatttcgagaactggtttttaatttagttaatttaaggaaccagcttcttattgatttgttttatttaactagtttttgtgtgtgagtttttatcttagttgctttacgaagctagtttttttttttctcaaatttgtaactagttgataaatataaccggtttttttatattataattttagttattgtgtgctattatttgtgttatttattttgttagggagctgatttttttcatatttatgcttcagtattttttcaaattgatcatcacttttttaaaaaaattataatcggttttatgaggtattgtgtgtta

SEQ ID NO: 105773 - DNA, 680 bp, Cannabis sativa
agctaaagcttgtatataaaactctgttcattcctctgttttgcaataatgaaagatgaatttcattctctttgtttctctgtaattgtttctcttctgcaactaaaatggtatcagagccatattgatcctttggctcttcttccgcatctcttctccttcttcttctcctttcttgttttcatctttccatggctcgaggaggtggaactcaaactcgtagcaatgttcacaatggagttgctactggttccaatctatttttcagctttggatgatggtagtaagcttcctaccaatgatccacgaagcccttatttcttgtctactggcgataatgcttcttcttcacttgttcctaagattctcactggtgcagagaattatagttcttggcgtagatccatgatggtggctttaatggcgagaaacaaaatcaagttcatcaatggtaaattaccaaaacctgatgaagaagatgaagactacgagtcttggatcaggtgcaatagccttgttatatcatggattctcaactctgtatctcccaccgttgctgacagtattatgtacatggaagatgcctctcagatctggcctgaattacaagagaggttccatcaaaagaatgcaccaagaatctttgaagttaaaacaagtatgcagacattgacacaagg

SEQ ID NO: 105774 - DNA, 530 bp, Cannabis sativa
agcttttgataaagttgaatggagcttcattgggtatattcttcataaatttgattttcctgctagttttgtttctattagtcttagatgcatttctacagtctcttttaagttatgtattaatagaaattgtcttctgtcttccttccttcgagggggtattagataaggtgatcctctatcaccctatcttttcctccttgttgtcaaagccctttatgctgctattagaattagaatgcaagctaatcagtttaatggtatttctaattgtcgttctgcctcttctatctctcatcttctgtttgctgatgatagtctgttttttactactattaatccccatcattgtagagctatcaaggacattcttaatacctacaataaatctactggtcaatctgtgaattttgctaagtcttctatcctattttcccctaacactagttctcaagatagagtttttttcaataattttttgggtatgtaggataaatcttttactattaaatatcttggtgttcctcaat

SEQ ID NO: 105775 - DNA, 762 bp, Cannabis sativa
atataattcaaacctaagtcgtagttgaaacactataaaaggaacatgatgatctcatatcatccaactattcattcaacaaaacttaaacctaattttcattctctgacaactagtagatgagagacaccttctatagtggtttgaaccctccttcattgttcttcatcaaattcacccatagtgatagagtaccatacccacacatagcaagtcaagtactcaatcatagtgcgaaagacgatggtaaccaacccgaaggagagaaagagatccaagctcaaatcttgataatactctgcgacacaaacgaacaagggttagagatctgagcgaaaggagtcatattattccactgcaatcaatgtaagattttctaaactctaatgtgtttaatttcattgttttagagatattcatattttggatgttaatgaaacatattttggatgttaatggaacattggaagataatcaaatgaaacttaagatcaagaagaggagctatatgttagtcgataaggatggtattttaatactcttagactacactaaatcgagtttctagacttgccttgatgctagaaagtttactgatgagatggtgattactcttacggtggagcagtgattttaaagaagtgtaaaaaccaatctgaagtctctaactctaccagtgaatgttaaagttgcaggaaagatactttttcagtctacaaaaagttctatactgtttttggcattgtaccaataatgaattaa

SEQ ID NO: 105776 - DNA, 603 bp, Cannabis sativa
gtttgggtctgagttcaggttcgggttcgggtcgcgagttcaggtttgggttacgatccgagtccgtctcccaattcgggtctcggtctgatttggagtccgggtcctggtccggttacagttctagatctaggtccaatttcagttatgattcccagtccaagtcctagttccagtcccgatcaactttcggttttggtaccaattttgggtcacagggtacgggttcgggtccacttttgtgtttgggactgggttcaggtccgggtgtgtgttcgggtccttgtcagggttctggtccagggctgggtcccaaatccaaacactgactacgggttttatccaagccctgggtccagatccggatcccaatctcgggtcctagtatggttccatttcttgtgccgggtcacgagttgagtcctatgttcatgttcaggtctaggtcgggtactaggtcctggtcctagttctatttcccaggtcccaataatgattctgggtccaggtctaggttattgtgtgggtttgggtcccggttccggtttaggtctctgtttgggttttgatcttggttcaggattgggtttaggtccttgtact

SEQ ID NO: 105777 - DNA, 2249 bp, Cannabis sativa
attaagtttaaatacctaataaaattatacataaaattatacaaataataccatagattttttgtcaaaataaaacttaataataatcaaatttataaatattatgacaaaaacgatcacagtttttgtatctatttcttaaaaatagttttatgaaaaaaataaaattgttgaaaattgagttcaggattctatttttactattttagaaaatttagtgtcaattttatcatttaacaaaacagatagtttaattggtaacttttataaaacacataatttaaaatattatttattctaattttctttaggctttgataaatcgccacctacacttatgcttgaagtatgaagccaatattttttttttttctttgctaggttagataatttttataacacacaaagaccaaagttggtgacttgtactctaactgctctcaccttctttagtctctcccaattcatacaaattttaaccccattgaattcacacatacaaaatgtcacacgcaattcccttttttcccaattaaattcaccaaccttgttcattttccccatttacattcaccactttctcactgtttgctctagctgcattattatgaagattcagatgttgaaaaattaaatttgtgacaataccaaattctataagtagagttatcttgtggctattatatttgtagaaataagcatatttgttttgattaacaacaagagacaataataccatgttgccatagagtcttttcatttgttctatacaataatggcattagcaacaagtctcagactaaagatactaacttcagctctgttcattgcttatatgttaggtaacatatcatgtaaatatatagcataccacactaaaataccaattttttttttggaattatatattctaatttaaagaattacactttttggtgtcaacattcttaattggcaggaggaaaagcagaagatgaacatgtaccttatcaagtaggaagtggaggtcatgaccctgctcaagttgttgctagtgctttgctatgtttcaatgacaaatatgtaagtaaaatctataatttatttattttcgtctcataaattagttgtgcatttagttaacacaaaatgttcaatgttaaaataaaaaaatatatatataattgctctttctttatgtttgattctcaagatttatagcagctgtgaagagtcttatagattaagtgagagtggaaatcttgaggttccgccggagaaggcggaggaatattgcggtgggccgtgccttaaagagacacatcttgtgctgagctgcattgataacatcttggccaactttttgttttacaacaaagccacaatacaagatgttagagacactattcatgcaggatgtggttatggaccagaaagaggttataactattttatattattagcctttaataaactcttctaacatgttttaatttaatattgtaagcttattagggctgatttattgcattttgtaggaaattttaatgtggctcaacacattgaagctgaagaaagcaataatgctgatcagaaagtagtttcaaaccagatcattctggtttcttttgggttgatccttttaggacctggtatatggctcatttgatttaatgttatgtatacatacatattacatatatatatgtatgtatgtacttagtgtaagggctgaagaagtttaattgtactaaatatatgtatattttatatatacttggctctggctggtattatataatagttgtcttatatttttccccaaacctatatgtcttgccttcttacatgtgtgattgtatgtttacttttacaataagtcaataatattatggtcatgctatcgtttgtgattaaaatatacatggtaattaagtagttagttgaataaatgttgaaataaatcagtcaatatataaaagaggattgctatattattagtggttgttttcataattttggggaaaaaaaagagctgaagaagtaaacaaatgatttggagccatttcaagctgactaaacattatttttcttaaaacaataaggggctaacttttaaatttaaatactagacaaatattttcgagaatgtaattttattcatgatctatgtgaaaatgcaaaatatattttatttgtatcatgaaataattaaagggaaatttgattttctatacttacatatacctaatattttatttctaaactaa

SEQ ID NO: 105778 - DNA, 502 bp, Cannabis sativa
gccattacacatcaatcaataaaaaaaaatataccaaaacacaaatcaaaatattactacacactccaacaaatatatgtacatatatatagacatatgaaagtgaaataataagtgaaataccataaaaaaaccaaaagttgtaactgatattttattgtcattattaatgttataaaatctaaaataaaacaatatacactcattagttttataacttaaaactgaaaaatagtaattaatatacaactttttttttttgttagaaactctaaataaataagaaaaatagaaaaaatagaaaaaatgaaacaaagttcatacaagatgccatgtcacctaccttaacaacacaattatatagatatatagatttgttcattgtcaaacttattatatatatatattttttataggtgatggagatagtgactagatgaagagatgatggagagacaccagtttacgcaaataataaatttatgataaatattacaaatag

SEQ ID NO: 105779 - DNA, 521 bp, Cannabis sativa
aacataaaagcgatttctgatcttataataattagaaaatctgattatattgaaatgtgttctatttaaggcacaaaacccaacactaactagggtagtgtttagtagattggaatggatccgggaatagaatgacttttcctaaagtgaatctatttatttatttggtttgtcatttataattgataagtttatataaatgtgtatataattatttgtgttatgtcacctaatttcttacaactagcgagtaattaactagttatttgtgttaagtacttttccttcaatatttatatttatttagtaaaatatatcctaattatttctactaaaatttcgacagcataacgactgtaattaaacgtacccaaaaattttaaaaatgcctaaaataacaaataaaattatacagaacaaacaaaacattaacaatacaaatttctccaccaattcgaccgcagtacatgtattcgcagaacctatttcactatggttgaatatttcagatatttaaactc

SEQ ID NO: 105780 - DNA, 552 bp, Cannabis sativa
ctagatacttttattttatataaaataaaaatttctacagttgtatagatcatataacacaaaaatcttgtacaatttggttcttatataataattgacacacatagaagattatataaattatactaatttatggaatcaataatgttattattaatgtagttattaacatggacacatcttatactatttataaaaatatttttttcaatacgatattatatttagttttttgaaatatatattctaaataactacctataactacataaaataaaatagaactacaactatttattgaaaactgaacaattataagaatacaccatataattttcttactattttttaccataatataaaaagtttaagttttctttttcaatttcagaattactctttttatttattaagtgttttttgaagtcataatgtaactattagattttctaattattgtcgtatttattaatacaattatctctcaattatttctagttatatgattattgtatataaattaatttcagttataaaataattttccaaaca

SEQ ID NO: 105781 - DNA, 1375 bp, Cannabis sativa
  modified_base (1223)..(1225): a, c, t, g, unknown or other
ttttttttttttttatatagaattctacatagaaactcatattgcaactaacggagcaacctcaatcacaaccaaaattcgtatagcaacccacatagaaaccattgtagaaaccacctgaaaaaactcaaacagtaaatttaaaaataaaaataaaaatagtatatgtggtaatttcccaaaaaatatacatgaataaaaaaataattgttcaacaaaaaaaaaaattatggaaaccacttaacacaactaaaaaatagcataaaattaggaaaacaaatgcacatatatacaacaaaaatattgtctggaataaactgaaaatatacacaactaaaaatgcacataaactataaacggtacacgaaagaaaaacataaaaaaaattataaaacaactattgaacacctaaacaaaaatataaaaacaactataaaataacaaaaagacaattataaattgacaaaataataacaacacatcagtcttgttaaaatatacaaatcattcataaatcaactttgaataaactacaaaatatccaaaaaaaaaaaaatatagtacttttattaatcatgtaagagataataaaaataagacgagtcctcttaatttttttgtaagagagaaaaagagtgtaaaaaaaatatgaaaaaagtgataaaagtaaaataatcatattttagtaaaggttaaaagaaattaattgatatcttgttttataaaatgtgattaattaaaaaaaatagttagaaatagttagagtgagaatattaaaaaaataaaaaagagaaaaaaaaaatagaataagtgtttgaattttatttttaaaaaaataataaaaataaaatttgtgagagtacaaaactattaaaaatacgagatataaaatttattacatatatttatgtatagtaggtattagtaacatacaatacatgtttgcttagagttgtattggaattgctattacttaatattaatttaaataataataataaacttcccaatcaacccattcccaattcaaagagtgagtacgaggtaagtacatctagacctattgaagaagctaaatcaatttctatccttaggcctagaaaaattattaaaaatcctgattacgtacctaaacctgatacttaaataaacaaagactcactgaaaaaaaaatgaaaagagttagcctaaaagtttacattccaaagactcggttgaagaannnagtcaaactttgtcgttcattccaaaagctccattcccacaaacattcatcctgatcaaaagaggtagtcagtatggtgatgtaaagaccgcatatgattaatactttggattattaaataactaaggtttatgtatgagattttgttat

SEQ ID NO: 105782 - DNA, 547 bp, Cannabis sativa
agaaagcgatctcgagtcaataccacagccgagtaatactgaaaacaaaccgacctggaagctacatgtggatgggtcggcaacagatcaattatccgacactggaattgcccttgtcacacctggggggcaacacctgcacgtggcggtcaaattcgaattgaaagcctctaacaacgaggccgaatacgaagccctaatcgctggacttaaactagcaaatgaaatgaagaccgagcacattgagatctgtagtgattcacagctagtggtaaatcatgtatttggcgaatacgaggctcagagaggaaaaatgatagcatatctgagcaaaatacatgatctgcttgcacaattcaaaagctacaacctcagacaaattccaagagaagaaaatacaacggcagatgcattagcccgattggcgagcagcagtataagtgacaaggcaaaccttgtccttgtccagttccttgaagagcctagcatcactggcacgaaagaaatcgaaatgatcgacacatctccaaactggatgacgccaata

SEQ ID NO: 105783 - DNA, 656 bp, Cannabis sativa
tacatggagacctagaagaagagatctacatggaacagcctaaaggttttgaagttaaagagaagaaggacatggtctggaagttggttaagtccctatatggacttaaataagctcccagacaatggaataggaagtttgatgcttttatgctaaagcatggatttaacaggagctatcatgacacctgtttgtactacaagggaagttctataaaagatgttatctacttactgctttatgtagatgacatgcttattataagccaagaaaggtctaggattgatatggttaagaatctgctcaagacagaatttgaaatgaaagatcttggaaatgctaccaagatccttgggatttctattctaagagacagggataaaggcaaactaatacttagacaggatgactacattgagaagatcatagataagttttctatgaggaatgcaaaggttgttaagcaacctattactagtcagtacacactttctaaagaacagagtcctaagacagaaaaggagatagaagctatgaaggatgtatcctattctaatgctgtagggtcaataatgtacttaatggtaagcattagacctgacctaggctatgctatgagtgtacttagcaaatacatggcaaatccaggaaaagtt

SEQ ID NO: 105784 - DNA, 569 bp, Cannabis sativa
caacctagaccagaaggaaaccaagctcttcaccattatttttctggtattcagctaggaatttaggtgttcttggagctaaggtaaccctagaacctatggttttgtattttgaagctcttactttggtttcatgtagtgattttgaatattgggggctattatggtttagtgtttgtatagttcgaaatgtaatgttaatttgagttaaatataacttcttacagctggttttagtgtttggggttggatttatgcaagtttgaatttaaagacctaagctttgatctcttatggcataatttgatttagtgtatttttctgtcaattactagttggagtatgttgtgtatgcactatgtaggtactctagaaaatttggtaacatttggatgagttttgagcaagaaatggattgttgggggaagcctggtgcaattgcaaatcggctagccagatttccaagcttgtaaaactggctagccggttttggtagggtccccgaagaagccattttctcaactctcatccatttcagtgccgtagttgggtgtttccttgtttcctga

SEQ ID NO: 105785 - DNA, 639 bp, Cannabis sativa
aaatgtgtgataattatttcctttaaactcttattaaatttaaaatatattaataaaattaaaattaaaaaaacgataaaaataatctcacttgcatgggattattcatcccacgctgctggataggataaataatcccagacagatgaggttagctggattagttatccagacttctaacatgcccaagcactggattggacaaattagtctgtgtcatccaatccagtcatgcgtatcaaacgagcccctaaggttaacatgtgcttttatggtgcacccctaaaaaaataagcacacatatatactcttcatatttttgatatcgaaatagttatactcttactttatttatgtaatattatagatggtagttatttaaaacatcataaattttttaaaaacttaaatgaatttagtacaattcaaataatctattccacgtgcttctaaaataaaaacaagactctgcaatattttttgcacaataaattattctaaaatttataagaatgtcttaaaactcagacatatactatgacattaaaaattgagattacaagtaacccttaaatcattcaccttcttcaatcaaactgatactaatcctatccccatatataccgaaatagataaagt

SEQ ID NO: 105786 - DNA, 580 bp, Cannabis sativa
tcacatgcgaatatggtcagaatcgacccttctattatttcacacgtcttgaatatcgatcctaacatctggccagttcagcaaaaatgaagactgcttggataaaaaatgagcagtagccctgaaagatgaagttgaaaagctgcgcaacaacaacttcataattgaagctttttaccctacttggattgcgaatctcgtacttgtagagaggtgtgactcttgctttttttaacagaggcagtaattttttatttttttcaaacgctgcgaccttcaagtgaagattgcaacttttggctttcttctaaaataagctttcggtaaaacatttagttgcgactcttgtgagaagatcgcggcaatgacatttccttcttgtttcgaataacaatggaatagtcattattaatttataacattctaatactttaattaaaagggtaaccaaaccaaattatattaaatgaagggatttttacactagatgtcaaatttggcatcttttttacatttttatttatgtttgatcttttaaacttttttataaaatctggttttcaattttatttttcaaaaa

SEQ ID NO: 105787 - DNA, 502 bp, Cannabis sativa
tctatacactctcaattatatagaacactctatatgtaccacgatatagatacgttatggttatgcattgttccaatcctaatagtcaaagatcaaaaattaataataatctattataaattaaatattattaaaaataatattttattttgatttttagggtttgaaattgggaaaatttggaaaaattgaaaaaatcccacaaaaaaatagtttggggagtggctgctgagggctgcacgtgtagcccaggaaggctgcaagcaaccccatacgcgtgcgggaagaaggatctgcagggcctcacgccgagtttcctcggcacctacagggtgatgcacgggcggacaacagggttcgtgtctgaatgcacacggtttcagacagcattcgtgtccccttgtccgtgcgcgtctggcttccttgtccaaagcctggtgcgtgcgattgagcaccatgtgcaccctgttttcaaaaccacataactttctcaatttttatc

SEQ ID NO: 105788 - DNA, 526 bp, Cannabis sativa
tggtgaaaacaaaaacccaaaaaagttaacaaactgccattgtcatggtcgcgaccagacctatgatagtcgcgaccactgggttaaaaaacccggaaaacccacttttcagcttcaaaaattatgctcaaacatacccaaattcaatcaaaaacatgtacaaccaccagaattaatcccacaatagttatcaacataacagagagctaactcacatattttaagctctaatccaccataagcatgcttcaaaattcaaatttaaacaatattccatataggctccaaacttgagcaaaaattaccaaaattctcatatccatgaacctaaatacccaaacaaaacttcagctgactatcaccataaaattcatagtataaaatcacatttcatgcacaataatacttcaaattctcatctaaaatcatcaagaacatatttcaccaacatctaacaccattttacttctcatgcaatcaagaacattcaaagctcaaaaacataattctcaatctccatttcagc

SEQ ID NO: 105789 - DNA, 590 bp, Cannabis sativa
aataaataatttgcaatacatatactctaagggggcatttggaatgaagtattcaaaataatttgattatagggaatattatgaaggagaatatgattatagggaaatgtgtaaactgtgtttggttgtataggataatatgtaattatattcccgttaattgaattgtactgtttggttgagtacatgaatcttatatattattttaaaaaattaaaatgaatttttttattatatctgtttaatgttaattatacataaaaataaaataattattcattaaggcaatatattttttaattagtaaatattaaattttattgtatttattattaattaaaataaatattctatatattttatcattatattatttatttttgttcgctatgtcatttatgtacaccatccatataaaatttatgtataatgcatatatatatgttattgcttataacatagaaataacccagtttaaaatataaaattgatctcacagtgtaacgccctaaataattaggcacgctacccaagatacttacgaaaacctaatcccctaattgggattactaataagattagcgcggaaa

SEQ ID NO: 105790 - DNA, 618 bp, Cannabis sativa
aagagcagattctgaagccacatgatagagggaacatgtgttatcaaccaatcctaaacgttgtttcgaaggcagaacattggaccaagttttccaaagaaaaagctttaatctttgatgaatcttagaccgccaaagcttttcccaaacgcgattaggattcttgaatctactgtgttgacttaaccaatacccgcttttgacagtatatatccctgactttgatcctttccaaaaaatgatgtcttcacttgtctccaaaggcctaattcgcagaatggacattgccacttcttcatcaaaactttcccttatcaattcttcattccacactctagagccaactttaatattgttcatttgtgctcaaatgcactacaatttgagtttttattaatatttttattaactttataaaaaataataattttataaacattaataaatgtaaaactaaaatgtttataatttagggaaattatcttgtattattttttaaatttacggtttaggttgttcaattagtttatctaatggttaatttctatgagggttgctatatggatttttgttgcgatttaagtcgctccgttatttctatgagagtttctatgtaga

SEQ ID NO: 105791 - DNA, 961 bp, Cannabis sativa
tttcctggaagtgggacattcattaacccgatgataattgatccgttgttgatatcccaagttgtctgatttccagccataatgattttccttctaaataaaaaaagtattgcgtttcccatggacgacaccaaatattgttgaagaaatttttacaacaccaaaataaattataataataataatatggagaatttatgcgagtactccacctagaatggtaagtatttaaattggggacacaaaatacattaataaaaattggaaatacatagaacacaagagagtatagtggttcagtcagatcacgatctgcttagtccactgttgcaaggatttttgtcttgttcattttatggtggatcactcctttatatacaaagcaagtgtctgttcatttacacagagattgaattcattatcaatccgtttgtacattgatatacaataacgaaactaaaaaatgtaaacataataaatgaagatcagtttccaatttaattcactaaatgcagcaacgtatgggacttctatagtgcgagttggctgtttatattcttacataagctcgcaggcttaagatgcattcaggactggtcgagtctaggatgtttgcgtcctcttgaagtcgcttatacggacatcttgtaatgagctgataaactaagacatgcgagtttgtaccagtttatcaaggctgttgggtcaactggaccagctcgaagagcagagactcgatctttccgttttcgcagcagaatcttggggatactcgcatataccctggtatatgcgagcttaaaacccttccttggtctcacattatgcgagccatatgaatgcgattagacttggtcatgttcgcattatatctctaaatttggttcaggcgagtttcacattcgaggggtctctcatcgacatctcagctctcctcgagggaagtgaatacacgtgtctt

SEQ ID NO: 105792 - DNA, 893 bp, Cannabis sativa
  modified_base (80)..(87): a, c, t, g, unknown or other
tttcaatttcaattgcatctattaattatggtttgatatgattctattcctattgccaatttctatgcaatagcaggttnnnnnnnntaatttatagtcttcttagatatataaatctcatttacatacaaattttctactctcgtgataaattaaacatgtaacaagcattaaacaaagaaactctataagctatccaaaccatataggtaatctcatcctatatcagaatttgattctattttactattgcataattgacactcacttctcagatctcgcatcaaaatcatagacatttaattggtgatcagaaaattaaaaaaaaaattaagtacgaatgaaatagaatacatagaaattgatggaaacttaaatcatattaaaactacaaatcaatatcaaataatctccatctagaccctaatgaactgtttagctactcatgttcatcgtagcaaattcactcatattaatttaagaaaatagagaagaaaagaatgttgaaaaccctctcaaaaatacctccagtattgaattcgacttccaaaatttgtactcattgattcctgtgatttccttctgaattgctttctaattaagagtttctgagtttttttcagctctgaaaatgtactaaaaatactaataataatgtgtttatacaggctaacaaggttacctaaaaaatactaaaatgatttaaagtttaaacttaaacaagataaaaatcgcaactctatctttttttctcgctatctttttatctttttttttttagaaatttctagctgtaataactgatagtattttggccataactctctcaatattgttcggaattggatgattcaagatgttctaaaaagctgaaagagagatctagaactttt

SEQ ID NO: 105793 - DNA, 795 bp, Cannabis sativa
tgctaattacaaaattataaaaattattatatatttaattgatactgtaaataatttgtaggaggtatttaattttctttttcttcttttgttaaatcaataacaatataaattacaaaaagtaaatgaactaaatatattcaattaaatactaaattatataaatttttgataaaaattcatgttatataaatataaatataattagtaatgttatatttttttaaataaataataattgatgaagattctaacaaataaaatatataacaatttttatataaaaaataattgaatagtgttcaattataaagtaaaaaaaaaattaccctattagaaaaatattagaaaaaaataatgttttaatatatgtatactgtttagaatataaataaatatgtgaatttgtaagattatataaataaatacagtatataaaattttttatagcaatataataataaaaaatttaatcggcattatagtaaagttataaatttttgtaagtgacccttgttattgtataggtgcaacaagattttaatctcggataatttaatattataattattattatttgatgaaaataatacagaaaatatatatttacgcacataatataaaaaataaaaaataaaagtttgaagtccatatttatttattaaatactttttctttttgtcaaattattttgagaactaatggtatagttgttctcttaaaatttttaattaaaaactagtaactttaaaataattttcttatttaaaatttatatatattttagggtaaata

SEQ ID NO: 105794 - DNA, 543 bp, Cannabis sativa
  modified_base (50)..(56): a, c, t, g, unknown or other
ataaattaattttaaaatagatatagttaggcaattattattttaagaannnnnnnataaacaaataataattatcctaattatatgttgaaatatctcaaactaagcttttttcaaatttttataaaaatatccaggctatttaaatatttaaaatactaataagtaaaatgatataaaatatcattttttaacttataatttaaaaataattaaatattcagcaaaataaccaatttatgaatttaaaagtattatggttagaatatctataaaatatctaggttaattttaaatttattaattatttaatttatcatataagaaaattttaaaataatatttcaaattaaaaggatagactattttttaatttaaaatgtagctaatattaaaatatttgatcttatattaaatagtaataaatattaaagaaattaacaaaattttaagatctgactgtaataaaatatttaatttttaaatttaaacctcaaaatataaaaaattaataataatctattaaaaattaaatattattaa

SEQ ID NO: 105795 - DNA, 1179 bp, Cannabis sativa
gaatagaacatctatcaaaggcaccgtaccaaatggctccagcggaattgaaagagttaaaaatctaactctaggagttacttaacttgggattcataagaccgagttattctccctggggtgctccagtgttatttgtgaaaaagaaagatgggtcactctgaatgtgtatcgactatcaggaactaaataagctcactatcaagaataaatattcgctaccccaaattgatgaccaatttgatcaactaaagggaaagacgatcttttcaaagatcaaccttcgctcaggttaccatcaactgagaattcgtcaagaagatatcccgaagattgtgttccatatttagtatggacattatgagcttctggtgatgtctttcggactcatcaatgctccggcgccatttatggaccttatgaatcgggtacctagacaagtgtgtgatagtgtttattgatgatattttggtttattctgaatcagaagaagtacatgaactgcatcttagattagtattgcaatgattatgggatcataagctttacgctaagtgcaagaagtgtgagttgtggttatcacgtgtctctttcctagggcacacagtggataaagatgggatcatggttattccggccaagatcgaagctgttcgggattggccaacaccgaaatcaactactaaagttagaagcattttgggtttagctagttaccattgtcgtttcgttgagggtttgtcaaagattgctacacccttaatggacctgacttgaaagaatctgaagtttgtttagactgatcatgtgagaaaagttttcaagagttaaagcagtgcttgattaccgctcctgtattaactcttccttctgataaggaaaagtttgttgtttattgtgatgtctcgagataaggtctaggctgtgttcttatgcaaactggaaaggtaatagcttacgcttcttgatagttaaaagagtacaagcagaggtaccctacttacgatctagagcttgcagtagtagaatttgtgctaaagatttgacgacattacttatatggcgagaaatgtgagatacatactgatcacaatagtatgaaatacttctttacccaaaaagacctgaacatgagacaaaggctttggattgagctggtaaaggattatgattgtgaaa

SEQ ID NO: 105796 - DNA, 2212 bp, Cannabis sativa
atgttccaagtgaaagttaacttccaaactgacttattaaaccaatctctagttctaggtttctagtttggagagacacactcagtgtggtatgttctaccaccctaagtttgaagggggcgattaagggtacctagttaagccactgtttagtaattgctaatatgttacaagttagttaatgtttatagttgcttttcccttcttgttaactaacttttggttagttagctgtagagtcttttggctcaattggttgtatataaagccctgcaatctcgttccttaatttaatgaattacatagcatttttttcaaattgctctttagtttacaaatactaacagctcggttcggcaaagttaacaaacatggagaaggagagagagggggcgaatgagagatagattagagacgagatagaatgataccgacactaaaagaggataagagagaaagagagtagagttttatttttaagtgtgggctgaaatagatttttaattaataactttttttttaatatatataaacgggtcatatatatgataaggttttttgtttttaaaaaaaaaatgaaacttttgcttctattgaaaaatttaccgtctattataaaatgacactatagatactccattagcatcgatttttaacagtaattcatttttaataatgtcagtttttagtagttactcattttcaatagcgtcgattctcaaaaaaatataatttattgataagaattttctctttatttgtagtagtaaaaatattttttttatgtcctagatatcatgttcagcaaaaaaagacatgaaattaatgttttcatatctctttcataaaagagtttcatgcccaattttgatgatcatggaatgagatttttgtagtatagtattgaaccttggaaaatcatcccctaattcaattttagtatttttatttcataatcaaccgacccgcctaccatcttttgtctcgagtcaagttttcattaattttgtaattttctatttacttaattaaacgaaacttacacctgtaggcataagatggttgaatattaggttgggtgaaaattcaaaaaaataaattgtgctactaatacttgaccaaaatttaaaaaaaaaaatataaaaagaattggtgttggtgtcaatattgtgctactatacatacgaaagtatgattataatcaaaaacaaaaatattagctaaattaggatgttcacacatgttacgagatcaaatataaaaatagatgcaacaatattacgtacaaagtctttctttttccttgttaaaataaaatcctccattccttattataaataaaccgcttgacattctacacgaggagaattgattattccatttcttattaatattttttatataaaaaaattaaaggtaatgaaaattctattaatatgtaaaccgagcacagtataacaaatattatttatttagcaaaatcaataaaaatagacttaatttacagtaaaaataacgaaaattttaacaacaccttcaactaataaataacttataagcggtaaacaaaaaaaacatcaaaatattgtaaaaaaatagatttctattccaaataaacatgtgtcagatcaatatcaataacaattagtcaaagatcttttaataaaataaaagtagaaacactttatttattcaaaatagaataaagaaaaatttgaaaactatgttcaaaattcttaatattaaacctggaagaatagaacaataaagtatcaaacaataccagtgcatgtctcgaaataacctatgcaactaaagctcaaaaaagattggatatcaaacacgtcaccgttgttagaacgaaacaaaaaataatgacttctaaaataaaacacatatgagaaaaaaaaaatgcaataggcctaatcactaaagaatccttctccacattttctgtctcacaaacacaaccacactcttgggatatagagttcgatagacccccgagatcaactcggccatggcccaaaaatgtatttgccaaatatatgaaccagggccagtcctgagttgaaatgtgtcataggcaaaaaattttttttgaaccttactataaagataaaatgtatttttaaaaattattaaaaaaattataatggcgtttggtaatacttttttaatcagttttctgtttttaaaagtaaagaaagtg

SEQ ID NO: 105797 - DNA, 1017 bp, Cannabis sativa
ccattccttcctagtctcatttttctttctgcaaacttcagtggtgtgcccgagacctgaacaatgcccacaagtgactggtttccattcataatggaccccaactaaaacattgcagccattttcatctccaaattccaccgttgcagggagttcttggttcatactaacttcaatgagtattcgagggtaattcaatcgttctctttctttggtcacggcatcaatcataacgggtttgcctatttgcccaatgatcttgaacaagcttctttgtccccaatatttgagttccaactcctccaagtgcacccaaataggaacagttcttatgtcctcctttctgaaattggtattggggtcccaaggtttcataatcaccagccttttgttgaagaatatgtaccctccatttaatatctcatctctaacagtaagactatgaaatcgaatgataaagataccatgtgataagagcttaactctatcaattttaccattccagattctgttagcaaagccttcaagaatgtgcaatgggggattagaaccaagcacatagcacactattaataattttatttatttactataaaaaaaatattaacattttattaatattaacattttattaatattatatattttgtttaagttactaaatttttttattataattttaaaatgggttaaaataaccgcgcgaatatcgactatattacttagtttcttataatagggtataaagtaaatgttgccataaagagagaaagagagagattcggtgacaatggaagagagagaaagagagaacgaaaatggagcatagccatcaattaagagagagaaataaaatttgatactttatattaattaatattatattgatagtaaagtacctaactaaaattattttttaaaagtatatatttatataactagcgaaaagttacgtgcgagacacatatactaaattttatgttagtttttttttatgttatttgaaagtgataaaat

SEQ ID NO: 105798 - DNA, 2674 bp, Cannabis sativa
ggagcaacttattgatgattttcccgttggtcctttgataaagaagtgctgtacattggaccaggtagagatagtttgttttgagatctaatttgtcatttctttgacacatgtactgatcggtagtcaatcaataagtattcttcaatgattgaatagggaaaagctgtcattacatttctcgattcaattttagacaagacacttcgaagcaccattgctttgctagctgctcgaggtcgtggaaaatcagctgctctgggcttggccattgctggagctattgccgcagggtaattgatgtcaagtagtttcctaatgtgcatgctctatgatttatttattttttcaagattgcaaatcctgaactctaatttgcgaaacttattgtgtaggtactcaaatatctttgttactgcaccaagccctgagaatttaagaactttgttcgactttgtttgcaaaggttttgaggcacttgattacaaggtaatttacttcttctatctcatggatgttaaaattagtttctgattttgtgtattgtttggttttttgatactcaaagtcaacagtgaagtgactactattgttagtagtaggttgtgtggttaaactatttcccttgccttgtatatccttatgtccaactgtcatttaagattaggcatttgtattttctagtcgatttaatatgccaatctagagtgcatgatcttaaatatggcaatctagcatacattccttaaacttcagggatcaaatttcatcaattttatttagtatataatatattcacaatttgtgttttattttctttaacatgaacccttgtatggtttaaattaacatttttaaatgagattcatacattctaaaagtaccactatagatatcctgaacgtgtcatctttggctgtgatgatagactaggtgctgttagtgaactgggtccgctttagggtattactagttctccctttcccatttttcattgcttcacaggatttttatttccaaatgaaactaattttcatatctatcattgaatgtggattttatttttgatggttttcctttagagttgtttcagatttaatgtttaatgcatgtgcagtttcacatttatttattctttgagcatgcatggttgtgcagggtcgcactgccacttgcctactttgcaaggtttactgatatggaactatttttatacttacaggaacatatagattttgatgtggtgaaaagcaccaacattgagtttaagaaagcaactgtacggatcaacatttacaagcagcataggcaaacaattcaggttagctaatctgtttcttatataggtcaactgttctacatttttaaatatttcttgttttctgtgagaataagtgacttatgatatgtttcatgcaccgattactaaacactactgattgtcttattagattatatttgcatattgctaagcactagagattggtcttatagattatatttaaggcttattaattcctgcttatttgattcagttagctttcttttactagcaaaaaataaatacttatataagtttctttcagaatagggaatgtcggtttggatttctttaagttgtttgcttgattatcaaaaagttatatttgttagatgcacactagcaaattcttctctctaggaatcagacattaaggacttccttgttagttattttctttttccccttccaaagtgagaatgatggatattttcgtagacaatctatcgaggaaattcccacacttaaattttcacttccaacatagaaataaaaaaatgaaattattattgagagagcaatgttgtttgtctaatgaaattccatacactaaaataaactatttttatgaattcttgaacatcctctaacgggccaaattagggctatatcatagtgtagattacttattcaatcaaggatgtacttctctgaatatacattgtgcagtatatacaacctcatgaacatgaaaaactctcccaagtggagttattggtcatcgacgaggcagcagctattccattgcctgtagtaaagtcacttctgggtccttatctggtcttcctttcatctactgtaaatgggtatgaatttgatatattaagttgcagatttttgttagtcagaagtttcttttggtacatgaaacgactattatctttatgttatctaacggtttacctagaattaatttatatacttgtttgcttttgttttttcctctaaaagctatgagggtactggccgatctttgtccctaaaacttattcagcaattggaacagcaaagccagacatcagctcagggtgtagagggtgctctttctggtattgtatactgcccatgctttgtttataaagttctactgacaaaaataaacaacacgcttgagaacttcttggccggctgctgtgtatttcctatgtttttgtttgttttctgtgttgtggggggcaaaaatttggtgctaaaatgttactcaaagtaaataaagggcacacaatcaatttaagtcctgagttttgattaatcaaatatattaggaatctgtagttctaccttgtgtatcaatcattttatagttgtcatacatagtttttctagcctttcattttaagtcctgagttttga

SEQ ID NO: 105799 - DNA, 606 bp, Cannabis sativa
gttctggtggggatctactaaggccaagcatcaaattcattggggggattgggagaaactttgtaaggacaaatggacaggcggtatgggttttaaagatttggaagatttcaatcaagctcttttagcaaagcaaggttggaaattggttacaaatcccaatagcttgtttgctcaagtaatgaaggctctctattttccaaatacagaattttttgaagcaagaaaaggtactttgtgctctaatgtatggcagggaatcctttggggccgtgagcttttattgaaaggaactagatggcgtgtgaatgatgggcgtaaagttcggataaatgaggataaatggattcctagaggtcccccttttactctccgaacacctgctgaagttcctcccaactctttggtggaaactttaattaatgaggccggggattggaagttagaagccattgaggaaaagatgaacaaggatgacattccatggatattggggattcaaacaatacaagactctggagaagatggacttatttggaatccaacacttgatggggagtacacggtggccagcgggtatcgaatgaagcaaagtgagaaagaagg

SEQ ID NO: 105800 - DNA, 5608 bp, Cannabis sativa
  modified_base (170)..(171): a, c, t, g, unknown or other
  modified_base (1290)..(1293): a, c, t, g, unknown or other
  modified_base (2377)..(2390): a, c, t, g, unknown or other
atgcattacatttatttttattttattttaaaacttaatatttttaatattagaaactaaatgctacttgttccaaaaaaaaaatcagttctcataacaaatttcacataatattagtacttcaattcgataatcatgttccatatattgcattggttcactcagctatnntaatttagtattgcatctctttttttttcaacaagtagtatttagtttttgatattaaaaatatttaattttaaaataaaataaatacatgtaatgcatttgagtcatccacgtgtttatatttatgataagttaacggaagtggtagtaacggtataggagaaatgtaacattagatatttttgtctctcaaaataaacattaggtatttaaatgtataaaatctaaagcattaagtatttatgtcacaatttaccttataaataatgtcaactacttatgaaagtctagaataattttagtataattatttttatcagcaactgaaagttaaatataaataattatactataaattacttttttcttaatgggatgtcgcaaattacttttcttcttattattattaagttactaatattattatgtcaaaaatacttactaatattataaactacatgtcgtatttctgcccttctttctcaaaaattaattcatctctcagcataatgacgagccacaaaacaaaggacaacgtggcattctacatgagagatgcttaactaaataataacgaggtagatttgcatcatctctatgctgacaataaaatttcaaatttctatacttacaccaaagatcaattatatctatcaaactaccatcaacatcgctgcagcccttttgattcaagttaaggaaggggattacatttagtcaatccaatggggactttaagctaaatgaccattgtcgaaaaattactaaattatatgactctgacaaatggtaggtaacatctaattcaatccaattgaatcgagctaatccaatctaatctaattacaaaaatttagatatccaattataaggtcagtttggcacaactgtgctgtgggaaaaagcagttgtagctgtgctgtgagaaaaaacagttgtagcaaaactatggaaaaaagctgaactgggtgtttgtagttgttaagatctattataatgataatgataatgttataatcttgtttattataatatcaaatacgtaaaacttattttatatattttattttttttatatattgttttttaaaaaaataaatataaatttatatgcatttnnnnaaaataatttataatatttttttattatgttttatcaaatttagaaaaaattaaaaattgtatataagaaaaattctaggttgatgttgttggttaataataaaataaaatataaattaattttttttttaaaataagagatttaataagtatttactttttcttcaaaaaaatatttattttattataactagtttattttaatttattttatttttttaatatgtaataaataagtaaatatagttttagtacaaaaaaaaattattatagccttttaaataaaatagctctttctaaaagttgggttagagcagcttcagcttttagctgtagcttctccaaaaattctttaaaagctattttttgactgtttaccaaatacatttttattacagctttttcaaaaagcaacttttagtttttccaaaagctgtaccaaacgggcccataattggattggactagattggatgttaaaagttgaattctaattgaattagatcagttattagatgtcattatcaaaattcaattaaaaacagatcaaatcaaattacattgatacatattaaaatatatattatatttatttatgtatactaaaaaaagtacatactttaattatattttacaagattttttttattgaatttgcaacatttggttgttttgtatatttattttcataatattttgttctattttattacttcgtaatgttgttgttttagttatttcaaatttttagctgtgttacacttataggaccacacttttcagggccccaaaataaaaaataaaaaagtttattaagtttttatttaaataaaattaaatgtattgtaaacaaatattcatagctttgttgattggggtatataatatattatacaatgtcataggtttgaatcccatgacacactttcaataatttccttatatattttttttgaaagtgagagtgtaaaaatttaattcgctttaggcctacatattcttaggaccagccctgcttgtaataatgatatttttgtggagtattaaacttaaataaatagtgatatttagtttttacgtattnnnnnnnnnnnnnntaagttaatattaaaaattagatgtgtaaatggataaccaattaaaaaaccgatacaatccaattagtaattggattagattttgaggtctaattagatcatattggatgatgattttctaaatccaagtactaattggattggatcggatgaggaaaaaaatattggattggatcggatgtccaaccctataatgtgacacttaacctaataatcaatttttttgtggcaaaactaccagactgcacttctgttttagtttttacacttttgttaaactaatgttgttaagtgtcaaggtggacatcacaagtgtacacgtgataaatttctaatagtctacataatattaattatttgaatatattaaaattattttaaaatgttaaaatattttttttcaaaaaataaataataaaaattgcagcccatttctctctttttttctctaaaactatcgggaaaccactactataatgccttaactcatagagacgtcatgtgtgtacttttacaatttagtttataataataaactacaatttatttaaaatatgtggtttaattaaaattttaccatttaaataaagtgaataagaacataacattacaaatttttaagcttcggggatccccttttaaaattttacaaaagttgcccacttggcattacattcaaaatacaactttgagatctcaaaagcgacataaaatcatgtcccgacaactcgaccctactaactgaataaactgatatgtacatttgccgaagaagaccatcaaactcatagttgatctaacttgccatttcctttacctgcaccacgaaagacccctgagtcacaaagacaacaaaaaaagcaatgtaatatacattacgcatcattatacacgcataaccaagtaagcacatacgttaatccatcaacaaccataaatatcaaatatttgtctaataagacaagcttcactgctactttataaaatatttttttagtgtcgttgcctaataaggcaaccattactaatcatattgtctactaagacaatcattactaatccccttatctaataaggcaaccaatactaatctcgttgtctaataagataaccattatatataaaccttttaacagttttatgtagagttataactctttcttacatacggttatcaccgtgtcacacatagacatgcatataggtacaattgtgcgtttcttacctaaaattcaaatttaagtatactgaccaacctgagtggaactcgctcgaagattaaggccttacgtcacaacagcgataaaccaataaataactcattataacccattctaggatttatactaaaaattgaaagtttttctatcaataaaaaatgtggtaataacctaaatattgagaaaatataaaaactgcagcacccaaaactaagctcatccgggaaactagatcccaaccgggtacccaaaattttgagtacaaaccagtagaaccggttacctggattgcactaggaaccaaaaattttgagtttttaaaacttaaatctaaccccacttgtttcaaacttaaaatacacttccaaaacagttaaaatggtcatttcaaacatattattcagctcaaagtaaaaatcgtgattgtgtaaggttagagtgagacagtccatagtagagggagaaagttcgtcttgtaatctcggcaacagtatgagaagattcttgtaactttgtaaacaatatcaatatggttattgctgttctaactgagatgtagagcatggcctatggctcgaactcattaaatcctaatgttatattctccttgatttactactttaatatgttatctagttttcttgtgattctttgatagtgttgttcttgattgtgtgtttgttgatctagtatacttgtatcgtaaatcattaattgattcacaacacactcatgtaatacacaaaccctagcctccattatttctctatgcgctaatctctctctttaaaaaatttaccacaaagtttaagaaaaattgcccatgctagcttaggtgattcaaaggcctttttggaagatcatatgaagaacaaagatgaagataacggtttgaattccatgaaatacctggcatcagaaaggacaaaaggtaaaaaaattaaagggggagtcattaattccactgcgtgattttaagtatttcttatgtaatctttgtttatagtaaatcaattagtaacatgattctaagtgtaattacatgatttatttgttatattatgtaattctacatgaaaataaatcaattttattatgtgtttcttaacagtagattgcacataggagttggtttgaatcgaaactgatgcaagtcagaggatagtatgtcaatttgggtgcaaagtatttgtactagacccaggttgaactccgagatgtccaagtgacatcctcaatctcatgattaatctttttagggtcattgtgacttgttcgctttgtcttgttgaaagataacacttagaaacgatttcattagattttgatgcttacttggacaccttctaatgtccacatgggcactagcacaattcccaacacgcaaattgaccaccttatcaagaggtagtgccagggttgctctccttctgtaaaaaatgatatcaacatgtcaaatttctaggtaaacaaatatgttgttgaagagaaaaggagttgaaagatgggattcaaaaatagagaaaatgtaatttgatcgttttaaaatttacagcataaaattaaattgtatttcagaagtttgtttttgaaaatgtcctaccaatcagtggtggattgagggtataattttaaggtgggctaactaaaatttgcactgaaatttaaaataataattattgtaaaaaaaatatatattatatttttttacttaaatctcgaataaaattattatacagattggaaaaaattttaacatctaaaaataatataatattttataattctcgtgttttgttatttatttgaaaacttgtgttggttatagattaaatataattaaacataataaaaaaaatttctaaaaaatgttattagtagattaaatactctatgttaaatattttgtagttttttttcaaaaaaatagatttatatatatatattttttttttgaagaaatttatatatatttatatagaataattatctttttta

SEQ ID NO: 105801 - DNA, 558 bp, Cannabis sativa
  modified_base (217)..(218): a, c, t, g, unknown or other
aatgatttactttcatgaaatattaattaaaacgatgttttgtgttgatttggatggtttcatgatggtttatgtgcttatttgatgattgtctggaaatcgcaacatatgttgtaaaaatatttttttttcattctgtaaatatttttactgaaaagtagactaaaaattaatgaagttaggcttttacataacccaatttggattttttatgaannagttatgattttttgaatttggatgaaaatatctgaaatcgggtgcacacgtgtgcgcgcacggaccctaggcgtcgctcggacagcacgcctcttcagacaggacctgattgagttttctcgaacacagccctgtttgaagggctgctcacgctgagttttctcagcatctgaggctgcgtacagccttgtttctcgaccatgactccccttccgcgcgcgtaaatgcatagccctgtgcacaaaaattgttttcttcataattttttattcaaaaattatttttcattaaaacaaaattcaaattttggtagaatattgtgtagaatctaaattttca

SEQ ID NO: 105802 - DNA, 892 bp, Cannabis sativa
  modified_base (149)..(153): a, c, t, g, unknown or other
  modified_base (579)..(585): a, c, t, g, unknown or other
tgaagaagaaaattgacaaaccctagctgcctctaggtggattccgagagaaagagagagagtgaaaatttgatattttccttagttttgtaaaacatgaattaaactaattcttttctttctttttgttaaaataaatctcagccaannnnntcaaataaaccaaattataagcttaaatttaaaatcactaaagacaaaacacttcatcataaaatgtccatttttccccttaacactaaaaatcactaagggataacttgggaaattctaaaatcctgaccaatcccgacattcccaatgtctaactatatctccccactataccaaaatacaaagatgtgattctactaagccatacaccgtgttccaatgttgctgggcactaaacatgaaaaaatacgaaatgtgtatatatgacatataaaatgcattctaaattcaataaaatcatcataaattaatagtttagaattaataactaattttcataattaaacgctaaatgtctgctaatttccaaatttaagccaagcggtctttacaattatccggccttaaaaggatttcgtcctcgannnnnnncctgaacaactctggatattggactctcatgtctgattctaactcccaggtggcttcctccaccttgctatttctccagagtactttgactagagttgtggtcttgttccgaagaaccttattctttctatcaaggatctgaactggttgttcttcataagacatatctggttgcagctcaagattctcataactaagtacatgagcaggatctggaacgtattctctaagcatagagacatgaaatacgttgtgaactgccgcaagctctggaggcaaagctaatcgatatgccacttgtccaacc

SEQ ID NO: 105803 - DNA, 558 bp, Cannabis sativa
tattaataagtaaatctgattacattgaaatgagttttatttagggcatacaacccaacaaatagttttaaaccgtcacctatagtatagccgatgattttaaaccatcgctaatggattctgttaaaaaatagtcatcgtcttcattctcctcaaaaccacttctcacatatgtcgcagccgctccaaaaccttttcaagcttgatcatcctgcatcgttcctgtgctcatcttcatactcctcgaaactttcttttacgagcttcattacttttcacttgacgatcctcagaactttcttcgaattgcaagcttcagatttcttttctacacacaaagatcaagatcaacaaaccaaatcatggctaatagaaatttaaatgacaaataagagaatgttgcgcttacctttttattgccacgggagagcggaggagagcgatggagcgagagagaatggaggagagggatgcttcgactagtgctcacggaggagagagagctagtgaaatgaaatgaatttacaaatgactttgaaaaaataaaatctatttttt

SEQ ID NO: 105804 - DNA, 555 bp, Cannabis sativa
  modified_base (175)..(183): a, c, t, g, unknown or other
aatggaaaatggagggtatgtatcgactttactgatctcaacaaggcatgtccgaaggattcgtttccacttcctcacattgacatgatggtagacgcaacaactggacatgaattgtgaagtttcatggatgccttctctagttatcaccaaatcttaatgcatcccaatgatnnnnnnnnnacatcattcataattgagcgagggactttttgctacaaagtcatgtcgttcggactaaagaatgcaggtgccacgtaccaaaggctggtcaatcgaatgtttgctgatatgcttggaaagatgatggaagtttacattgatgacatgcttgtcaaatctttagtagtagagaatcaccgcgatcacctcaagcaagcattccaggtattagaaaaatacaatataaaacttaaccatactaaatgctcttttggtgtcccttcaggaaaattcttaggttacctcgtcacaaaaagagggatcgaagcaaatccagaccagataagatcaatccaaaatatacaatctctaaagtcaatcaaagatattcaa

SEQ ID NO: 105805 - DNA, 621 bp, Cannabis sativa
ttaaaaatgtataaatgaaaaagttaaattgtataaaagtaaaaaatgacatgtggcattaaaaatgtaaataatttgtcaaatttatcattttgtgtaaaaaaaccttcttgatttaagtatggattatatggttgtgttcttggctgaattttcagggaattttctaagttgaaagtcatgtttattgttgtttttgttgctggaaaatatggggattgttgagttgaagctcaagttcttgagcttgagttttcttggtttaatgcatgatttagaattgattgtgtagtttggattttgagagttgttgttgtttgctctctgttgtgaggatttttatctgtaaaaagttaattttgggtatggtttgattaaggttcgaatatatggtaaagtgggcatgtttagaccttaaaatctgattttctgggtttttcgaacccagtggccgcggccagaaacccagcagagagccatctttttcccgattttgttttggccataactattgattcgggactccgtttggaacattctttataccgctggaaagctctttcgagctctatgtgattatatgtatttgaaatgccatgaatttactttatgaatgtgaaa

SEQ ID NO: 105806 - DNA, 951 bp, Cannabis sativa
ttatacgatctctttcgatgtttgttatttcagttcagtttgttaaacggtctgggaaccaagcggctaattggttagctcgttcttctggttcatgtcttgaccgtcttttctgtagggggtctgtccctattggtttggaagctattttattagctgatttgcattaataaagttgcaatctttgtttcaaaaaaaacataaagtcctaataattaatacttcaaattaattatatataatagttaatactccgaatagaaaggcaagagttttttcaagctttaatagttaaaatttatctagtacacgagtcagatttacttctctaatatttttgtgtacaaattttgacaaggactcaatacacacatgttaggtataggcagataacataaatagctaatcacttgaggctagttcaagtagctataaaagagtacgtgtgtttgaagttttgagttcgaatttcaaattatacgttgtaatatataaacgcttaaataaaaaaaacataaatagctacttatactttgaaaatataaatacatctaagtcaaaacatgcatgttgtagtaaagtggcactttgctaaatgggttcattgatcaagtcatactaggcaagacatatgatttatttttcttaggacgggatgtcttgagcaggttctacaatctataaaaaggagtgattcgaggaacaaataagtgtattcaatattaaaagcgagaattaattcttaaaagaatgggtatattttcttttacctagttttataagaattaataaatacatcctaaatattgattttaatactttacagaaaaattctattaattttttttaagtaaaacaacaaattaaaatattacacattatttattattcaaaatactaattattatacaaaacataacttaaaggattataaaaatgatactaatatac

SEQ ID NO: 105807 - DNA, 684 bp, Cannabis sativa
tgggaattttgccgccatttaccccaaatttaatatgctacatacaattatatgttaaagaatgttgaccctcaaaagtcatatagataagtggttaaaaaagtgtatgtatagcatagagacaaaataatagtcaccaccgtaaaattattctacaaatgtaatacagccaaaaattttaaataattaaaataacaatatttctaaataataaaatagaacaaaacatcatgaaaataaatacacaaaacaactaagtattacaaattcaatacacaaaaaaatctaataaaatataattaatatatatattatatttttcaatatttttattatataaataattttttaacatttattaattggattggatcgatttttaattggattttgagattaacatctaataattgattcaatccaataagaatctaactttaacatccaatccacaattgtaattggatatccaactttttgtaattggattgaattgaattggatcgattcgattcaattggattggattagatgatacccacctctatttatttgtccctagttctcattttttaactttaatatttttatttaattaaaccgttaggtatttatctgcaaccgagaattaaacttatgtaattaaaccgcaaattagtcatttatgaatatatatatatatat

SEQ ID NO: 105808 - DNA, 625 bp, Cannabis sativa
atattgatgagtggtcctaattttgttactaatattttcttattaatataggagttaatccattacttttaaattattattttgtgatatgaatgaaaggattatttataagctttatcttccgacaagggtcaaaatgtgacctttgaccacccaagttatggatattacatatttgccacggcctagggcttgggtcgtgacagaaaaatggtaccagagcactaggtttaattacttcggagtgtgtcaccaaatagtttagatttatttaaataataatagtaataagtatcttgatatttatatgtataaggcatatttatattattagcatccaaacctcactaactgattagcttctggtttttagacctaagaaaattcctccaaaaggaaggaagacaaggagaacggttggagaagacgtccctcaagctattctccaacctccacaagttgaattccctatgaacgcccttctcaaagccttaagagcatttcccactcaactgatggatcctgctgctcaacagagtcatcattttcagatctttcattggatccaagtgcctgagtttgagggtggacaagatcccatggtagctgaaaggcggttgaggct

SEQ ID NO: 105809 - DNA, 649 bp, Cannabis sativa
ttgtaaaaatcgaaaaaatcgagagtttataattttttaccaattttttacccttattttacccttaaactctttactttacaagtttgattatttgctttcaatataggcttcaatgaatgacaattatgaattctagccttaaggaattattttacctggttgctaatcctcttcactgaacaacaagcatcttcgaacacacacctattacggtcacaccaaattaaataaacaacagcagcaatgatagccgaaattaccatattctcctttaaagttgttgtattcaaccaatcactaaggcaagccggccaatcaaagccaccaaaccaggaagaaatctcagccaacaccttttgcaaataaacgcaactaaagaagagatgaggatgagattcagaatcaagctcacaaactgagcaaaggacagaatccattataattaatctagctaattgatcttagtttaaaagattctcattgacaacttgccaaagaataaataagtgtttcggcatcttcaatttgtgccaaactatcttttgataagtccctttcccagctaaaatgagcaagataaaactttttagctttaaatttcccagaactaccagttgcaattaatttgtctttatcaatcgtgttc

SEQ ID NO: 105810 - DNA, 1264 bp, Cannabis sativa
  modified_base (119)..(124): a, c, t, g, unknown or other
ttttattttaaatttatgtcaattcttttaatttttatgggttattataattttttggtatattgattttgtggcatagtatatttttattttgttgtatggtatattattattcttannnnnnatttattttttattttattatgtataatagtgatatataattttgttagtattaatacaaaataattttcttatcatgctatatatatttaattattattattatattttttaattgtatgatatattatttatttttattttattatatacaatgctggtatataattttattgtcatgatatatatatatacatttaaattaggatatataatttagttagtatataatacatatatattagtaatatacatatatttattattattgttagtatatatattttggtgaatggtatagatatttttttgttaaacggtatatcattttttttaaaaacaatatttaagttctattttctattgtacttttgttgacatgacatgtaatttaattagcatgttatatatttttatttttatttgttgttagtatatatatttctattgtaaggtatatattttttgttatatggtatataagttttattgtatagtatattatttttagatcatgcatgtttagtttttattttattatatataaaagttatatataattttgtaagtatgatataattattttatggttgtatataattttgttaatatagtatatataatttttttactaatattacattattttgttttttttattgtaggtatatatattttgttgtatggtatatgttgtattttttatttttttatgttttgctgtgtatagtatattattttgttatagtgaaaatttctcacctagaaactcgagactaggctcccataaaaatgacacgtggactcactctcctcgaggagggctgagatgtcagtaagagacctcttgagtgtaaacctcgcctgaaccagactcagccggatgatgtgaccttgacagagtctaggtcgcattcgaatagctcgttcgaagcaggaccgaagatcgagttaagactcgcatataccaagaaatatgcgaggactataaagatcttcctgtgaggtggtaaagatcgtttctatactcagcgagttggttcggatgacccaacaacctcgataacccgataaggactcgcatgtcttagattatcgacttattacaggatgtccatataagcgactcgaacaggacgca

SEQ ID NO: 105811 - DNA, 507 bp, Cannabis sativa
tttagctgatcttcagccatactttagtgcgctctatcattacaaaatcctggagccatctcggcttcatacgaactcagctcaccagctcaggaccctctcgaacgactcctgggacagcagctccttcgttggttgaagagcttggttggtttgaacttttctcctaggctgtattttcaatgatattctttatgctttatttctaaactccaatatcaatagttattgggctttctagttgggtctcactaacattgacgtgttaaatttttttaaatttcttaaaattttgcaaaatatattaactaattataacgtacataattatgagaaaaaatgtgaataaaaaatcatttcaaataccaaaacaaattggaatacattgtagattttttttaaatatttttaacaaattaattaactttagtttgtgccctaaagaaaatccagttcaatataatgagatttactaattaatagagataagaaattgcttttatgttg

SEQ ID NO: 105812 - DNA, 661 bp, Cannabis sativa
catttacaagtcatcattggaggcccgcacatagctggagattcaggcaaagcccgggagaggtatgcccgaacagtttagcacgagcaacaagaagtgatcctggccgtagaagagaggaagccaaaaatcccatgcacaggagagcccaccataacattcaatgatgaagatggtatcaaaatcagatttccgcacaacgacccattggttgtggaagtccagatagctaaaaagatggtggccagaactatgatagataatggagcctcttccaacatcttattcaagattacatatgaaaagatggagctccaactcaaagatctaaccccctgtcttcagcctgtatatgatttctccagccaaggagtcccacctctagggaaaattcgcctacccctcactgttggacaagctctgacgagcataactataatgtcgcgatttctggtattggacattccctcagcctttaacgtcatgttaggccgaccagccttgtatgacttaaaggatgttacgtcaattttccattcatgccagaagtctccaacggggtagggtgtctaagaggaaaccagcaagttgctcgggaatgttataaccttgcagtggccaaggctaaaaaggaagtatcctccagccagagcacagacaa

SEQ ID NO: 105813 - DNA, 878 bp, Cannabis sativa
tttacattaaaatattatttgtacatataattttttttttaaatatgtgtggattgaattggatcgcctattttatgaaaagacctaattagattgttagatattaatcgttaaaaagggtgtgattaaatgtttaaattatttttttagtatataattaattataagtaatcctgttaaaaaaagattaattagaattaattaaatttaagaaaagtgaatttttgcctatccctcatctattattagagacctaaaacataaagtatttgacaaaatacaatttaaaggaggaggaagcacagacactagaaaatctctcgcaaaaatcccaaccctaacccaaaccgttcttcttctctctctcgctttcttttttcaattgttctgcttttccggaaatcgcaatcggatgttctaactgaaacacctgcgttgtagatctgattagggcagaaggtgcgtttacttttcttttaattttcttcttgtccattttaggttttttcctttttggcgtggtctgcctttggagaattccgggttaattgaatctggttgagggggcgatttgatgttgttggatctgatattattccgattgttatccctatcatcctatttgctcgaataggctcattttttttttttttatgtaaatttgttacagacagatgttattgtgagctgtaatgggatttttctccgttttcttttttggcgtgtcgttttgtttttcttatatatgtatgtatatatatatttatgtatatacataaatatacatacaaaatatgatgcctatattgcttttcttgtttccaccggattgatacaaattaccgagcatatgttggttggttggttgttgttacgtt

SEQ ID NO: 105814 - DNA, 802 bp, Cannabis sativa
ttactccgagtagcagataaatacttaagtcgtatttttggcggtaaaaataccttctgttagagttctggaacttccgtaggtacctgaccgttaaagacaagtaagtatccacttgtcatcttttcattggtccaaatgtattgatttttattttttaataaaaaaattatttaaatatttaaaattaatataaaaaaatgaaaaatatactataaaattttaaacatatatatttaaatattttttttaaaaaaataaagatgaaaattaaggttctcttaaaacctagattactaatcattcaataaaataaaataaaacctaaattactgtatatcgtctccttcttctaccattatcagtttatcaccccttctttctttttcaatatgcagcagaaaataaaaaacaataactcatagaaatcacattaataaataataaccagaaacaaaaactcacaaactaaattctaacattactcaaatccatttcctgcaattcatgtgcataatacaacacaaatgagaaattggactgtcaaataaatccaaaaaattagttcatattggagttccgactgttggtacactgtcggctcatattgtttgctgaagtttcgaaataccctcgaaggagtttcaggtgtctcttcgtagcaccagatctgatttaggggatgagtttaagtgcgagataaagctacgaaagataagaaatatattttagatattaaagcaattagatctgacagaaacaataagaaaactcattcaaaatatttttcaaaaatgcataa

SEQ ID NO: 105815 - DNA, 586 bp, Cannabis sativa
agaacaaaaagaaaatataaggtttatctgttaattaagagatttttaaaaatctagttaataaataagataaatagtaatttcatttgataattaaacgtaattattaaatacataaaattaacatttaaaattttaaatgaaaaaaaaatgatatttttgagaaaagataaattttaacttaaaaggacgttatagctctaaactaaaaagacacctattcacatattcagatatatacaattattagagagatattttgagagagagagagagagatttattatattctctagttatacatttctatgtatatgtattcatatactatgtatacagattagagaactctgaatattgttgtcagaaaagtgagattgagagttataattcgtagtatatagagctcaaaattttttttagtcttcttcttattttcatgcgctaagggttttgaattattttccattcatagaaagacaatactcaagatagtgtagaagattatgcagtcattcatattcaggaggagataccaagttcaattcttgaccatactttgtgatagaaaggattaagcgttaga

SEQ ID NO: 105816 - DNA, 1254 bp, Cannabis sativa
attttgaatctccttcattttttttttcatcaaattttgcccctatagtgagtgagtgcatgtccacccatagtaagtctagtactcaatcgtaaagtgtaagactttaaagaatctaaacacttgaaggagaatcgggctcaaatcatgataatactctacgatagaaaggaagaagggttaaaaatctaagttgatggagtcatatatttttgctacaatcaatgtaaggtttctcgactttatatgtgtttaaattttattgttatagaaattcatatttaggattttttttcgaaaaagagaaatctttattcaaaaacgaacaagctaaaaacaacaaaggtaaaagccatacacaaccacacggcagcagctaaaaacaaccagcagccacacccaaaagcactaccaactcttaattacatttagtaaatacaagtaatcacaagtcaactcgaatatgcatcggttcctattttaccaaagctggtacaaagtagcagctgtcaccatcttcaggacccaattttagaggtcttgagcctttttttgcacctgctaacaagatcagaaatcgaaataggccaattataaactccagccaagaattcacatccttaagcacctgtttggcaaagatgaagctaaaaaaaatatggtcatgagtttttaactcaacatcacaaaccggacacaaaatattatgtaatgaaactagtctactcaagaaatctctagtgaacaattgagaattaaaaatttgccagtaaacaaatttgtgcttaggcaccaataagttgtcccaaatagctctagcatattcagctttagacccctctaacggtaggttgtaaaaatttttggctgtgaactttgtacctgtcacagcaagcctcaacttggcttcatctgtgttgtcgcaaaaattcagcaacttcttaaagtaccagtaggtatctcaatttttttggaagctccatatatcattgtattttagatagataaagtttatccactttacccataaacaatcttgtttgttagattaagcccgaagaaattttgccattagagccttgttccattttttaccttcttggaatccaactccttcaagacctttaagaggcaaactttttcccaagaggcatggtgaggcttgctcttattccgtttggttccccaaaaaaatcctgacaactcttatcaatggcagttgtgaccttggaaggaataatgaatatgctcatc

SEQ ID NO: 105817 - DNA, 571 bp, Cannabis sativa
ttttttttttaggttttccaggaaacgagagaagaaaggcacaaagaacaagaagataaccaatatctcatacctcctatcaaatatcaacactttatacacaaaggtcttattttataatattttagtcaaactctcaccattcccactacaatacataaagggaaagagaaatggtaaaaggtacgtggtgccaagcaccttcttatgtgtcaatgtcattattggtccaactaagtattgggtcctatataatttaatataatagcttttaaagagtatcgctaactaatcgcaacgcgacatatcacaaaggtgctagacactactggtgcctaatagcaatgctcaaaggggaaacttacaaaaaaacaaaatacggtaacttttacaaaaaatattgtcacacataaaagtttacaaaaatattgtgtttttataaattatcaatataacacaaaacactcaaaatactagtataacaactaaaaaatatcagtgaaaacttaacacaatatactaaatatgaaacttataaaaaaataagtaaaaaagtaaaaaatactgtctg

SEQ ID NO: 105818 - DNA, 849 bp, Cannabis sativa
ggtttggaacaattttaatattataaaatttttaaaatttataattattgtggtggaaagtcttaaatttttatttgttaatatatactgatagttgttttacataaagtataatagtgaacaataaaataacacatgcagtaataataataatcaaatgaaaaattttatcaaataaaaaattgaataataaattttgccaaataaaaatgcataataaatagatgaaaagttttgcactaaaaaatatctgaacgatctcaattaccgtcgatctcatctaaatttgttagtctatgacaactttggataattataaaacgtgtggtaagacattaatatcatccaaatataatagtttattgttgtaaaatttatttactatgtaagtacacacagtggtaatttatttgctatgcaagtacacacagtaaaataaaactaaatatttttttatacatataattttttcccttgtgtttgttattttttgttttatttattttaaattgttgttggcgacataaaataacaataatttatttttattttgttgttagttatgttaaaaaaaaaataaaaaacattaagtaattcaacattaaaaactaatcaatctaatccgctcttttgcgaattggatttgagttattacgtggatttgattgaatccaaaatataaaattcttacttagtataaatcgaatgcactcaaaatagtgtggaatggattgtatgattaccgttattgagaatggtacagaagagataaaaaactcttcaaaaaaatgaaataaatgaaatatgcaaaaaataaattgtataaaattattaaatgaaggtgtcaag

SEQ ID NO: 105819 - DNA, 1645 bp, Cannabis sativa
tgcaggtaaagctattaatttccggctatttcaattgtagatattgattatatatgcatatatttttgtgtgttttcatcgtagtatcagttgcaatgtttggtttccctgaagtttttttctttaaataaaataaaataaaaaacaaacaaattgttcctcgcagttgaaatgtttgatttccctgaaaatctgaacctttattaatgagtaaattggagtcaaattatcatatagttgaaatacttcttttttctttcccgttttcttaatcctatctcgactacaattgtgcttacgcaatttttcaaccaaataggagctactttgctaatgacttgttatacacgatgattttcttgcgaataaaaacgactttgtgattttagttaagctaatttcggtttagtaatcagagcagagctataaaatatttgaattgtttttttttattttttggtttgtactgaatattgaattctcttttggttgcagctgggatcattcccacgtagctgcagctttggtttcaaatcatatggagtacttcaaaattctgtgcccatgtcaaaggtctattgtgcaatgaacatggcggcagggcagtcatcaaatgattccgggaaaacaaagtttgaccagttgatggagaaggcaaggaaattgtgggaaggtttccctcaaccagtgaagaacttcccttggaacagagcatttgacaacttcattcagcttaccctggacctcatcttggcagtttttaaatacttatctgtacctttacttgccgtgtcctctcttagcgagatgtcttactgtgcacatgaaaggaagctgaaacttgtcccttttccattattcatcggaattactcttgctggagtcttgaggcagacagccttggaaatttccccacttctcaaggtaagatgtttaccaaaaatcaaaaatttgtttggtttattctgaacttcatttgggtagaacatattttactgttgaccaaatcttgtgacatttgtggtgctcagtttaaattccaaatagggtggtctgatatttacttgtcttgtcgtaatctgtaaataattacacaaatctgcctatacttttcttagttcgtcttacctgagtattcttaaatggtgcccaaaataatgtatattctaatggttcctatacttatctggcttaatttcagaatgcagaagttccttggcatctaatttgcatggctattttcttcactttgcttaaattacctggcccacactacccgtactgggggcgcatatttatcccacattttgctaatgggggtttattaaggactctgtggtttactattttgtggtacagaagacctcaaaacaaatcaagaacaacattgccacaggattcagaaaacaagtcttaattcttccaggtatatatatataatgtgtgtctttttttctttctcttgtgatgccattttactatactgtgtactcctaatagggtagacctcaccttattagcccaaagatttgtgattatgtcagatagttgatttatttcctttgctggcttcccttcacgttatgcatctttatttcaggtagtattttgtcaaacgaagattgtggtaattgaatgctaaggc

SEQ ID NO: 105820 - DNA, 547 bp, Cannabis sativa
actaagaacttgtaattattacccctccatgattaaatatataaactaaaataataatttatgaaactgaacaggaagcatcagaatatccaattattttagaagcatttccttcttatggagcacgaaaaaattctacaggaagacacagtagtctaatgatgggaagaaacctcactgatgttgtaattacaggtataaaacttatttatattgtttattttttgaaacaaaaattttatatatgtacgcaaattaaattgtgcatgatcatgcacccttgtttttatttggtgtgttttttcttttaaatttatttaaattaattttttttttagtttcaggatgttttagaaactataatttacactgtcttaatttttttttttaaaatttgattattcatataccaaaactgaaaaacatgtacggtacactctcttctttttttgggtaaaccatggatagaattgcccttaaatttgaagttaatatatttatatattttgtttttaatttgttaaattgaaaaataggacataatggc

SEQ ID NO: 105821 - DNA, 514 bp, Cannabis sativa
caaatactttcatgccactgctagtgccagaaaagggaacaatcaaatcttgcacttaaaaatttctgatggagcttggaccaattggggaaacggtcttgaccaggttatcacctcttacttttcaaatttatttactgctaattgttccttgcaaaatactgttgccactaatgtcagatgctctataaccattgctcaaaacgaagagcgtttgaaaccagttgccgaagaagaaattaaaactgccctattctagatgcatccacacaaagcacctggccttgatggtatgggttcgggattttttcaaaaacattgggacattgtgagagcagatttggttaagcttgttactgatttctctggtaccgactgttttctgcgggagttaaatgaaacatacctggttttgatccctaagaagaagaatttcacctccatgggtgatctacgaccaattgctctttgtaatgttacttataaggttctttcaaaagttcttgctaaccgt

SEQ ID NO: 105822 - DNA, 1736 bp, Cannabis sativa
  modified_base (155)..(173): a, c, t, g, unknown or other
  modified_base (225)..(244): a, c, t, g, unknown or other
gtcagaggtcgggttcaacgccagggtcgtggggggatttgggtctgggtctgatcgaagtctaaaatattgattaagaaaaaaaaagacattgtttaaaaaaaatatttaaagtgttttgtttttgtttttaaaattttgattcttaattaaannnnnnnnnnnnnnnnnnngttttatagaacatgtttttgaaagatattttcactttttcaattttaaaannnnnnnnnnnnnnnnnnnngtgttaccaaacgccaccatagcttttgccaatgtcaatgtcaatgtcaatgtcaatgaattcatagtattctaaatacaaaaggatttttaactcagcctaaacattttgctcaaaatgctacaactagagagaagtcaagcgtgcctaggaacatcgtgagcaactcgatttgttgatagtctaataaaatgtaaattcacatcatgtagaaaagacaataaagattgacaatcttgaataatcaagctaaaagtagaagacttcgcttgattacttcgaattgctggacaaaaagtaagctattagtttcaagctctatattatgccagttcttgctttaatccaattaagagcttctttgatcctcagagcttccacaacctcagcagagtaaacaccaccatgatatcccgttttagcttcaataagcttaccttaattgtctcttgcaactataccaaagccatacgagctctcttgatgaaaaagtacagcatcaacattaatcttgatgtgattcatatctggtttagtccaaaactcaaacctatcaccactattttcaaatgattgtgataaaaaggtaattttatcctgagcgtttctctaatgatcaagagtaatagaagctgaagctaagacatcattaacggtagaattttgtttattccaaacaacatgttttcgggctttccaaaccatcaaacacaacatagctgcctgacaaacctgttctgcatcggaagtgtcctgcaaaacctcaaactaggtgtcaaaggaggaagatgaagttgtgtttagaggcgtaccaaaacaaaccaacaagatttggcaagaccacaagtgagcagtgcatggagtacgatttcagcatgggaattgcacatgagacatatagctgagatttgcacatgttttgtaacaaggttaacacatgtgggaagagatccagagatggcatgccacaagaaatttgtcactttgggtggaatcttcaagtgccataatttacgccaaaaactagagttttttgtgttgggtttttgtgccctaactaaaactctttttcaatgtaatcttgaacattcatttatcaataaagaaatagaattattttattacttatttaatatattgcttggttcatatgtttatttcatgatcatttttttgatttataaattcacttaaatccttatcacattattgttcatgattactgtgttgtctacacagtggaaagtaataaagattatgtgattaaacattactcccacaatttatcagtacacaagatttctgctgatatgataaccaacaatgtagtttacttacacttggatagtggtatgtctttttcaaggtattggtaaagtaagcttgtattacatgtattgttatacatcggactggaccgatattcacacagaatagatatcataaacttaccgtaatatctttctaagtaaatatcacttagttgatctta

SEQ ID NO: 105823 - DNA, 1361 bp, Cannabis sativa
ttattcaatagaaaaaaattagaaaacataacaaaatagagaaaatagagaaatggaaggaaaagatgccacatcaatgctcttatgctttcctttatttatatatatagatatatagattttatatgcttaatccctgatcttttttgggtagaaaaaccctcttaactttaccttttttttttttttacaaatttgagtcgccaatgaaatcttaccactgtgtacacatgtgtatatatgacatatttttattggctttgaagttttactgtcacgtgtacacatgtgtactatcccagttaacatttgacagtaaaatttaactggcatcttaaatttgtaaataaaaagaagttatgaggattaagtgtataaaaattaaaatataaaaagtaatttataaataaatataataaaaaaattttattccaaataattattgcaaaattattaactaaaaataaaaaattatgaaaataacttattaacttaaataaatttatataaataaatttaatttagaagtaattattacaaaaattactactaaataactaatgaaaagttaaaattttaaaataacttttcagatttatacatataatatatataaataaaattagagactaatctttaaaaaaaatataaactttatttgtatactaagcattataacataaattttaaacaatgtggaatttttgtttaccattacatgtgaagaaaataaatgatgtacataacatatatttttttataaaagatgaaattctctcaaaattagaaaaatagattgggaatactataaaattctacatcatcactctaacatttagctttatatagataatagatttagatagataggtatacatagatagatttataatcgtattaatatttttaagtttctcttttgtaatcattctgaaaactttttagctaataatctttctaaacttgccttgtctttggatatgacaagagtgtggtggccgggtttaccgggtgttctttgataattagtggtgaaacacctttatgtttaaattttatacacttaatccctgatcttttttaggtgaaaaaactcccttaacttcaatttttttgttttttttttttgtaaatttgagccgctagtgaaatctcagagttaaatatcaattgaattatcactgtgtacacatgtgtatacgtgacatatttatattggcttcgaagtttactgtcacgtgtatgcaggtgtacacattgacaatcctagttaacatttgacagtaaaatttaactgacatcttaaatttgtaaataaaagtgaaattaagggagttaagtgtataaaaattaaaatacaa

SEQ ID NO: 105824 - DNA, 783 bp, Cannabis sativa
agggtccaattgataacttttacaaaatacaggatctaaaatggtatttatccatattttttttacatggccttcgatggttttaaatattgatttttgtgagatattttaaatattttatttttaaaattatttataatttatatttatatttttttaattattattaatgaataaaatattttaaaattttaaaaagataaaataaaatctaggcttgaaaatttaaagtatttatattacttagaatatttaaaattagttacaagtagtatttttagttgatatttattatgaaatttaaattatatatcataaatattttcaataatatatattaaatttagttaatttaaatattttttatttttatgtaaatttatataaaaaaataaaaattaaacataaataaaagtctaatttctaaattcgtgtaaatatttaaaattaaaaatttttataacaaaaattaaaaaaaaaaatcatgatttatgaacgtatttattaaaaatgtgttaaacactgtaaacgagggctgaacatcgggcgggtttatcgagtttcaaattcgcgggtttcgggttcaaaaaaatgaaaccgaacccaaacccaaatagggcacgggttggcggtttagtggatcacgggttagcggatttcggttggccgggttgaccgggttggcgagttgacccaatcaactcgatcaactctttaaaaaaaattaattttttattcaaaactaataaaaaataacaataaattaaaataaaatttatatat

SEQ ID NO: 105825 - DNA, 581 bp, Cannabis sativa
gtgaaatgatgatttccttcgagcttggctaaacaagattaaatggtggagtactcattttagtaatttttattagtatactgaaatattatttataaggagctaagtatttaaagaataaaatatgttgaagggtagaacggtaaaaaatttcctactcgatgtagatcatctatagaggatcgttgattatttagattgaaacaatgaataattaatagtgtatctatatttagaacatatagagcgttctatataaacaggagttcaatttcaaatctatagtggagtcagaagaaattaataagtgataactctagaaattagagttatttttcacatttttttgaactaaaattggtttagttcttaagtttttaataatttaataagtttttaattatttttgaatttataagctttattttagtttataggtttttctgtgtttttatatttatttttattataatatgttatgtgttatttatttgtaactttattgtaaatttttaattaattttatatatttttaggtgtgtttgtggaatgaaatgtgggattaaaatgaagaaaaactt

SEQ ID NO: 105826 - DNA, 1360 bp, Cannabis sativa
cgttggtatgtacaaaattaagtttgtttttttgttttgttaaagtttttgtttaagacttacttgcatattctaacaaaggacccatctttgttttttgtttcaggattcacaatgttcattggcatgaccttccctttctttggtggtctattgggattctttggaggctttgctttctcccccacaacatacttcgtaagcacaaaatactatattcataaatatatattgttatttgagttgtgcttacgttcctaattgagagactttaattttctatatatacaaaaaaaaatagaaaaatttacggtataaatcaatatgtaattcactttattgtgctaaaattcttatatagatatattttgatgacaaaaattgtttattttattgcacttaaattcttatgcgcgcattacatatttaatgcaatattaatccctgagctagtgaaaataaagggataacatagtaacaaaatgactatatttgctgttaaaatttatattggaatttaagtgcaccaaaatgattatataatataggaatttttgctaccaaaaaatttacatgaatttttaagtgtaacaaagtaaactactaaatatttacgttgtaaatattccaaaaaaattataataatttttactttaatcaatctaatttaacactgtttagagcttcagtaggagcaagttttggtgttggcaacactgtttagagctaatcaattttttatttatttttttctgaaaaaaaaaaaggttggcaccattgtgccactgtcagtcaattgttatttcacaaaattctcattctctcacatccacatcactcattattaatagtgagacccccctacatttgacaaacttatgtagcacctcccattgttaatggtcttatgaattacaataaatgccatctttttaaagtgtaggattattgacatccccaccatacaagtcccctatatattatcacttgtaaaagttaagaaaaagattgattgtattttattctaatatggttatatttattcgttgtgatttaacacttcagctgccttgcattatgtggcttgcaatttacaaaccaaagaagttcagcccgtcttggttgataaactgggtaagtaaaaaaacttaaaagccacaaggctctctaattatgatttaactgaaaattaatgtgatataacccaaccaaccatgattttcagatatgcatcacattgggagttcttttaatgattctatcacccattggaggcatggcaaccatcgttaaacaagctaaggactacaagttttactcttaggaaattatgtatgtaccaaagagaataaataaggct

SEQ ID NO: 105827 - DNA, 876 bp, Cannabis sativa
ctatcaaaggccaagccttggccgactttgtggtggaatgcacagaaaaaactgaaagcatcccagaaggcgatcccaagccaacaccacagccgaccagcagtgaaagcaagccgacctgaaagcttcatgtggatggatctgccacagatcagctatccggcgcaggaattgcccttgtcacacctgggggcagcacctgcatgcagcggtcaaattcagattcaaagcctccaacaatgaggccgaatacgaagccctaatcgctggactcaaactggcgaaggaaatgaaagccgagcacatcgagatctgcagtgactcacaactagtagttaaccatgtatctggcgaatacgaggctcggggagaaaaaatgatagcatatctgagcagaatacatgatctgcttgcacagttcaaaagttatagcctcaagtagattccaagagaggaaaatacaactgcagatgcgctagcccgtttggcgagcaacaatataagtgacaaggcgaacctggtcttgatccagtttcttgaagagcctagcatcacaggcgcggaagaaatcaaaatgatcgacacatctctgaactggatgacgccaatagcagcctatctcaactctggggaactcccagataaccgaaataaagctcagaaaatgagaagaaaggtagcacggtacatcatcgtagatgggatcatgtacagaagaggattctcaatgccattactcagatgcgtcacatcaaacgaagctgcacagcttctatataaagttcacgacggattctgtggaaatcatgcagccggacagagcttatcaaagaaaattttaaggcaaggctacgtctggccgacgatgattgaaga

SEQ ID NO: 105828 - DNA, 1059 bp, Cannabis sativa
  modified_base (38)..(43): a, c, t, g, unknown or other
ggagatcgatggacgagagagacgagaagaaagggagnnnnnnagagggaggaagacggcgagagaagagggcgatagtgcggaggcgtaggtggggttttggagagttaagatttttgttttagggtgtgggaaatagagaagaaataggtgggcatgtgggaaatagaaaagaagtatgtgggcacgtgggaaatgtggcgagaagtaggtgacgattttttaatgggcccttatacccgacggtataaaaccgtcgcctatagttcgcctatactataggcgacggtattaaaccgtagggtataaggctctcctaaaaattcgtattttattaaaaaaaaatgtcacctattttatttactacgattttaaactgttgggaatactaaatttttcctgacggttttaaatagttatttaatttttttagcggcggtccccgaaaaaaatcgtttttaagatcgtcacgaattatgatatttgtagtagtgtgcatgtcatcatttttatggttaggtatgaaaggaaaaagactttcaagttgagctctgctgttcatttcgaggataccaagcaatcaaatccacatgagaatgcgggttggtcgtcgtgtcaaatttacttttgaagcttgattgggtaagattggatgatgattttcaaaatgttgagcccttcctgttggatcctccctttagttggacgactgaaattgaatgtggacgttgggctcgatatggttgcgagatggtttgagatgggggcagtcgttcatgatcatgtaggttggtgcctagcttctgctgcattgttggcacaaggtatggtggctcctcttatagcagaagctatgactatccttcatggtctccaactctgtcaacgctcgagatttttttatgttgaggtggagagtgattgtcaaagacttattttggccctgaataaaaaagtggtacttctaggcaagttttgtacggttttacaagacatttatcctattaattaaaaatagtgttagagtcagggttagtactgaaatttagtgagtcatat

SEQ ID NO: 105829 - DNA, 1148 bp, Cannabis sativa
  modified_base (34)..(34): a, c, t, g, unknown or other
aatgggtattacccattaagaagtgtttcatatntatatatatatatacacatttatacatatatataaagtttgatttaaaatatttttttggggaaaaagtactaaaaataactatataaagagcgatagaaatataatgaagaatagaaagtatcacatgagaatgaggaaaaaaaagttacaataggcttttcatcacttttcatgaatttatcattaaaaaatcacttttttacatcaaataattcatactaatgagtaaattatgaataatgtgaagacattgtcgacataaagaaaaaaggtctgtatgtctctaaattatgaagaaatattaaaattgaggtcttgaagcaatttattgatgtaactgtcgaggtgtcatgcatacatcaaaaattaatagttactaaagcaaataaaagaaaaaagagaaaaaaaaataataaatagcattagagatagatggagaatcttcattaaaaaacaaaagaaaaaaagaaaaaagaaaaaagaagaagaagaaatactatgagagagagatgtatataaaacaacctttattaaaaaaaaagaaaaaaataaaaagaaaaaagaagaagaaaaaaaacgtgagatatatagaataatatataaatatatataataatttataggtttagagttcaatgtgttttaaaaattagagaagatttaaagttagatatttaaatttttaattcgtttattaaaataatagtaaaaataatttatagatttatgctataataaaatattaaaaatgaaagaattaaggagagtagagaaaaatagcttcggaataattttagaattaatttatcattcaaaaattacttttttacatcaaataattcatactaatgagtaattcatgaatattgtcaagacatcgatgacggtgaagttgtcgatataaaagaaaaaaagtttgtatgtctccaaattatggaaaaatattgaaaattgaggtcttgatgctatttattgatgttactgtcgacgtgtcatgcatatattaatagttacttaaacttaaagcaaataaaagaaaaaagagaaaaaaagaaataaataggattagagatagatggagaatcttcataaaaaataaaataaaaaataaa

SEQ ID NO: 105830 - DNA, 607 bp, Cannabis sativa
  modified_base (47)..(74): a, c, t, g, unknown or other
tgtttaattttattgttttagacatattcatatttaggatgttaatnnnnnnnnnnnnnnnnnnnnnnnnnnnnctagtaaaatattcccaacaataacatacaacatatttttgacttgtatttaggtgccatacacctatccacaaaggcttattgataagtaagaacattctttactaaggtatgaccactataccacatgtactacgtaccgctattgtacgactgttggtagagtttgtcccgtacctcaagtacccctaagtgttatactacatacacttcgtacctgtctgtactagtgttggtaacaccgtactatactctttaaacatcatacattgtaccaatgaacttagtattgctaccgtactagtgtggtagtgtaagatcataattagcatgcatatattacacatacacatattcatatataaatactttctatgctaaccttacctcgtttttgaattcaagtgtgctagctaacctgaacagaatatcatgtgttggatggatgccctatgtcacatttacggaaatggttaaataacgtgccaaaacctaattcgggaacctaaactcacaactacaagttttgctat

SEQ ID NO: 105831 - DNA, 855 bp, Cannabis sativa
tgttgtggtctttgaacatatgaatgataatgtatgatccccaaagatgagaacaactcagggaattggagctctttagcattatcagatctaattcctataacttgagctccatactgagtttttacaagttgaatgaaagttggtatcacaatttgggcctcaaatttgtttttaatgaggtgaataagtgtacttagagcaatcatcaactatggtgatgaaatatttgaaacctttagtggtttgtgtgtgatagggtccccaaatatctgtgtatcaaatcaaaacaatgtttggagatgttatgatggacacaaaatgtagttttctttacttagcaaaatgacaaatggagcaatgaaaattttgacaaggagagtattggaaccgtaaaattttattgatagaatgattttttacggatgaggcatgaccaagcctataatgccataaggtttcatcactgatttcagaattaacaacagaaaaaattgaagaaacaagttggtcatgaaggtagttaaggttgccaatcttttcacccatcctaatcacttgattcttgataatgtcctgaacaacacatttgtttggcaagaaaagaaatgagtaattagatgagtcagatagggcacatactgagaggagattgaactgaaaattaggaacataaaggacattatgcagcacaatattatgcaatttaacaatttcaacaaacaagactttggcactaacagcatttggcattccaacagaattaattctagaatttttctaaatagaaataaaaaaggagggattagaccaatcatggtgtgtagcacttatgtctataatccagctattttt

SEQ ID NO: 105832 - DNA, 2335 bp, Cannabis sativa
aaaaagggaaacaatttaatctcgaaatggaaacaagtaacacttaaccttatgtgtgaaacggaaacaaatatgataacaaatggaaacaactcacattgaaaatgaaaacaacaaaatagaaacaatttaaactcgaaaaattgaaactatagtttgtgtgaaatggaaacaactagcatttaacctcaaaaaatgaaaacaactcacattgaaaatgtaaacaacaaattggaactaatttaaccttgaaaaatggaaacaatttaatctcgaaatagaaacaagtaacacttaaccttatatatgaaatggaaacaaatatcataaaaaaataaaaacaattcacatttgaaaatgaaaacaataaaatagaaacaatttaaactcgaaaaattgaaactatagtttgtgaaatggaaacaacagcatttcacctcgaaaagtaaaaacgatttagcattgaaatagaaactatagcttgtgaaatggaaatgatttaacctaaaaaagggaaacaatttaatctcgaaatggaaataagtagcacttaaccttatgtgtgaaatggaaacaaatatcataaattaaaaaatggaaacaacattcaaaatgaaaataacaaaatagaaacaatttgaactcgaaaaattgaaattataatttgtgaaatggaaacaactagcatttcacctcgaaaagtagaaacgatttagcatcaaaatagaaactatagcttgtgaaatggaaacaatttaaactaaaaaatagaaacaatttaatctcgaaatggaaacaagtagcactaaaccttacgtgtgaaatggaaacaaatatcgtaaaaaaaatagaaattgaaaatgaaaacaacaaaatagaaacaatttaaactcgaaaaattgaaactatagtttgtgaaatggaaacaactagcatttaacctcaaaaaatagaaacaacaaattgaaactaatttaaccttaaaaaatagaaacaatttaacctaaaaaaatagaaacaagtaacacgtaaccttatgtgtaaaatgtaaacaaatatcataaaaataaaaataactcacattgaaaatgaaagcaataaaatagaaataatttaaactcgaaaaattgaactatagtttgtgaaatggaaacaactagcattttacctcgaaaagtaaaaacgatttagcatcgaaatagaaactatagcttgtgaaataggaacaatttaacctaaaaaagagaaacaatttaatctcgaaatagaaacaagtaccacttaaccttatgtgtgaaatggaaacaaatatcataaaaaatagaaacaactcatattaaaaatgaaaataatttaacctcgaaatggaaacaacccacatagaaaatagaaataacaaaatagaaataatttaacttagaaacgaaaactatagtttacaaaatagaaacaattatcatttaatatatcataaaaaaatggaaacaacttattgaaaattaaaattatttaaactcgaaaaataaaaataatataacctcaacattgtatatgttggtttatgtcgagaagagcgtgtataaactcgcgagttaatttattatttttgttgtacaagtgtcatacattcaaatgtgttatttattgctcaaaaaataggtataacactacctaatagaaacactatcattgaagtagaaaccattatatgtacaataaaaacaacttgtcattaaataaaaatcataaacctacaaaatagaaactagccattcaatagaaaccattatctgtgaaattgaattacttgtgttgaattgcaaaattagattgcaaaattaagttgatttacttgtatattgagttgtaaattaatttcaagtgttgagtttaacaattatattgcaattttaaattaatttatttgtggtgagatccaaaatttatttggattacttatgttgaattgaaaaattaaattgtaaatttgaattgatttacttgtgtttagttgtaatattgttgcaataacaggttgcaaaattaaattttaaatatctataaatttacttattttgcattgcaaaatcaaattataaaattatattggttttcttgttttgatttatttgtgttgagttgcaaaattagattgcaaatttttgttacaaaactctattgatatatatacttaataaaattacaatctcaagaatgttaacaagtcacagctgcttccctatgttggaaattattttacgagtatcttagatctactcacaagtatgttgattaacaccttaaatatgaacttctaaaacgattatgaaattaa

SEQ ID NO: 105833 - DNA, 6184 bp, Cannabis sativa
ctcgaggcatggattacatgtgttaacgggattgtcacgatgttttggtttaaaaatatttctttaaagattatggctaaattacttttgtaaaaattaaagtttaaaatttataaatgaatcaagtgtttttgttttaaaataatgagatctcatgcttagttatttttaattagagaagtcttttattgtctttaacttacatggttttaaacggactagtaagtgtgacgtctcaagaaattggggcgttacactcactgtttgaaagaggccaggagccttgctcacacaatttctccattaaggtcgaacccaaatttggagtagcatgttctgaatcatctaaagagaggtcaatcaaagatctcttatcagcaccagaagtgttagacttctccttaccaaagtcatgagcaggaagagcggcattagcagttctacccttcaacctgaccttcatcttcgaagcagcagaggcagcaggaatgccttgaacgacttcccttcctagaggcttagtctcctttagtgtcaaaatcttcctcttcacgtacgaaaaagatgccatggcacttaaaaagctcatattgtctgcaaaaagtaaagacaagaggttagtacaactaagagaagcaagtcaacaagttaagatcatagcatggagcgtcagtaacctgctgattccccatccttctctggagcagtcctagcagaggtaacttctccttcatccttgtctaagaacacagctattatcactgaatattctgtgtcatttcaaatagaaaacacttcttctgtcaaagtttgagatagaataacaatagcactctaagcatcttcatcactttgctcgagtggcatggtccaagactcgtcaaggaagccaacattagcatacactctgtggcatgacatgatcaacccaacttttcgaagatttttagtactaaagagggctcgactatcattctcacatgcatcaatttcaagcaacatgacattagctctcctcttcatgtcaataatagaggagcaggtcttttgaaagggtgaacttttttgaaggtaatgtatctcaacggaagaacaagagtataaaagtactattggtagtaaagggcacaattactcttggttatgtgttctataaatgggccaaattggtaaaagtggtaaaagcattgatctctacgggttggactcctcttaaagtcacaaagaaagcttatctcatgaggagttggaataggcaagttcttaatgtgataaaaaaatgaagaaggtggctagaatcctatagccatttgggtttatctagtaagggcatacacagaagaagtcatcaattgatataaaccatggatgcacgggcaagtaagcacccacattcatgtggaatcttgactaggcactacaacaagtattctgggaacccttaggagcaccatgttgaggcttttgaatgatagtttcaggaagacaataatcatcccaagttgtttgagcttgaagctcggtaaggatactagacacaagaggcctaagcttaaaggtttgatctcttggatcatcactctcaatggcagctttaagaagctcagttgccatcacttttccaccacgtgccttgtctatgttcgtagacttaggcaatgtcagattaactctgatgaattgagtaacatggggaacatattcatcaagtaaccttctacttctcttcatactagccatctcaagctcaataatttaagcttcttacaactcaaggaaagtcaaacttggttgaaaaaagtcaaagtagcttggaagactttttcaaggcacaagtagagtgttttggatttttggaaggcttggaaaaattatttcaagggtttttggaagtttaggagcccttgggataagattaataaagaaatagaagaagaagaaaaaaaaaatcagcgtcaagagggaaagaaaacaaattgtttttctcaaagaactgtgggcatgtggaatagaatgaaaagtgtgaaaaattgatataatcaatataagtagttcgccctccaattattacatatcagtccactcatgcataatctaatatatatatagtacctttactacatgtccatctacatatgtgatctaaatcaaaatcacaaacactagaagtatagtgtatagtaaatcgtacttaacagtctcatattaaagattctcaatactttcatacactaccgacttattttattcatatcgtataatcttaattctcttttacatccttacaagattatatcttttccatatgaataagaaatttttagatatttaataattatactcttataattaatatatcatttatcttataaatgtatttcatatattctctaatatattatccattaattacttccttttagggcataaactccaataaaaagggcttccaggagtaggaggatcttatttccaagggcgaagctcctggaagtataaagggctggggcccgcctctggtttggactcggccttcgcatgctggaaggctcaggctgctgatgatacggatcagttacatccttaatatgccacgtgtcatccatataaaaacgtggataacaattgagatcttagaaaaacagtcatccattttgaatgtaggttgaaaatcgttcgcacatacttatagataaatgaaacatgggcaatgttcacgtttcattaacccttttaactagaggaggaataatgtaattggggggaggcaaaaaattgttcataagatattcaatattccaagaaataataaagactcgtgaagtatgtagaattaaactacaaaaccacaataaaaactccatgttcatcatttatgattcagtattgcatatattatttatattaattttgatattcaaagcattaattatctaagcctcattttatgttagaaattttttgagttaacaacaactatagcaaaactttcttcaaactctcaatgacaacaataaaatatttatcaaaatttttagaaatcgattaagaaataaattaatcttaaagaagaataaattaaagacaatgcaacaaggatttttacgtggttgagatgttaataagccttagtccatgagtcaatattattgaatctctttggctatgaagtattttacacaagtatttttgccaaatttttgcatagttttcttgtctaacgtttgtaaccctttgcatgaaggaataaaatcctatttatagggtaagaccgggttttggatcaaacccaaacctgatagggtttcgacacctagaaagaagcctactaatgaggtaaaatacaatttaatattggcttttaagcctggtactaaggagtggacgttggacaaaaagtaaattactttttatgttgtgtgtattccctaggcctgttatggggacaaggccctaattttgtaggacttcgtgtcaaaggcatggcacatcagacaaatcctacaaagtcactttttgtgaggtaagcttccaccacatcttgagaactaccattctgggataaccttggggtacccatttgtgtcttatcagacacgtgttaatatggttgaatttgctctccaggtccgtgtggtttgggtttactcttgggtcagtcttgaccaaattcggaccatctattattgggcaagattgctacttatttgggtcatgagaattgacttgcaaatagtcttagggatactgagcgtacacatgttgcttgtctagaaacgcggataacagtaacaaacaagtcaaaaaaactctaatgacataattagcttaaagcttaatcatgttaggatttagatcaaattgatctatgataaactaagtgatgttgaataagaatagatataacaataagattatgatatctgttcttctatcaacatcgatctagtctgatataaacatagatatatcttattcaagtctattttaccaatgtcttagaaaatacatgccacttttccttagtgtaaatagactgcatcgttgattatcacgtaaatataaatcctgtgtactgataaatctcagaactaaaatattcgattcatataatcacaattattttccactgtgatgacatcacaatgattatgcatatatattttttttgaatttaatagaatttaaatgttagacttataatcatgtaaaacaaaacgtgtgaaccaagcaattgacaacatcataaaatattttctattttctttattgaattaataaaatgagattacatagaatagttttatttagggtataaaatccaacatagagaacattctataagatcttggtgtgagtactcatcaaaaagcaaggataggaagatcattgttgttttcaaaaatattgaaggatacattgataggcttcaagaagtaagttatctaatccttgatatttaatatacgtgtgcatgtagaatatataagatgtatatatatttgagtgtatgagtatgtgttgacgctaaaaattggccaacactgtctctctagattggcaagaaaagtaatagatgaaagacatcaaataagagagacaccacaatttatagtagttcacttttcatgtcgcgatagtaatagagctacatctactttgagtttttattgctcgtaagaattacaagagaattagctaaggagagatctcatattctagagagagactagagagagatgctctgaccttatggagacttaacataatgcgaaaaatgagctaacgaaacgctccttttataggcgaggaggtccgttaaaatattaataaaataatacaaaaaatatgaacaaatcatcatgtgctaaacttgacctttaatgatgatgtaatggttaaaatgactttgtatgataatcgttaatttttagagctcgaatcgcgtttgttggatgatttttaggctttttgcgaaaaaaattacacttcgacttggggatgattttttgacttaaaatcttgagaattgagatatgattgtgaaacatgcataaaaagagcttgaaaagagctttccaagaacttggaatcatgtcaatcatagtagtattgagtaagttatagttgttttattgatagtagttcaacacccagtgctcaggttgacatccagcgtccaagtgtacattctgacatcaacttggacgctatatgagtgggaaatcatgaaggaactttatttgtgatgctttagtgatattttgacatcacttagccaatttcttaggtttggtgaagtcattcaccaatttttagagttttgtatctttgcggaatcgaaatactcgaaactacccaatttgtaactattttgttgatgtttcactctgttgaaaaaggtgaaatatcaaagtgtaaatttaacttgtcacaagtcgtacctcttgtttactatagattataatcaaatgcttaagatggaactggaatcagataagcagatcccaacgcaccaggtcatatgtcaacctgggcgttgggtgctcattgttgagcttctcaagactcattttggtacttctatggtattagaaattacgaatgaggtctctcttcctattttggaccaagataagaagaattcctggagtagaattttcatttgagcagcagaaccaagcaaattaggttggacgtcaacctgagcacagtgacaaacgccagtttcaacctgtcattgggtcccaaatgcttttgtttacttcccgagaacacttgcatctttgttattgacaaaaaaggagaaaatgcctgagagacttcctgagaagaatgcttagaactgacccaagttatgtcaacctggctattaggtcatctttttggccacaaagtggctccatttgtttctcgaaagcacgcatatcttaattttttatgaatggggagaatatgctcaaaagactttgtcagaattgtcattggaaatggcaaggttgagaaaatgtcaacctgggagctggtgactaggcccagtgttaacctgggtgctaggtcagtcttctagtgtaaagaccgcttagctataatttggaaattagcagataattaggatttaattatggaaattatttattaattttgaattattaatttatgataatttatttgaattcagaat

SEQ ID NO: 105834 - DNA, 1211 bp, Cannabis sativa
taaatttaatttttaaaagacaatatttttattagcacaataacttaactgggtccgtccctgcgtacacgagcctctaattgagaagataattaacattacgatagttatttgattgtcgttgcatgctttgacactttaattaataagaataaatatatattatatcaattattaagattatctctaaatatatagtgtaaaatttgtgttaatttggctcttttataggtttgaattaattgagttgtctcattccctgaaacaaagaagaaaaaaatgtacgttcttctatgtatatatatatgctaatttaatgcaaaatttccttcttacccttcctgcacaatcacatgtcaatatatactcatcaatatgtcattaatttgattttattaattggtaagtggaaaactaaaataaaataattagtgggaccagtcgtgtaacacgcacaaatatatattcgattattattggtccttatatatacgagaaaggtgagtttcatgaactaaacgtaatggctttattaaaaactgatttcatatatacatatattatccatgcatatatgattgtatagttactaactaggtaggaaatatggcacattttttgagaacgaaaaaaacaaatcctaaggaaatcatttttctactctcttttgcactcctatcattccatcaaatgtagattttttttttatattatttaattatttttgtgatgcacattaatatgcacagtgcacactttttatatataatatatttttttattcaccaaaaaaaaaaatgataagaacttttcaaaatagtatataagattggatacttatatcattacaataaaatgatatcgattataaatagttagtattgaacatatgcgatagcaaaagagacgaataaataagtgatcactgttctaaataatcacgccacttaagtcattaataataaactgacctatctaaagcttgaaacacttacatattactgacaaaatttacttttttaaccaacaattttttttttttaaggtaatttacttaatttgttgatatttcataaaaaaaataaattaatgcacatatggcgctatgtaattgatggtgatgtagcaatgacgtatcacattgagccatatggcataactaaaattttatattacaacattattgtatattaaatagttgaagtgaaatt

SEQ ID NO: 105835 - DNA, 1014 bp, Cannabis sativa
ggttcatgataataagagtctcatggtgtcttttaggtcacttgatttctgcattcgatatcatgaagcttagatgaattaaacacccgactgttcagatgcaaccagttgctattcaacagagccgtcgtatacccaagaccggctcaaacagtgggcagattgggccattacacaaggtccccattttgtacctccctttttttttttttttttcatttttgaaacaaaaggcctattttttattattattttattataaccgtatctttaaaaaaagcgtaatggaattgtagatgatttttttggggattatttaaaaaaacacaaaaactaccaaaaaaaattacaaaaatatcattgtacgtaattttaaatatttttacagtttttaaaattttatttacataaaatactctcttgatgtatcttttatattgtactcttattattttgttgataattttttgttattttatattattttttatgttgtttggtcgttatttttttgtgattttcttgttattttcttgtatttatagaatacagtaaaaatgtaaaataaaaaagttaaaagtgtaaaaaaaattacaaaaatatcaattgtatgtaatttgttttaaacttttgtacaaggtctccaaaatatcaactccggggaaatgtttttgtatgtggatgctagcgtgtgtgcagatttaattagtaataatttacatggtatgttttatgctccatgcatggttgttcctcataaagctcatccctctccacttctggcagaagccattgctcttatccaaaggtctattactctctagtgacttgggtacaataaggtttatgccctctctaattgcctcaaattttgtcaagcaatccgaaatcataattgacactacaaaaaatgtcacttttgccagtgtgacagtcagcaatcccgtgatccgtaagggaaaataccgagtaagctgtgcaatcccacaccgcctggggaaggtcaagtgggat

SEQ ID NO: 105836 - DNA, 3737 bp, Cannabis sativa
  modified_base (108)..(115): a, c, t, g, unknown or other
  modified_base (153)..(159): a, c, t, g, unknown or other
acgtatgtcaagggcggtctaacagaggtcccatatttgaatctccatatcaataaaaaattgtatgggttttttcatttttatactttaaaattgtttttttttttnnnnnnnnttttacgaaattctatataaaaactcttattgcaactnnnnnnncaacttaaattgcaacaaaaaattgtatagaaacccctacaactagtgctgcaactattttagaaacacaaaccgtaaattaaaaaaaaaaaagttaaaaaaatagtatatataagataattctccaaaattgtattaatagaggacaaaaacggagcagaaatttatgtattaatgtactttaattcaccgctaataattaattatttgttaatatatagagcgccacatatgaaatgcttgtagcacgttgacgtggcatcggagaaaaactacaatagcagtttagtcaaacatgaatagaaataaaatttatagtcagaaggaaagaatgaaagaaattaaagaacaggctacgatgaatagagccctcaagattcagaattgaattttttatctttcaccccagaatgagctcaatatataattaatatatatatacttctcaaaataaaaaaaaaataaaaaagcaaaaaataatatacaatgcacccgagcacgacacgtgccatgattggaaaaggggtccctcaactactactccaaattccaatggattcatttaagaacaggatggaagatatgcacttcacacagttctcattttgtcctaatattacacatgcatttcgtcgtttactagtaataacaacaacactgatactgatactatactcaaattcaaaatcactcaaccagtgtccatacaaatacatacgtacttctttctctgtgtcctgtttggtgataaatataaacttattgtaccttcaacttcaacagctatctatatataataaatagatatatatatcaacaaaaaaaaaaagaaaaaacagagatttgaggttattatttcgaaatagttgaatttatcaattacaactgtgtaatcacaaccgaaaccgatgcaatagatcgttccttgaacaaaatctaatactggctagtctgggatgtctgtttcggctaatcaaaatgtgacacgtatactctcagtgactgctggtaaatagttgttattttgtaattgagatgatcagagtcatggggatcgattcggtatcattgggaaagatatttatatatataaatcgaggagtgagttgacgtagtacgtactactactactactatactgcaaatataactgtgtgtgtttattaaaatgtacgaacaataattcttgtctttgtcgatcgctatagtgtatagtaggcgtagcggtagtactactgattatctttaaatttcaaaatataatattatctcctatatttgaattgaatggtatattattaattacatgacatatatatgtattttatatgtaactaagtccgtccgtgcatgatatctttcaatttaaatctctattcggtagtgtatcgtactttttccctagttcgaaaataaaatataggatatactaaaattatttatttaagaaaaaaaaatgaagatgataggatgtgtggtgtgtggagtataatattataggtagtagaagtttgtaatattgcgaaagctgtcaaaacagagccgcgccgtacgccgcttgtctggactgtgatgaccgtgcgggagacggtggagtagttaagtcagaataaagataattaatttagttttattttgtctattaacgtaagatattatatatactgacttcaattatatcagatattacatttaatatcactcttaaattaatgctttcataattttatgtattaattagtatactttttaatcgaagtattaattggtaaattttaggtgattttgttgttttctgattgagggattggatctatagctagctagctcttcagctccaatttaaaaaaaaaaaaaaaaaattcttattacttattagttaagctattattcatttatattaaaaaatcaaacaaagtaagaatatttcaattcataattaatttgctaaaaaaatacatgttttactcgtcttacaattatttttctctattaaaataaaaaaataaatacaaagttacattttaaacacaaaacataaataaatccttatggtaattcaagatacctttggtttttaaatttaaacgttactttcaaatatatacaacgcaaaaacaccttattttattcaacttctccgatgacgataagaaacttatgcactttgtaaacatcaaaatgaccacacaattaatagtagatccagttggtactacttttgagtccaggatgatcaataagtcaaacaaaagaagaagaagagaataaaatgtggtggtagaagaaagagaaatgaatctttttgttgattagcagaaaaagattaattaatatcttttttattaattaatatctttatagcagaaaaagaaaaaagaaagaaaatgataaattaagtgagcacgtcaaaattgtttataagacgttcagaatggtcccagatgtaaaaatttctaaaaagttatacaactaaaatgcggaaaagatgtcgcataattctaaatttaattaaacctatatagaaaagagaaagccatatatttaaaaatagttagaaaaaaaataaaatcctatcgaaattagaaacagtatcagctttaacatttgcataacccccaagaatttcaatttcatgttgctaagattctactctagatgggttagtcattgttggattttatgtctcctttatagagagtaatattgaagttgttgttaattatcttcttgtctctaagtggggctatttttttttggtacattgaaaaatacttttttatttgtcaattaactaaatttactcttattttatatttaattgaaaatagctctttttataagtattatacccaaaatatcctgacataaggaagtcacacacatagagagtatgttgaagtgagaaggacaaaattggtaaaatatttaaaaaagaggtaaaaatgatagaatttaaaaaagaaggtaaaaataaaagaggacaatataaaaaatgtatagagtctaatttccccctatttttttgatctaataagtttctcttttcgggtgtatatcttctacatataattaggaccggctctgagcataagcgggctaagcctatgtttagggcccacctaacttatgggcctaaaaaaaattgtcctcttttaaaattacacttttttatattaattttaaaaaaatgttatgtttttcttaaataagtgcccagaaatattttttccaatatacactaaattttagaatcgaccctgcatataatgtaaaatagtaatatggctgcacttagattggcaagatatgcactctagatgaaaaatattggaagaaattatttgaccctccaaaaaaaattaattattatattaaaaaaaatgtaatttaactgttaaaaaaaacttggttggtttttttaataaaggcccaaatcgctaggattcatttcactattgttggattttacattggaatttttacactacatattaaaatttgggaaatttgattttctatacttaaaaatgttcaattttttttttttgaaccaatacattttacactatgaaaaa

SEQ ID NO: 105837 - DNA, 630 bp, Cannabis sativa
ttcttacataaacggtgaaagccaaaccctttttcctttgagctttgcctaagcaacctggtgagataatccataatcagaacaaacaacaatggggacatcggatctccttggcgaaggccttttttccctttgaaactaccttgaattctctcgttgagacgaggatgatagtttgttcccttcaggcaagtcatgatccaactaatgaaccaagaaggaaaacagagcaccctgagaaggtcctccacaaactcccagtcaaccatgtcataagccttgcttaggtctattttcatgatgcatctggctgagatgttcttcctagtgtaccccttcaacaaatcctaaaaaatcatgatgttgtgagccaaggatctatgtttgatgaacgctccttaattactatccacaatatcaggaagcacttctgatagtctggcgcagatcatctttgagatgcatttatagaccgtattacaacaagcaataggtctgtaatccttagcagaggaaggattaatcactttcggaatcaaagaaatcactgtctcatttaggtcctttgggagccgaccactagtaaaaaaatccaacaccgcactagaaacatcatcaccaatgttattc

SEQ ID NO: 105838 - DNA, 2035 bp, Cannabis sativa
tagggattgagctgatgactcatgttgcgaaagctgaatttggtaagtgttgattgctctgcacggatcgctaaatatcttactctggacatgtcagtgaggcatcctactcgccctatcttcccgagcagatgttccaagtggactccacgtgtcaccattcttgtgatgccacattagagtgcaaaatttgggataacagaaagcatagcagacaataactgctcgcgcacatagtagattactaattactttaataatatcaaaggaaaataagagcgatggaaatgcttcaagagttttaattttgattaaagtataattgtttaatttgtgaataaaaaactcaagtaaacaaatgtattatgttcgaatgcaaaagtacaaggcattacataaaagataaaataaaagcaaggttagccatccaactttgcaaatttgtcttaaaaaagagccacaaagggcaaaccactgtctcggtcgtatggccattttccaaaaaaaagttaaaattaaataattaaaaaccaagcctacatagtaggagagtcggatggttcttcttttactacttctcccgatatctcgacttcctcttctacctttctagcttgctcgcagtaagcaaggaattcgtcttggcccttcccaagaaactcaaatccatttctggattcgccatccaggctcgatagagcgtttggcaatggcattgcatcgctccttggtgtcagcctctttcccctcgagcgttgcattgcctgcattgagttcttcttggagtttatggcatagctcggacttgtccttcgcctccttctgagcagcttcgagttcaacttttttggccctcttcacctcctcgacttcgttgtttaagtgagagatctctgactgtggcgcgttccattccctagacacgacctcacactgaccaatcaccttctggatctcgtcctccagttgtttcatccagtctagaccccagcgttgggtggcaaaggaaatgaaggtttgctgaaaacaaatgaacaaaaatgcataagtatttttgggggttgttagaaggaaaagcaaaacgaaaaggataaagaattactgagatgccaaaagcgacgcctctctcgagcatctcgtttaggttgctgttagtgatcaagtcccaattgtttggaaggaaggatcggatgtgacgccaacaagccgcagcatactgcgcagaatgcttagagctagcattcccggcctcgatgggcagagtctcaggcgcttggctcgaagaggcaacaacttgatttgctttgggaatgggctcttcagtatgtgtgagggccgaaaggtgattctgaacctggttcttaaaggccttgaggtcaatggtcagggaggctcgctgcttgttggcagttgtcttcctaggcctttggaggggctccacgttgacatctgagaaattttccgaggcagtcaaccttttcattcccttcttgcttgaagaatgtagaaggtcctcggaatccatctatgcgagacaaaacaatgtgttaacatttgtttaaaaacaagtaaaaggggaaattaggaagttatttcccaccaaagggatttaccataatcataagaagacaaggaaagaggactatagtattcactaaaatctctatatcctgtgatcctgaacatgtcataggaattaattggttctaaatcccagctcgaaaatatatgacctgacctatcaagcatggtcccatactactcgggtatcccatagtagtagttagtacagctaatttgaacgtggaattctggttaccaactatcaaacctatgtgcaatgcgatctatgaggaaggaattccaggtgtagaaattatactagctatctcgaaaagagactaatgtggcacgttcagccctaagcactacgggtgtgttgggttctatgccctaaataaaactcatttcaatataatccgatttacttattaataaagatcagaaataatattttatggtgcatggttcacat

SEQ ID NO: 105839 - DNA, 845 bp, Cannabis sativa
  modified_base (402)..(404): a, c, t, g, unknown or other
acttattccaacatattttaactaaagtgaacacaatcaaacaccagcaacaagaacagcagccaaaatcccaaaaacatgcataagtcatttcttcaaaaacaagaaactaatgagggagctacaagagactttaccttggcttagattacacttagagctgctagagatcaccaagaattgttgaagaacacccaaaccctagctggttctagggatttcgagagagagaaagagagagttgagagagagcttcctttccaaacattttttcttatttctaaaataatgaataaaagggttttatcaaagataatatcatcataacataacttagaaaattgatttaattacttatctaaagtaacaaaatgacaaaaggctaatggggcaaaatgaccnnnttgcccctcccacactaaaagtccaaaaagggcactaaggggtatattgggaattctaaaatgacgactattcttgacattcccaatgtctaactatatcaccgcactatactaaaatactaagatgtgattctagtagccaaacaccgcgttccaatgttaccgggcactgaacatgaagaattatgaaatttctatatacgacatataaaatgcattctaaattcaaataaaacatcttaaattaataatttagatttaacaaataatttatgtaattaaaccctaattatctgctaattttcaaatttaagctaagcgatctttacaccacgtacagggtctaaatggataattttcattggcgcaatgacctctagcttccaatgcgcactagaaaattatattggaatataagtaagattgtataaaaatattttg

SEQ ID NO: 105840 - DNA, 1032 bp, Cannabis sativa
aaattaaaatttataattagaattatctaaattggtaattttatttaaatatatatatattaaaataaatagattaaaataaatattagatgaaaatacactataaaataatgagctttattatcaggatattcgatctccattgttagttctacatagttcttattttagtgagattaatccctaatggatgagcgttcattagcaatttaacgtcgtagaatctcgaaaaataagtattaatgtaagtgttttattcttagtaacgtccaccccaatagtggttgctaagagtaggacttacaaattatgaaacaatggggaagctcataagataaaatggccttgactctcacctaaacgggacaacgtcggattctcatcttgatcgaataaaaagttgctacaaaggtttccattttagatgagctgactattctattcaatgaatgatatctttgactctcgcctaaacaagacactgtatcagtttattggaaatcttggaaattatttaggattgtttgtttttgtattttcacttgtcattcctacgtgctaagtgcttgataatttctgaatgtgtatgattttgtattgaaccttacttgatttctatttattaatatttgcagtacccaatatgactatgaacaatctcattgtgtcactgttgattgataacaagctctctagagctaactttgtcaaatggaaagagaacattaatattgctctcataggtgaaaatgtcctgtttgtgttaactgaagaagctcctgagcacccaggtgatgcgaccaaggcagttaaggaaaagttcgagcattggcagaatgctaacaacaaagctcaacactttatgctctatagcatggtcgacaccttgaagacagggtttgccaatactctcacggctgtagaaatcatgaaccatatgtgtaacaccttactagtttaggcatgttaacgtgatttttaactaactgtgcaactcgttgctaatcaacgagtttattgaaaatcgtgatt

SEQ ID NO: 105841 - DNA, 662 bp, Cannabis sativa
  modified_base (571)..(573): a, c, t, g, unknown or other
aaatagaataatatataatcaatatcaaaaacaacattaatactcacattttactttaaatttacatgaagaaaaagttgaaaaatatgataaaattatatatgtaagggttacaaagtaattttatatgataaccaaaaggataaccaattactataagggataaccaagtaccttatggtgttttttttatatttttttttaactcttttgtaaaattttcccatcaaattaataacatttatgagaaaaagttatatttttgcaaacttatcttttaaaaaccatgaaaaatgaaattcttcaaaaaaaaaaatggtaattttaaaaaattttgtgaaaaaaatacccaataatacttacatattactttaaatttagggataattacataaggcatcattttttcaaaaaaaaattacatttttatgtttaattttttttttttttatattcttacagttttccataaaaacaatacgaaaacaacaagaaaactacataaaagaaaataaaaaaaatacatcaaaataacatcaaaactacaagaaaaaataacatacagataacnnnaaatcaacaacaaattaacaagagtacaacataaaaaaaccatatttttttgcaaataaaattaaaaacatcgtaaaaatatttaaaat

SEQ ID NO: 105842 - DNA, 961 bp, Cannabis sativa
gtaaaataatttccaacaagattatcatagtaatttgtatttttttgtaatgtttagagttgtgtgttttgttttgtttgtaccaattattaatgcttttgtcattttccttttttttaaaacctcaattttttttctttttttttttcaattttttttctctattttcgcttttaaaatatttttttaagtcttattttacattttttatcatttttttctccggtttcttttttcaaaatttgtacttcttcttcttcttctttttttttttattttttcttatttatttattgttatacccgaaattcggttacgcttcaaaggatgacacgtgtcagatagtagaatatgaatcacctaatataatgaagttatatcatttaatgcgaaggaaaagaataactcgttatataaggaattaatagaaaatatttataactcgctgactatgtagtcttaagaaagacaaggatagaaaactattataacctatatcgacgagacatataccagtctcaaagcacacatacccaaagaaataattcatttattcaaaggaataaaacgtagttacccaaggcgacctcaggttacatataacgagacatccacctcgctattcataagaaactggactaggcggatcatttgttaacactttagcgtattttctacattataatagctaaggataataacttggaaataggcaagagatgattgtccaaatcaacattaatcatcgacgagttaagcgagatgctattgtccaaatcagcattgaccatctttaaggataagaataatatgcagttaagcgattatctagtattataacacatttataaatgaaaaacgtgatcaattctcacgtttcattaaatgattataattgaatttaaatataaataacttccaacctatattcttataaataggggcaaatcccacaaaaaaa

SEQ ID NO: 105843 - DNA, 1605 bp, Cannabis sativa
  modified_base (70)..(72): a, c, t, g, unknown or other
  modified_base (146)..(152): a, c, t, g, unknown or other
tacaatgtagtttacttgcacatttgattagtgatatgtccttttcagggtattggttaaagtaagcttnnnttggatgtatggagtatgcatcagaagggatcgatattgaacttggataagatataataaatttaccgtaatannnnnnnaattcaatatcacctagttaatcttagatcaaatgatctcaatccagagatggttaggttatagttcagttgtattatttatgttatttaatctgttcgtaaaagtcgtgtcttatgtaattatttcaagtttcaattgttaaatcaaatatgcaatcatcataattatatttatttttaattatttgaccactatggaatagttgtgattaatttagaaattgaaagaaataaataaataacttgtaacctaatactctatgtccttataaatcttaattaaaattaaattactaataactattaattaattttttttgaacatgttactaaattacaatcttttagcaattaattattcaaaaattaattttagaaaagatagaaattttatttttataaaataatagaattttattataaatattataattaaatgacttaattattaatatatttataataaagacttaaatataaacataaaattatttaaagttattattaaatagagtcttattaaatatttaaataaaaagtcaattattttaaaaaatatatatttaattaattataattttaaaaaaataattattgagtattcgggtgaaatatctatggagagagaagatatagatatattgtcattttcattatcctttaagctcatatttttattatttttgtttctattatcaaatattaaagctagaaagctacaaacataatctatttattccacttaatacgagcttaaatttagtacgacatacaattgttgttgttatatacctaacctcttctcagtttttcactcttatacaacctagttgtgcttatgtattttaagtataaatgtaaggctgaaaacttgtgatgcctccagcaactatatacaagataaacacagatgtactaataactctatatataaaattacaataagatttgagatgaattaacctactttaacaaatcagaaacattcttcctggaactgacaataattggagaagcagaaagtcctttacgcttgtctgagtgctgtgccatgtcaagtttctcatcttcaccagatttagaagaagaagaagaaaaagaccctaatatttgcacggataagcttccacctagacaacaataagaacaaaattaaacaccataacataatatgacataattcagattttgccttaacacttattcgacatgttgggaatataaattaagaattcaagagctagattaggtctcatttttaccagtactgaaaaaagctagtaagagtaagagacactgaaaattactaacccatcagaaggaacgaaattttcactcaaatatttcaattttcactatcatgattaggcataagaaatacagtaaaaatataatgaccatgtaaagtctgtgtctagataagcgtacggcagatttggaattttaacaacaa

SEQ ID NO: 105844 - DNA, 775 bp, Cannabis sativa
taccctaagaatagatagtagactattttagatagaaggaatctcctcactttacctctcggtgttcttttctctaacctagaatggttactcttacaaaaaatgtaaaaattactaataaaatgatttattatgattgttaacccagaaactttctttggtgacgtgggcatcaatgtttgacatgtggcaagaaagataacgtcacagagttgagtagacccagtcatagtagtcgacctaggaggggaccctagccctccacccaggttgacttcgagagcttcgagatggaagttcagaattcaataacttgaatccaacttactatctttcagtattctataccatgaagacatggagcaataatatccaagccccaaggataaaattacatgaacgaacctgtaccccgaaagccaacctagacacctagggtttcacccagcgcccaggttgacattcccaactaggatttcaatttctggggctgtcttagtggaaatgggtcaagctttgtattggaccatcaactagacatactatagacatatttgaggcataaaaattaaattcggagcaagttcatttatgagcacccggtgcctaggcacctagtgcccaggtcagcaaattgttaatctgagcaccatccaagtatcagattgacaatcatacttttgcaacttctttgtcttcatcaaaaatggagaaacaggtacttttagggaagaaacaacacttcctggatgccagaagcaaggcccagctccca

SEQ ID NO: 105845 - DNA, 609 bp, Cannabis sativa
tcattgtagatgattttcgtcttactgatgctgagagatgtaatcgtcttttgaagaattttaagtttcaacccgtgtatcttcctaagagtgtggatgatgaaaaggtaagaaaccaggttttaaacatttttttcttacaaattgttttgctaatatttcatattcttcttttttaatattttttgtgtcttttgtaggattttgaggagaagtttgagaatatttgcaaaagtttatcatttattaaagattctcaagtatgcatttgtaatgagatggcaatctttagagatgagttttctagggatttggctaagttgagtgggatgattgaaaagatgaactctaaaaaccatgaaaagatggacacagcctatttgtttggtgcttctgatagagaggtaaatcgtttattattgtttatattaacgaaattattagtttcttttaattttcatatgtaattattctttattataattgattatcacattgaagttgggtttttttaaaaaaaaagttgttactattttctaattaatttttctttttgtattgtattttttctttatgtttttttaagaaatttttcttttttaaaaaaaa

SEQ ID NO: 105846 - DNA, 733 bp, Cannabis sativa
aacctatgtttaaagaactcgagtgcactaagactagaattgagaaaataacatgtcttattgatacttaatgttttacaaagtgatagtctaaactagaaagccaattggctatttatacacataggaaacaagtatgacactaactaacataactgtcaaaacagttatgacagttagtgtcctagatatagggaagagtattagtaggcacactcaagttaacaatactactacaaaaatggattttcttgacgtttttaaacagtcgtttaaagtattcctgtcggtttctataaccgtcgcctatacgaccatcgtaaaacagacagaataggcgatggttcaaaaccgtcgctaatgtgtgtttctcgacggtttaaaattgtcgcctataaatgggtataggcgacggtttaaacggtcgcctatagtatatatagggcactgtttaaaactgtcgcctgtactgttataggcgatggttttaaaccatcaggaatgtaaaagaaagaaaaaagaaatacagatttttctgcaattaatggcagaaaaatttagctagttattttgtcaactagacactcataatcaataggagaaattctttttgattcgattttcaagccaaggtacttaaaagggagagaacttctttggaaaccaaagatgctcacaattctatcaaaagttagtggatccataccagccccataaactgttgatttgctca

SEQ ID NO: 105847 - DNA, 595 bp, Cannabis sativa
  modified_base (179)..(187): a, c, t, g, unknown or other
atctgtattcgaaaggttgggaacgactcatgatctcagaaacgatctgaatagaaggagaggagtaaacgatcagtttggcacgctgatcgtgcagctcagaacccgtgctcaaattctcgctcagaaagaggctgacgtgactcaaatcggccaaaataccgaacaggttagtccannnnnnnnngcacaactggacgaactaaagaatatgtcccaaggcatgcccggacagagaaacaatgatcttgagttggaccgagcacgtggaaccccatgctctcccgagatcaatctcttggcgttaccccgcaagtttaaaatgccaacctggaagatgtacactacaagagaagatcctctttcccaactcaagtattttgagacgcaaatggatctccaggggtacgaggtgacgtatgttgcagaatttttcctagtaccctctcggaagtcgcccagcaatggtatttcaagctggcccttgcaaagttcaactcatggaaagctttcttctcagaattccatgcataattctccttctctaggcaacttccattgcatttaggagacctggtcgaagtcaagcaaagac

SEQ ID NO: 105848 - DNA, 628 bp, Cannabis sativa
  modified_base (602)..(602): a, c, t, g, unknown or other
gtttaatatagcaaatataacataaccaaacaactaattcatcacaatttatcaatttgctcaaaatcacactttaaagtgaagaaaactcaactttggcttcaacaaattaaatccaattcaagcagccatagagaccacttaaaaccattcccaacatgctcaaaaacctaccctaaacacaccccaaacctaatttaagtcctacagcaacaaagaagtaaaaccctacttcaaaactaactcaaaaactagtgttctcaatccaaaaagtaggaaacctacctcaattcacctctaggctgacttgggattgaaattctgcttgaaaaggaaggcttgctgaagaaaaatccccaagggtgggctggctttggcttgctcgaagaggaagaagagaagagaaccttctttttggtttcttgccttgtaaggtatctccttaaatagggtttttttttctttctttcttatttttttgttttaaagaaaataataatagacagccctaaaaagtcaaaagggcaaaaatcccataatactaaaagactaatctacccctccaacaaattttgaaaataacctaggggcattttggtaantttactaatccattaaaccgacattc

SEQ ID NO: 105849 - DNA, 538 bp, Cannabis sativa
ccttgttcattattttctctattttgattaatctatgttgtgttttttatttgctcaattagtcttaagtttctaaatttgtgtttttgtttagtttttgatatagatctagaaaattttgtatattatttttttttcattttgtcatgtaatttgtttgtttaacttattccacatttgatttacacttaataattttatttaattttaccaatctgaaatgcatagattaacttgtaaaaatttaaatgaaagtttttctgattttttttggtaccacactaagaatgaatcataagttgtttggaaaattggactggtatttcacctttcagtatcaaaacaaaaaaaaaaaaaattaatccaattccttgaatattattatttaaatttataattattaatttgattgaatatattttttaaaaaaataaataagaaaatagatacagtgacacactttgtctgtagctgttttaggtgggactgtaaaagggtatggtgacacactttgagaaactctaaaaagtattagtga

SEQ ID NO: 105850 - DNA, 508 bp, Cannabis sativa
attttttatgacttttggaaggctaaccctcaggcaaattttgattacctaggcaatgccaaagacatgtatctcgagtaatgtgcttcctgggtggcctatggagagtctgaggcaaccacttttacttccagtctgaacgttgacatgcccctacccagacaacagatcctccagctgataccagcccagaagacccgtacaaggagactgggactccacccgtctaaacacttctctttttatccttctttttttttatatctgtctagccataaggccttttttttagacaatgagaccggccaagcggtctttgaacttggaattatttttcatttttcagacaacaggttgaccaggcaacttttaatcccagttttacgtgcttttgttatctttaatgaatttaattctctatttataatcatagtgcaactgtgtttgttttatctttaccaaatgctttgtactggtataggttccctccaagtgaccgagcagactt

SEQ ID NO: 105851 - DNA, 539 bp, Cannabis sativa
aacctatcatcgggccctatatcaagcctatatcggtcctgcatcgggtccggcaaaaaatcacaaattctcccccaaaatacagatctgagcctaaaaacctaaaaaatcgcataatctaattgttttaaccctatatcatgaaaaaataaaacgattacagttaaaaattcatgaaaaaattagggataacctttgacgaaaacaatgtcagcattgggtggtgtggtcgtggtgctccgtgggtcatgtacgtggtgtggtcgcgaggtcgagattgtccgtgagttgtgggtcgtgtgggtggtacaattgtgtgttcctccatgtgcgtgtttacatagagcaggagagagaagggggaaagagagagagagggttgttcaaatgagagagtagaatgaagttttttttttaaaaaataacctattctttcgataatgaataccttgtttagaaaaataattttgacccaataaatacataattaatcaaatatcccaatccatcctcttaaaaaagaaaataaaaaagtggga

SEQ ID NO: 105852 - DNA, 799 bp, Cannabis sativa
attttttaatttccgtctttcgttcattatataccatagcacattaatataatatactacagtcttaaactaatatactacctttcaatttttttttaaatactgttgcacataaaaacgatatactattgtgcaaaataattataccaaacacttaattattcaaggttataattgtaatttcatcatcaaacttttaacagaatgaacattttattaatttttttatataaaaatggacatttattaacttaatcgttagataatatataagagcatcggctatggagatgtaaataagtgatataaatgtaaagtatagtttattttattaaaagtctactctaatggtgtgtcaaattatgatataaatttgtcacataatacaaagtgattcaaatttaatttacaatataacatgatgtaaaatttatattaaaataaatattattttttttatatttaccattatatcatttttaatattttatcattaaatttttaattaacatgtttatttatattaaatgacttattattattattattaaattttaaatttatttttacattattattattttatattttttaataaatattaaatgatatattaaattttgtcttaaaatttataattatgtaaaaatatcactaaaacattttttttaccaaatataactcaattttttctaaataataagagcttctccaaggaagcggcattttacataaatgccgttcctttttgttccaaggaggcaccattcaacacagcattttgaggttaatgctacag

SEQ ID NO: 105853 - DNA, 774 bp, Cannabis sativa
aataatattatgatgtatacaatggtgtattgacaaaaaattccgtacttttaaatgagaataatattatgatgtatacaatgtttaaatcaggttttattttattatttttatggctgactttttttgtcttaaataaattatacttttatggtatttctaatcttaggttttaatgtatttaatattgagctaattttggttaaataattttgttaactctttatttatattaatgtctcattaacttggattgacttttgttttaaattccttattttttattaataaatagttataatatatatttaaagacttattgatcatttatttgtcaccagatcaattttatttattataattttactttttagcaatctacgtttagaagatcttctttctattttaatgtttggtatctttgttttgtgtttaacttttttcaagaatcaaatttattttaattttcagtattaataatcttataattaattttttaaaagtattttagattattatagaaagttttttcgtcttgaaatttattttggtatactaaatctatctattagttttacaactttgatgattttaccattaaatattttagtctaaatgtgagatttttagtatttataatttactatattgattaattagaatttcctttcttatattaattagcatttttactattgtttgaatgtttgattttttgaacttttgttattcatattttgtatattaagcattctcaaattaagattctttatt

SEQ ID NO: 105854 - DNA, 559 bp, Cannabis sativa
acatgagtaaagcctatgatcgagtagagtggagattccttaaaacggttatgtctcgaatgggctttgctagtaaatggattgatctcatcatgggttgtgtatctacagttcactacaaagttgttcacaatgggcatgtaattgaatctatttctccgtccagaggaattcgtcagggagatccactttctacctatttatttatcatctgtgctgaaggtctctcagctcttatccagaaatttgaagcaaatagacttattcaaggttgtcgtgttgctcaacgggcgccttctataacacatatgtttttcgcggatgacagctacttgttttgccaagccacacaaggtgcagcatatagtatatccactctcttgcagctcttcgaaaacgcatctggtcagaaagtcaactacacaaagtcttctatctttttcagccccaacaccaatactacaatgcgtaatctgatttgtgctactctccatatgtctgaagctcatgaaggtagtctctatctagggcttccaaacatcatagggcgcaacaaaaa

SEQ ID NO: 105855 - DNA, 554 bp, Cannabis sativa
ttgtaacatgcctgggccttaaattgagacatatcattactaataatgtctacaaaagacagtacgccattagcaccaagaatggtcaacgattcacaagtagaagccaatgttttgattttagtcacaatatcctacaaattaatacaacaaaattaattacataatgcatacattttgatgaaatgattattatatataaaccatattattattattattattattacctcacccacatttacagttaccacatgacgagtcaaagatttcaaagctgtgtacatacctatccacacacaaaaaaaatcagaaatgaattaacagaaagaatatagtaagatatataatcaagagagagtacttgttgataattttcttttcttgaaaagattaatttatgatgatgagtaaagaaaatgaaagattaatgacagaatatgtacataattaaaacaggaacaattaattaagtaataaattaattatgtaaataccagaatgatgagtagattggctgggcaaggatgcattatttcttggtggaataatta

SEQ ID NO: 105856 - DNA, 620 bp, Cannabis sativa
ctacacaacttttgtcagaagtacatgacggattttgtggcaaccacgtagccggacagagtttatctaagaaaattctaaggtaaggttatttctggcaaacaatgattgaagactccaaggcctacgttaagaaatgtgataaattctagagattttcaaagatacctcaggcaccgcccaacgaactaactcagatgcaaagtctttggcctttcgccatttggggaattgacctgatcgaacagttacccaaaggcaaaggcgaagtgcagtacgcagtggttgcagttgattgttttaccgagtggacgaaagcctagccattggcaaccatcacatccaaaaaagtgcaagacttcattgtaaagaacataatttttcggttcggattaccatacaagatagtctcagacaatggcaaaaaattcgacagtcaatccttcgctgatttttgtgtgaaccatgggatcataaaaagtttctccatagtggcacatccccaagaaaatggtcaagttgaaacagtcaacaagacactcaaggacaccctaaagaagaaacttgaagatgctaaagggaactggctggaagaacttcttgaaattctatggtcatac

SEQ ID NO: 105857 - DNA, 1880 bp, Cannabis sativa
  modified_base (136)..(140): a, c, t, g, unknown or other
aatagttagtaattacatgaaaaaataatattttttagtagctaatgtttagtgtaattacattcaattctcatgggggaccatgagaattggagagtgtaactaaaatctctcaattacttctaattacacagtnnnnntgaaattacatggtcagacaaacatgccaaattgtataattacttctaattatacacaaatccaattatattgtagcttttcaaacgcacaacatttattcaacaagttcataatattttcttaaatggtgtgcttcaaaaatggaactttaagaaacaaatctttttgatttgattaaaatagaattaatattttcagtaaaaagaataaataatcatgaatataaattcaaccaaatatttttaaattcaattgatctttttgtaaacgcttgccctcgatacaattagaagatcaaattattgattatacaaacacaagtttagttcccaattttctactcatgtttagagaaagtgattggagatgcacttatgtgcttttctttttagaggtagaatgcatattcttatttgaggttgttgtatttcaaatactttatctgttttttaagctaaagcgatcgcattgttgaaaggattaagatgagcacaggatattgaattgcaagtcaaaaaaattttctctaattatttctctctggtgttagctttgaataataacaacatgtattttctaataataataatatctccatgtattttaataagttaggtattttactttcaggcattaaagtcttgctgtcaaattttcatggagcatctctttcatgttagtagtaactctagtattgcagctaatggaatggctaaatatactttatgggtaggggatgactttttttttggatgaaagagatccttcctcctatttgtattgagactcttaaccagtcctgaccttgaactaaggcaggttaggcctgtacttagagtctattttaactcaaggtctaaaatttttatgtagtacattttttacattgaaaaaatagtatttttataaattttgtaaaaagaaatttaataatactcacgcgtataataaaaaaaaaaaaataggtctattattactgagggtcggccttgctcttaacttttttttttttctatccaagatgttgaaaaaaaagtccatcttgttattcaaaactttcaattaactaccctttttcacgattgaagaaatgatgaaattattttctttgatgtttatgtggattgaatgatattctttatcatttgtgtggataatgcccaaatccataaactaaaataaattatattcatacatgtatttgtcttatttatttatttattcttttgagagacatgtatatttgtcttgttgtaaattttacttaaatatgttttttcacatacaaaatatattttacatttttttttcttgtaaggttggttgtttagcaatttagttcttaagaatattttacaaaattctaagttttttcttaatttgttttcttctaattattatatacgagctcgtttagtacgcaagagtggattgaattaaacaagttaatttgtctagtctagtatttaggaatgttgggagtctaaataactactccaactaatctcatatgtctaaaattatttatctcatccagcagggtgggataaataatctcatatgcatacaatttttttatcgtttttaattttgattttattaatatattttaaatttagtaaaaatttaaatgaaaggattatcacacattcatttataattttttttatcaaaaatttattcattaaaattagtaaaagtgtataattttgaaatatcatacataagctttcaaaatt

SEQ ID NO: 105858 - DNA, 1986 bp, Cannabis sativa
  modified_base (328)..(328): a, c, t, g, unknown or other
ttttgtcattttagaatttttttttctcaataatagacttttgtcttctttattagttttttttttctgcccaaaaaaataatagatggtatttttttttgttggtaaagaaaaaaaaaagatggtatttgaggaatctttgttgtaagtctcgtgaggtttctggtataaaataattaatacatagtactagtgtactatcatcatttaactatttctcaactcctatatatcaaatgcttaagaatttaaaaaatttccaatgttaaaaataaaatttaaataattacttattttaaaaaattgttacttttagtgataatttttnagtcacaatataatttttttgtgaataaaatttttgtaactaaatatgaattttagtcacaacaaaatattattgtaactaaaacatatacaagttgtcattaatttaattttagtcccaataagtacagtgactaatactttttgccacggacttttagttacaacataggaataataatttatcattagtcacaacttttgtgactaaaagtaatattttttgtaatgatttaccaagtgtttaataagaaaaagtagtcatgatgacacaagtgtaataaaatattttaactttattatcgtcattgtcacgataaagtattcagtaattctaaatataattacaatgtacaattgtattatagaattacccaccactttaaccaacacactactatttttggtataggagtgttaaaaaaagttgaaaaatattttgagttgaagatttgggtgtgtgtagcttataattttgacttgaaaacttatgttgaaaagatcattaagtcaacaacaaatgttaagaacttggaaaatatgaaaatggaacaattacaaaacaaggaggagaatcacatgcattaagaatacttaataaaagatcagtctttagctttaaaaaacagccaacaaactctaatggggtcatgtttgatgggaatgagaatgtaaaacaaacttactattaaatgagtatgtttatttttagggtaattttaaactctttaaatatattgagattctgttaatatcaactctttagctaaaattcatcaataatcaccgacgtagaaattttattttatgggggcttaattgttataaaaagggaaaatttacactatttaaaaatggattttttttttttacatttttactaacttttttttttaatttataattttacagttttgtgttgttttaatgttgttttcatgttgtcgcaacattatactatatattcgcaatatgaaaataacgtgtaaacaacaatattttttagaacaagatacaaataacggtctgtaagaaaaaaatccgtaaaaatgttaaaaaaaactcaaaattctgtaaaaaaacataaattgtggattatttttgggtatttatgatataatccctgtaaaagataggctaccccaaactttgacatgaaccaaattatgccctctgaacttttcaggcaatttaaaatttctctcgaattattgagattgatagacttaaggacttttgttcaattttactaacgaaagtttgacatatatgaaagttcagagttcacgatttggtacatgttaaagtttgggggttaaaatttggtatatattaaagttcgggggcatgatttaatatatggacaatcgtcacattagcaaagttgaacggaattggataaaaaacttaaatctaacaattttcatagtttagggagaacttttaacagcctaaaaaatttgagggacgtgattttgtacatgtcaaaattcgaaagtaaaaatcgtaattagtctaaaaaatatttatgttattttaaacaaaaaattataatcaattttaatgaatttatttaattttgtaggaatttaattgttacaaaaaatatttataggactttttattattgtggatttgttgtgtatataattatcaaat

SEQ ID NO: 105859 - DNA, 1684 bp, Cannabis sativa
tacacatgtttctatcaagagagcgcattgctagaaactctatttaggctaagggtgttcatctgatctaatctgcactatttttctcatagtgcatccgatctacactaactacagattgaatatttttgatccaattcaatccacatagtatctcaaatccaatttgcaaaagtgtggatttgatcagttattttgcattggttactttttaatattgaattatttaacatttattaatgttcttttacataaataacaataaaataaaaccaattattgttgttttatgtatcctaaaacaaattaaatttaataaaataacaaataacaaattcaaagcaagaaaaaaaaaattgtatgtgttgagaaatatttaattttttttttagattatattttcttacaaataagaatagcatatacatttaatctactatgttttgaaatatatttgtatcatatgtattatatttttaaattactattttttacattataaaattgggtgtatacataattttctaaaaaatatctataaatatatgcgaattttattggatcagttacttctacatgtcaataaacatccaacccacaaagtaaaaattttagattttccaatcccatccattctgcacaagtgtatatatttgcactttatggattgtattagattagatagtgtgaatcgaattgcattgagtattttatgaacactctagtttatccttgataaatctaaaaagctatttctattcctctcttttccctaagtgcttgtggtaggggaaaataagcttttagatataggtataaaactttgttcaagtttggtaattctcatattatacacttgtagtgtatatgttgttgaaattgatctcacgtataatatatgtatatataaatatatgttatttatatattgtgttttatttattgcttatagttatagttttgagttgtaaccttctcatcatccttgtggtatagttttatcaaaatgtaaatatctcaaaaatttgttctgtttatggaaagttagatgacatcctgaagggcattcccagaaatctaacttgtccatatggaagaagtcttcaaggaagctagtcttcctttggaaaggggcttttggatggctatttgttccctccttgaagtgagttctggatagtcgactctagctatcacttttcctatccaggaagacctttcagcttgtgtttcagttcatagtcccagaagtggtcgtttcatccaggagcactataacttcagttgacatggagatttcactacaaggagtttgctaagtttgttaagtggtaactaacttaacaacttagctcttgcaaccagcaaccttgggatctatatcataaatctataaataccaccaacacttcgcatttcaggaaagaacaagacgaaaagagtttcgagagctgatcatgagaaagaaagattgagaggtagatagacagagttacagagaaatgatagagattaggtttggactttttataaggactcttctgtagattaaaatattcttaggtaagagtttgagagttaaacaatttgtgagaattaaaccgagaatcattctcaactatattgtaccttgttcttgctcaatgaataaagaagattttggtggtgttccagaactggagta

SEQ ID NO: 105860 - DNA, 609 bp, Cannabis sativa
tcaaggacaaaccaaacattatttgggatagggaagtgaggataaatctttgcaagatgtggaaaaacaagttcataatagagaggtgatgggatgtgagttcgcggtggtgagagttttaattcacataacaatagaatccttctcttgctatatatagatatgtaaaaaaaaaaaacaaaaaaaagcagaaaagaaaaacaaaaaaaaatacaatcatagtattaaataaaataagagagaaaaaataaaaagcaagtttaaggctaagtttggggtgtaccatccctaatcaaagaaaaaatgttgttgtttttttttttctctttctctagttgatttgaaatatatatatagtatatacatatagcaagagaagtggaattagattgagcaatcattgtgggttgagaatgaaattttgggtgagcgtttgagaggaaaagaagagtccttgagaaattgaggtaattaggtcatgagcctaagaaaagtcatattttagcaaacccgaacctaagcctcacattacaagcctattaaagtccttttgatctaggatgtaaagctaagctacattagtggagagggttgcgctaattcaactta

SEQ ID NO: 105861 - DNA, 553 bp, Cannabis sativa
taatgatagtttgttttggaaagcatcaaagtcgggcaaattctcagttaagagcagttactgggtgagtcaacaagataggttcaaggacccgaataaggtgtgggaaaagctttggcgttcccctattcatcctaggctgaaattgctactttggaagatctggtctgatgttttacctacaaagtcgcgaattgggaggttggaggagggttgtgtgctctgcaacaatgctgatgaaactgttttgcatttgtttggtgtttgtagtgctattaaggcggttctgtttcatagcagttggggcattcgaattgatgatttgcattggaattccattatggatttcgggttgtggtggacttatgtgaatgatgagagtctgcagttgtttgttgcctgcacttgtgcgtcgatttggaaatggagaaataatgtgatttttcagaaccggcctttttcgattgcagatttaatatctgatgtgcaggcatccgtgagagagatgactgtgtttgatcttgcagaccctggggatgttccaattttgaat

SEQ ID NO: 105862 - DNA, 1346 bp, Cannabis sativa
aaagcaaatcacacttgggttcttatgcctcctaaagctggacaaaatttaattggcaacaaatgggtgtttcgtgaaaagttgaattcagatggatctcttcagaggctcaagactcgacttgttgctaaaggctttcatcaaaggccaggcattgattttggagagacctttagtccagtaatcaagccctctacaataagaataattcttactattgctgtgactcgaggattggaaatcaaacagctggatattaacaatgcattcctaaatggaacacttgaggaggaagtttatatgttgcaacctcaaggttttgaggaaccagggaaagaggactatgtgtgaaaattaaataagtcattatatggcttaaaacaagctccgagagcttggtttgacaagctaaaatcaaccttggttagttggaagttcaaaaacacagttagattcatcactcttcttttacaagcatggaagtgatgttatcattgcattgatatatgtagatgatattatagtcacgggaaacaacagcaacaaattaaagagtttcattgatgaattaaacaagaaatttacacttaaagatcttggccctttacactacttccttggaatagaagtctacagagatgaaacagggctttacttaactcaaactaagtacattgaagacctacttcgaagaactaaattcaccaacataaagccttgtccaactccggccacggctgggaaaccaatgtcactaacagacggggagttgctgcctaatcctactgagtacagaagtataatagggggcctgcagtacttatcacacaccagactagatatttcgtatggtgtaaacaaactcagtcagttcttgaaggctcccactactgtccattggagtggtgttaaacgggttttgagatacttgaaacgaacattacacaaaggcctccatatcagtcgagatgagccacttcacatcactggatattcggatgccgattgggctggctgtccagacgatagaagatctatagcaagctattgtgtctactttgggaacaccttagtgtcttggtcatccaaaaagcaacttgtcgttgcaaggtcaagcacagaatctgaataccgtgctttagctcatgttgcagcaaagatttcttggatcgaatcactgctcaaagaattgaattttccaacacccatggctatcacctggtgtgataatatgggagcaaatgccttggcttccaaccctgttttccatgccagaactaagcacattgaagttgacattcacttcattcgtgaaaaagtgttaaacaagcaactcgacataagat

SEQ ID NO: 105863 - DNA, 3271 bp, Cannabis sativa
  modified_base (1744)..(1746): a, c, t, g, unknown or other
  modified_base (2845)..(2850): a, c, t, g, unknown or other
  modified_base (3219)..(3231): a, c, t, g, unknown or other
gttataatttctttgtggtatataattttattacaacggtatattaattttcagtaatacgataaatcaaatattactgtatacatttaatgatcttatatatttatttatttttgttacaatataataatatacaatactaaaaaaattatataacttaatttcattattatatatattttaaaaaaatacatgtgataaatgtatgttttataatttttattagctaatttattatatttgactattttcttaattttttttaaaaagggacattactaacttagtttctaaatttagtgtcattttgcatttcagcccatattttatcaactaagcatgtaacactatttggctgttgatattatggtagcaaatcaaaatagcaatatttggctgttgatattatggtagcaaatcaaaatagcaagagaagttggtgttttgtttcttcttactaactaatagtattaatatatttttaaagtatataagttaataagaccaagctagtttttgcatcatcatttaatggttttgatgccttttacagattttgcatcttttatggcttttgtaccttttacgattattatactatttattatggcttgtacttaattgtttagggtagttttatggtacggtcattaggcaagagaagtgatcaattttgtgctcatgacttctacttcaacaacttttcaattttgacaaataaatatttcaagtctttttaagtctttatatttgatagggattgttttatattatattatggattgttttgccactgttctttcacattatttaattttcattaaattttgttgtaatataattttttttattgttattttataggttggttttgtggagggcctaccattatagagactttcctaataagtttaatgtttaatataatttgttgaatattaatattcagcagttttgaattagtcgggtgctagtatgttgttactagccaaagggtaatacctttggctaattatgtttagatttttttttaagttttttgtttttttttggtaatgttgagctagtatgagttgtgtgttaaactctaagtttgtatattaatttttattttgaatattgacattctaatattattttattttttggtttggcgttgcaatgttttattttttttcagtttcgctagctatgacgacacctattaataatgggcatgtgttttttcaatgtgctaggtgtgttgtttgaagacgttataactttattgtctaaatttttacgagcaattttgtcccatgtgattcgtgttgagtatttagcagcccatggtttgacaaagcatgctttttgattagaagatgagctatcctagttcaagaagggtactgcgctgattgcagatatctgcgtcttaaattcatgagtgattctaatcactgtctaaaaaaaacaaaaaaaaaaaaatagcaacagaagtttatttcaaaaaaataaataatatcgaggcaaggtctcaatatataagatcatctccaatgttgaagatattaaaaatgagttatatttgggacaaaaattagttttgtgatatttttacatcaactaatttactattgtgctctaatgtataattatgtcaattaataataatgcttacttaagaatttattaaaaaaatatataaaataataataatacagaagtaaatataaaaattgataagaaaataataataataatnnnaataataataatacaagtcatttaatacaaaggtgcatgttaactaaaatttaataataaaatatttaaaatggcataatggtaaatataaaagcataacatttattgtgatgcatattttacattatgctatagtgatccaaatttaaattattttttgttatgtgacatatttacatgataatttggcacattattaaagtaaatttttaacaaattaagctatattttatgttttcatcactctctgatgtaaacatgaaattactaaatgaaaaagattaaagagtatttcctatagtatatcaaaactacttatatcttgtttgacttataatatatcactactaagaattttacccacatatataacatatatgtgtgggacaaactatttccctacacattatataaattatagacataaaaaagttgtagtaaataaatgttattaaacctataaatatgtatggataaatattatatcaggggaatatatatgctattacccacatctatgtaaaagaaaattataattaatttatgtggctgaatgttgggattagatatgatgatgatgtgcatgagtatgatgtgtctgttagagtttatgctctgaaaagcctataaagacatttttaattataaataagacttaaacattttgatataagtatgaatgttgaatcattaatatttaatattgaataatttatacataaaaattagaaaatttcttattcatagatgaggctatgacttgtagctttacaatgaattaagatcatttggccatgaataaaaaagttagcaacatattaaagtttaggaatctttaactaatggttgctagtacagttcattgatacccattcttcggcgcaagcaatcttgatttcgatagctgatgtagtatgacatctaaatgaatgtgttgtatacaatagagattatatatgacaaggaccgatatgaataaagttgtcttcatcaaacttgtggtttattataaagaccaaattcatattataataatgatctatagtagatcagcctaaatcctgagtaatcataaactcttgttcatgttattagtttnnnnnnttcactcgttaaagtttctcagaaaagatgattcttacaacttttgttttgggaatctaatattgtggaatggtgggtgttatccacctttctggcaagggacatgtggaatccaggttagcatcaaaggcccactagtgggtccctaaagataataaagtgggtcaggcccacctagacaagaccttccaggaacgtacttcagctcaatgattgaatgaccttccgcgagtgacagctcgtgtccaaaagcaggtctagtaccgtgatgctggaagggtgagaaagcgtgttcctggaagaccacttcgatttccctttttattcttgcgcacaaataaggaaatagttgttggaaatattttaccnnnnnnnnnnnnnactaccatgtatgtttcattaacaccctaatatgaattct

SEQ ID NO: 105864 - DNA, 790 bp, Cannabis sativa
ctcaatgtcacacagatttaacatttagtgatggtcaaaattcattgagagtccatgtggaactaagcaagcttaaggtggacatggtggcctaatctcaattctcatttctctttgaggaaaaagagaatgaacctgaagctggatctttgtgtttgtggtacatactactggtgttgttatgagaattgagaattgagaattgttgctgccaacccaaattaatatgaaactcatcatagacaaacatatcaataaagagcctttgatcttctcatataaagggcattattcttatccaaagttcattcagacacataaacataacaggtaaagaagaacaaaagccatgcccatgtcctactttttgtggtgagagagagccatcatccatggcagacgacaatgactagagcctcttcctttctggaagaatcagaagaagaagctcctcctgctcctaagtcatgtttaaattaatgtaaaaagaaagtacaaatagtaatggtgaatagtataactgtgttattgtaattttttcttaatatttagtgaaagacaatcaatttgatctcataatttacaaatcaatcaacagaaaaggaccaaaccagaagcgataattgtcaaaactaatctaataatggtaattctgttctatgtatttagggctcgtttggaaccctgtattaggttgtattgtattgtattatattgaattgcattttatacaatatttttatttaaagctatatgtggtattaatttttatggacacttaaatatataa

SEQ ID NO: 105865 - DNA, 609 bp, Cannabis sativa
aatttcttgaggagaaagcttgttaggcactaactagtaagtattaatttcttttaactcttttaatttataagaatatatagttttaaagatgaaagttttgtataaagattttttttaattgtattctttgcagatagatcctattgtgaagataagaattaagaagataaatattttgtaataaaaattctactttggagctaaagcactaatcaacttctctacttaaatcttttaaaatacattaaaatttcagtctttatttttaaatcaaatttatatattaaactatacattcatttttttattctttgttctttatactactttaataatatgcgtatacatatctctaaaaagtttaacttttagcatcttttttattaattttttttttttttttgatagatatatatattgtggatgaagatgtaagttcgagatggaatgaagatatatcttgaggatcaattaatttggatctctattttagcttgtttttcatttagtttttcagtttgtttgtcatgatcatcaatatgtaatttgtatctcaatttcacaattgttagagtgtatttatgcttgcttagtctataataataa

SEQ ID NO: 105866 - DNA, 561 bp, Cannabis sativa
aacagatagagtgcatcagtgggccctttttaatttattttataaaatttattaatttaaatatatataatattaaaaaattctataatgtattcttttaaaagggatagaccaatgtactcttatttgttttgatatccgaaataattttagtcaaattttttttatgatcatgtacgttatagttatttaagatatcttacaaaattttaaaaaattcgaaaaattttaacatgtcgaaaatatggttcaaatagtatgttgcacatgtgactattttattttatacgcgtgtaataatatagattgtttaaacactactttttatattggaaattatttcaaatttttttaaaattttgtataatatcttaaatatctataacatatacaaatataaaaaaaattaaactattttttttttctaaatgttaaaattaataaagagtattaatatattatttttcgagagaattcattgtaaaaataccctatattatttatatttaaatttcaaaacattcggaagcctcaataaaaggccacgagaaaatgtttata

SEQ ID NO: 105867 - DNA, 631 bp, Cannabis sativa
tttttttcctacttttgtgggcctccttcacctattcaaggagagctcccttagctcatttttcagattcaaaaaactacacataaggtcaaagtttttctctctagaattcgaagcttctgatacttaaacacttgttgtaattaccatcttgtgagaaataaaaactcaaaatagatgtagccccatcactatcgtgatattaggggtgaactactataaatcaatgtgtctctcattaactattttacgaacttttcattctcaccaatctagcgagcgagtgtggcttagaagtctagtccagatttttaagccaacacaagggcttattttcgaaaaaatataaagtgagagtttatttgttaattaagatactttggagggcctaactaataaatatatttaaatggtaattatttataattattaaatagataaattaacatttaaataattagaatataaaaattgtaattttagaaaaaatttaagagagtgtcatttagatggattatttggcaaaatctaaagtcttaagggccatgagaatttcagccatgatgatatgggctttttaggtcataatctttttcctaaattctattacattctaaacctaaactagaga

SEQ ID NO: 105868 - DNA, 559 bp, Cannabis sativa
gtgttttgcataaattttttaaaattatttttagattttttcttactaaaaaaattaatattttaacactataccatgacatgaatccatccgggtacaggttcgggtatagattcgtatctaagatccgaatatgtgagcaaaaatatagaatataatatgttagacaaaaagaattgtttttaaaaattgaaaacaacattttgatgttttcagttttctagttctttaaaactcaattttaaaaaaactgtttttaaaaaattttaccaaacaactcctaattaatttttaaaaattgctttcagttttaaaaaatgaaaaacagtttttaagttatgaagccaaataactttttagtattttgtatttttttgaaaaatattttggtacctatatttttaataataattatttagtactttgtattttgaaattgtatatactttaaaataaaatttaattattgaaaataaatgataaaattgaaaataatttgatttaattgataaaattttattaaataaattaaagtttaaaatagtaaatatgtatgatt

SEQ ID NO: 105869 - DNA, 589 bp, Cannabis sativa
  modified_base (347)..(368): a, c, t, g, unknown or other
tatggattgagaaaatagaacttttagttcaattggagtttggcactgactcgaagagtgtattttaggagatttgtcttgtctcgaagaggactattatctatcaattgatgctttcattgagagaatcccagcgagagatttcattgagagctccacaatatgactgacgaagagcttcgtgagttcgtaagatccatgattagatccgtagagttgcgtactgacgccatgtttgagcgccatggctagtcgactgcggcactgttggattcctcatctcaggcgccaaccatgtttcaagagtttgatgactctactgaaccagtgagaatcacgaagccatnnnnnnnnnnnnnnnnnnnnnncggcagtgacatttcagctggatccgatataggtagatcgcaatcaattccggttcgacctacgacgaagaaggcagctcgaagaacaccgaaagaggaggagatcggtgtggcttcatcggatgttgtggattctcgatttgcaccaacgaaggcagctcgaagaactccaacgtcggagaagacagagatgacattggatcttcgcgcacaaggttttg

SEQ ID NO: 105870 - DNA, 783 bp, Cannabis sativa
tcactcatttaataggaagagaggaagagaaggtctgtttgctattaagattgaccttatgaaagcctatgataagatgagttggagatttattgatcatgttatagactgttttggggtgccatcggaatttcggaattgggtttctcagtgtatatctaccaccactctcaacatttgcattaatggaggccaatttggaaagattatcccctcgcgtggtcttcgccaaggggaccccctttctccctacctctttatttgggcggcggacatattatctaggcttctggaagatgcccaagctaagaaatctattagtggcatcaggctgagtaggggaggccctttgatatctcatattttcttcgctgatgacctcattctggttggtaaagccaatcttgaggaggccaaaggatactgggattgtcttgagaagttttgctcctggtctggtcagaaggtgaataaaatgaagacttccattttcttgagtaagaatacccccaataacatgaagcaagggatcaaggctatgctgggtattggatctccggaaggaaatgtcaggtatttaggcctccctcttttcagatcgagacaaaaggatgctgattttaacttcatactcgataacctgacttcaaaattacacggttggaaagctaagactctttcaaaagcgggtagagcgacgcttatcaaatccgtaggcctttctctacctatgtatgcaatgcaaactactaagctctccaaccgtctagctacgaagattga

SEQ ID NO: 105871 - DNA, 926 bp, Cannabis sativa
cctcatctcaaaaattggcaatgggcagaacacttgcaccaccacagattattggattccgggttgtcgacaaatttccccattatcccctgtccctgacagagttgcctctctcattaccccctctttatcctgggatactgctgagattcagcgttgttatccccccccatgtggcccaaattatcctttctattcctctcccccttaccccaacccaggatgatctgatctgggaaccttcaatttctgggatttacacagtcaaatcaggctatcacctcagtttttcctctactagcccacttgacattccctcctcctcctctccctcgccttggtggaaaaacctttggcatctttcgattcctcccaaggtgaaacactttgctttccgagccacaaaccaaaccctccccactgcaaaaaatctagcctttaggaaaatcatccaatccccgggttgtagccgttgtggaaaccatgaagaatcggtgtctcatgcgctgttctactgtcagagtgtccgaagagtctggaaaggtacgcaatttcaaccctacattttttcctgctcttctaaaattttgtttcatgatttagctcaccaaatttatacgtcttttcctaagaacgatgtagatctctttctgtgtatcgcttggtttaattggtttaacaggaataaagctctcaaaggtcaaccatccgatcaaactcatgcaattgtcagtctggctcaaagttttttggcagattataactcgacctcgtcagccaaacctcccctaggctgacccagtttggccactgtccctgcttcctggattcccccagcgcccggcactctcaagctcaacgtagatgcagctgttcccaagaatggtggaaaagtgggtttcggtggagtaatccggaatagtgaa

SEQ ID NO: 105872 - DNA, 509 bp, Cannabis sativa
gcatcgtgaatcacagaagcaatccctataattttgggatcatatcacatggatatgacaagctgtccaaatcccttgatcagtgtattttatatttaatatttaatcttgccaattatatctattgtaaacagaagggaaacttttccctcaaagcttatagccctataaatagtgatctattctcactaggcaaatggtcgaaaaacttatctaagaatatatattcagagatatcattgtaagagctctaagaaaggaaatcattatattctttgttcttaagtcaatacaaattaaggggagttggctattaccgaactgcttgacgccgaacctttataaaaactctgtgtctttatttattttacctattgcatctatattatactacctgtcgcttacaattgagactcactgtcgttggccaaaagcgaggtcaacaatctacattatatttttcttttcatatataaaataaacaaatatattatattttttttgtcgat

SEQ ID NO: 105873 - DNA, 538 bp, Cannabis sativa
aaaaaaacatattgagataagtaaaccacataacctaattttatctttatttcaattaatgtaaattctcaagtttaagatttatatttcttccttaaagacaaaactattgagaaaattaaaaattttaaactcctatatttttttttgtctgaaatttcaaactcttgtattggtaaaataaaagtcccatataagttagtttaggtcattgatggactcaaaatttttcttaattattataaaaaatatttattctactttaataaatttatggagacctttttactattttacacgacaattattaaatttattagaaaatattttattttttaaatataatttttttagagatttttttaaaaaagtaaacttaagggttttgctaaaaaaaaaaataagaaggttaagtatataaaaattaaaatataaaaaggttttggcactaaaacaagataaaaagattaaatatataaaaattaaaatataaaaaatttccccgtaaattactaaaaaaaaatctacaatttaacaa

SEQ ID NO: 105874 - DNA, 2964 bp, Cannabis sativa
acttagagaaacaatgggaactagtaccaataacactgcaagatgagtaataataaaggaaaaatcataatctgccatgaacgttcttttagcttttagcattttctttctttagattaacaatgagtttaatgcctctcctcttatccatatgttgcatccttgttttaaatgttattaaattataggtagttatctagccaggagccagccatgcaaatgaatcattttatttttttgtttctttttccctttttttcctttattattacttataaatgcagtctgcaatttcttctacgaaaattcaataacacaacttgacgataattgagctggtcccttttaattcctcctgaggaagtaggtcatagacttctatcgtattaaatcccataccgttagaaatcgaattaaacaacgccacgttcactctagcgcttaggtatgcataatttacagtcactccaggccaccgtagctgtcacagagcatagactaataaaaccatgtcacgaattgaaacgaatattatttatttttttgaagttggaatttttcaccatttaattgccataaaggatcatagtcccactgatctaataacagagataatctcatccaattccaaatatgataaattagtccaatgacagttaagctatataaccaacaatggtagacagattcagtaacaataatacaaaccgaatcggtaacaccaccaaatacgaattaggtcacgggaaagatcatacaaaataacacaagctgagattctagaaagactgggtgaaaaatgccattattacaaagatcagcccaaacagaaattaaaaaactaaaccacaaaaagccccaaacagctatcgacacaaaactttgatatgagcctttaccaatcccaaacagaaagtaaagataatattgttttttaatatatctggtttgatatgagcctttacaaaaaatcaaataataaaaatgcccttttgtaaaacaagagtgtaagtacatattttattatttataaacataatttacagaacatcaaacataataattcagatgcaatcagtagggacaagtatcatcaagagtacagtatcagacgaagagttgagcaaaagtgaaagataattcaaaactcagacactattaaataaacatgatatggacaagaaagagttacataaggatcaaattggagtttctccctaaccattaattgcattttgagactttgtccaatgtatcgaaaacgttttgtagagttacttcttccacaattacgaccttgtctcttgatttagatccagcaccaatggaaacctgccttcttcttacccctaaaacctgtaaatttagaataacttgtgtgaatgaattcttttgtctaagaggctatgacaaagttgtgatccttgaaactttagctattaatcaaatgccaattacttagagaaaataatatatgttccactgaatctaattctcatacctctatgttacaaagtcgaataaatatataaataaataataatgatattaagaaaaaagaagaaggaagttatagatcactccatgacaactctgatcttataaggcagccattacggccatttctaaactgcaaagaaaaattccagtccaatttgaaagatcaaagcctagtgcaaaccccattatatgattcactctaattgattcaaaattaccaaaattcccagttagattttattttacttaactaaaaaacaaaactttccaactttttttataagattgaaacacctgtattcctaacaaattgaaatcaaaacagcaaaaaaaaaaaaaaaaaaatagaacataaatataatgatcgaatgaaaaacataagaaagactcacggagctcatatactcaagaagagcggcattagcttccccatccttggcaggggcatcgatttgcacacctaatgcctcatcgtcaaaaccttcatccgaaacagtgcgaagaaaatttagaaaatattggagtacataaacataagcatacgcatacatatatacatatacatttacataaataagagaaagaccagtaatggaggccattttggagccaggcttggcatggatagtgatggcgacggaggagggagggacgctacgaatacaggaggggaatatagtggtctgatctggtttgggtgagggaaccgataggggcttgtgagccttggccttgcccttcttcgcaggtggcatgtcagtatctttcggcctacaatttcggtggcggaacgggaaatggcgggtggtacttagtccagttcgtgagtcgtgatcaagtgttttgttggccctagagtccagcacccaacccaggtaaaacccaaggaattataataaaaaatttacatttataattttttttacatttttaatatatatatattttttttttgaaattaaactcttattaacaagaatcagagtttaataaaaatcaatacgaaaagataaaaaattatcaatctaagctaattcatcatccaccttaagtgcatgcacaactaattcatgagaaacaaacatgaactagggatgtcttaggaaaactagaaagcaaactagcaaaaaactgaaaaacctagctcattacaaaaaaaaaaaaaaaaactaaaaaaacctagctcattacaaaagaaagagcgtttttgaaccgcagaatccaaagctaaacaatcagactccacataactaaaaggaagagctacgtgtgaaaccaatctagcactactactaaggctaatgctcctgcttgactgactaagaagtaaccaacaagtttagatcttctacaatgtgtgaattttccacctttgaagtataaataaacaacctacaaaacaccaaaaaagataaatgaggtaagaatttaacttataaaaaataaactaaatttaaaaaccaa

SEQ ID NO: 105875 - DNA, 1412 bp, Cannabis sativa
atgactctaaaaattacacttagcgatttttgagagtcaacacgtgtgaaataaaatgtatgaacattgtaatctatattgtaaattgttctgaatttcttaaaattttgcatgatgtcttaaacagccataacatacatggctatgcaaaaaattggactaatttttttcctaaatgttgaaacaaataaaaaatgcatcagtacattacagaaacaccctatatttaaaacatttgtataaatctaaatatttaagtacaacaattataaagtatttatcattaatattctataattttacattgtttaaaatttaaatgtaactaaaaatagaaaaaaaaaaatatttgtgtgctcttaaataggccccgctctgggctaaggcaggttaggtccgtgtttagggcccactcaaactcaagcccaaaacccaacacacatatgacctatgtattttcttaaaaaaattacactacaaaaaaataatacatataaaagggtctattttttaaaaattttattaaagtagtttttggcccatttttttttccagggtcggtcatgctcttaatattaaaatattaagtacctagggcatctccaaactatacattaaatttagtatcacactatcactaaatttaacgtcaaaaactctttttatttcaacaacaatataaaaaattacactaaaaaaatattttttattattatgtcaattttttaataaataaaatactttttaagattggagcaatgatgcttgtatttgtggtagaaaaattaataatttttttttatttaagcgtttatatattacaatgttttatctgtgactcgaacccagaacctccaacactcacacacctacttatggccacttgagctagcctcaagtagttcaaaaaaaaattaattagcaatgagcattggtgtggttttaccacacactcacttatggccacttgagctaaaaaaattaattagcaacgtgaaaaaaattaataaattttaccaatatgattatgatcccatttttcttacagcaactttagtagcaacgagcattagtgttgcttttaaggacaattgcaaaatataataagtgttattccaatggtaaaataagtaattgttgcacattattgtggtgataacatctcaatattaaatactagaaactcaatgacacctaactatgtgcagctacttgcatttctatcgtcggcggtacctttattggagctaactagaaacttaaatactagatggttcatggacattcctttatttcctatatgtagaaagtgtctcctaatttgtgataaatattaaaggaaactttaaatccctaaccaccacaaaaaggtgtggtatatatgttgttggtgtcattacattagattttac

SEQ ID NO: 105876 - DNA, 594 bp, Cannabis sativa
ttgcaatgttcccatccattagatcatatttctttttatgtaacggtggtctataacagagtgtgaaaatcaaaagtatcagtttattttgccattttcgcatttcagaccttcaaatttcttctacaaataacgattactttccctttcaacttgcatgccctcattgtcattgacttatttcttgcgtatttcatcagacttcatcttcagcctcggagactctcaggacccatcgtttcagtcatcaaaatctcaatcgtgaagttctttgcccagaaatcttcatcaaaacagtgagttgctcatcctcttttttcttatacttttcttttcggtatttgtagtattgtcttgatggttgattgttccccttatctgttttgtttggttattttttaggtaatttttgttttgtttgtctggataatttcagggttaaggaaaatttttaggttattagattcatagattcctgggttaggttctatttaatccagtaattacaatcctagaagtcttaaaaactgactttcctaaaaatttagcccttccattcgagatcaaaacttagagatcatctaataaaaacca

SEQ ID NO: 105877 - DNA, 742 bp, Cannabis sativa
gttactaaatctgggattcattaggccgagctactctccttggggtgctctggtgttgtttgtaaagaagaaagatgggtctttgcgaatgtgtattgattaatgagagttgaacaagcttaccatcaagaacaactatcctttacctcaaattgatgatctttttgatcaactgaaagggaagaccgtcttctccaagatcgatcttcgctcaggctatcatcaactgagaattcgagaggaagatgtcccaaagattacgttccgtactcggtatggacattatgaatttcttgtgatgtcttttggactcaccattgcctaagcggccttcatggatcttatgaattgggaatttaaggattacctagatagatgtgtgatcgggtttattgctgacatcttggtttattctgaatcggaagaggaacatgagttgcatcttagatctgtattgcaacggttacgagaccacaagctgtatgctaaattcaaaaagcgtgaattttggttgtctcatgtctctttcttggggcatatagtagataaagatgggatcgtggtggatccgaccaagattgaagctgttcgggattggccaacaccaaaatcaactactgaagttagaagctttctgggcttagctaagtattattgtcggttttttgagggtttttcaaagattgctatacccttaacggagctgactcgaaagaacttaaagtttgtttggactgatcgg

SEQ ID NO: 105878 - DNA, 1018 bp, Cannabis sativa
cagcactaccatagaaaagggctaccttcagtatggtgtgatagcatccagttgcgggatcaaattgaaaaaggaaaaaaagaaaaatcttgccaaggacaatgatcctattttcactacacacacttatgtctgacaagtgaattcaagtgtgtaagtctcctcttctttaatgaaaatgatcctgattcacattatttgtaacatgtctattttttctcaacatctgttaagtgtggttagtttttgagattctcattagttattctcttttgaaagcatatcatgaatatttgtcactagttatgaaatttaattagttgcttgctctagaacacctttttcattattgtacatattttatttatttttatatgttttggattttcaaaaataaaaaaaaaaatataataaaaaaaagagggatgtcttgtgggctaagaaattttgtactttgtttttttttttatttaagcgtttatatattacatcagcataacctgagactcgaacccaggacctccaacacacacacaccccctatggccacttgagctagcctcaaatggttttgtactttgtttggtaagtattaacatttgagctaaaattgatttatttagacaagtttccctttaaagtatgatatcatattcattgtattttgtcattgatcttgaaggattttcttaaattggtctatttttggaaagtatcttggttattcttattttcttttattttttttatgaaaaataattttggaaaaaaagtgggggtagtttatttgtgttcgtgggctggtggcttttcaaattttaatttggttttcttttttggtccactctcacatgattatttaaaccaactttctttgtcatttaatttgaccacctacccgattcctcttctttgcttctttgtttcataatcttactttttgattcccatggctaagacaaagaacctagggcatccaagcaagatggtggaatccgaacctgccccctcaagtact

SEQ ID NO: 105879 - DNA, 527 bp, Cannabis sativa
gtagttagggtgttacaattttcttgtttaatgtgattcaaattaaaccgctcatgaattagctaaataattttagtgttagatattgattatactcggattgagaaaattctctcaattatattataaatgactcttaaatctataataacagactttttttataaatagttatcaacttattaattaactaggaaacttcaccgcgcgttgcgcggttgtttttagaaatttgattttttacattttttatttagagatttataaaaatataattaattatgatattatattttaatattttttacttatttttaaaaaataattttttttttttaaattgttgtattttgtaagattatgaatcataaattttatttatggtaaatagatgaaacatatacgttaaaaaaatgagactatacatagaaatattatgtaataaataagaaatttatatatatttcttttttaattttagatgaatgatgaatatatatatattgaataataatataaaacgtgat

SEQ ID NO: 105880 - DNA, 903 bp, Cannabis sativa
  modified_base (485)..(495): a, c, t, g, unknown or other
taaaactttctaatttttcgagcagttgttaattttgcctcgctatagcagttataatttgccttaagcaaacttaaatatactttaatgattttatcactttgtatattgttaatttccttgcatgaatagttatactatctatccattttctaggttcaagtacttttatcaaggtatcgtgatacctcgtttagtactttcctagctcacgagaaccgttagtattcagtttaatacgcgacttataacttttaattttcctttcccgtcgaataggttttaaatcaaaaattctagttgtttgatcccttcttcgtcaaagtttgatcacgatgttataacgattcgacccctctcttgtcaaaaaggtttggttagggagttataatggtttgactccactttcgtcaaagaggtttagtcgagaacctttgaatttctaaaaaataaattgaaatgacgggtttgcattatacaatgtnnnnnnnnnnnaattccagttaatcatatataaatgccccttaagttatttttaaagaacaaaactttgtaattacttaatataaatgattctctttattttataactgaagtttaaagtttacataaataataagagttacatcatttatttactagttgtagggtcgcaaatgttctacattccagtagttttttattagcgagtcattgagtcgagccaatttataaactccaactccaactactgcttcgatgacatatggaccctcccaatttgggttgaacactcatacagatgcatctcccatatttgcaaagactcgtcttagcaccaagtctccaacattgaatagtcttttcttgacttttttgttgaaatatcttgtaactcggtgttggtatgttgcgttggtgatt

SEQ ID NO: 105881 - DNA, 583 bp, Cannabis sativa
tttttatttaattataacatatttttaaattattgcgtgttatttgtttttagtcattttgttataaaaaccggttctattttaatttatgtctcatctggttatttatttagtcatttcaaaaaatgatttttgaattatttatttcaaaaattgattttttgatttaattaatttaaggaattagtttttaatttagttatttcagaaaccgattttttattcagttaattcaaagaaccagtctttgatttatttattttacttaacaagtttttatcttggtttacggaatcgatttctttgtctcaaatttttaactagttgataaataaaaccaatttttttatattatattttacgttattgtgtgttatttattttatttattttgatatgaaattagttatatttagatttatgcctaatattttttagaattgatccccactttttttaaaaaaaaaaaaattataaccagttttaaaggaattatgtgttattcgtttttactcatttcgttgtggaactagttttattttttaaaggatttatgcctcactatttttctcattattttttt

SEQ ID NO: 105882 - DNA, 729 bp, Cannabis sativa
aactaattaacaacttagggtctttcgaaaaagaataaacaaaaaggaatggataattgatgaaagtaaaacaaattggtggcactgaaaataaactcaaaatatcacaattaatactggtaaattatctgcaagaaaaggtatctttagaaaaatagacttgaatagctaaatcccccctatgttgaatctgcccagtttttttcagcattgcttcagcattatttcagcaaagttgtaccgggttaacaaaatttcttctatgtttatgagatttttccaaaactcacaaattaaattctaccacttagttcaatatattcgtatatcaaaccagattgcagaacaatatttaaacataaattctaaagttatgcaaggtaatgaaatattcctattccatttactaaaagaaacctaacctaggaattcacttgtatcatccaatttgtaagtactagatctagccttttcagaaccagatctagcttagcaatacttataaccaataagtataaataaatgatagtaaactcacttgaatgaacaaagaaaaatttgctaaaatcatgcttaatattaatcataccaaacataggggtttatagacattcaagccttaataaaaccagctcatacttactttagttttcataatccaaaacaaagtattacaatccatggctacaattcagtttttatagaaatttagaggaatagaaagaatag

SEQ ID NO: 105883 - DNA, 916 bp, Cannabis sativa
gctctatccgcacagccccaagtttaacctgtgcatcctcgacatcctttttggccaagtccacttccgttcgcattgtgttggaaatggcaaggtttttagcagtagtcgacttagctcgggaataggcctatgccatcttcaaaccagtctatgcggaaaaaaaaagcattaaaatctgaactagtcaaagaggaataaaagaaaaacatcagaaaagacttacccgtgaaagctcttttaacactcctcccataaccagctccaaagacaagtcattatccgccccaaccaactgttcgttcacctctgggaccgattggctcacatagtggttgagcatgtctctgcctcttttggtctccgtgtgcaaaaccaaaggtggggcgggagccttaacttgttcagacccacttctgatcagctcggatccaccctttgcctgctcaggttcgtgcaaactccctcctcgggaacctttggacttagtaactttcgaggtaagatggtccacagcattttgttcttcataaaaatcaatgacctcaccagctggtgctttctctttggacgaagtctcaccgcccttggacttctttgccagaggggataagcctgagcttcccccactctcttctttagtgcctcgatcatcttctaagacatttctgcacggaataaaaacaatatagttagaagaaggtataaaatatacgaaggcatgaaatcaagaaaaataaatgcatgatgaagtactctacacgctagcaggagcatctgcccgaacaagcacagatggggcatcatcatccaaaaagtcttcttcctcctccaggacggcttttccctttccctctacaagggttgatgattaggtagattaggctctctaatccgaatagtatgtttgatgggc

SEQ ID NO: 105884 - DNA, 3068 bp, Cannabis sativa
attaaattatatgggacccgatacctagttgaaccaataacgatattgacatgtaggagggtgttagcaccagtgccctttaacatttatcttattaaatatatgcttaaagtattaattaattaatgttaacttaagaatgtggaaaccttaaccgattaattatgggatatacttttgtttgtcccctttcactttgaacaaccatcattcaaatttatttgatagaccatatacatatataatagttatagtcccacatgttacaaataagtaatttttatcctagagacatattttaaataggaatatagttaaaccacacattacccatatatagaatttttttaaaaaaaaatgttatatacagtaagttattcaaattattttatcacttttgaaagaaaacacatgtatataatttcaacaattaaataatatgatattcttgaagcatactgtaatgaactacagatttatagcttttagctattaaaaaattggtaacaaattaaatgatgtagatttggtagtaagttggtagttgaatcatggtcgctaaaattatttttactaaaatttcggtagttgttgctatttttttgtacatcaatcttttagtagcaaaacatatttattttaataacaaaactattaaattgtaatattcaataaaactattttacagcatttataattagtaacatatatattaataatactattgaattattttatttccttatatatatgtaatgtgattaatttcttaaaagaatgatgtgatatttttgttgtttgaaagatgtttttttagtttgtttttggatactttgatatatttttttgtgataaatttattaatataattaaaataatattaaaaaattaataattggtataaattgtcaaatagtatcaaaatatttgagttaaatactaattagttagcagtaaaagtatatattttaaaatataagtttaatgttggatttcaatgaaacataataaaaataaagtagaattaatattaataaaatatctattggtatcaaaaataattatttttcccatcctattgttttgaactgttatttaagtttgtgaagataaatattgttttttttaatgtgtgtgagcaagtagccaaattattcaaccaaatgtataatataagactaatagtgaccattcatttcaaaaaaaaaaactaatagtgaccaaatttggctaataatggaaaaatttataaaagaaattcatataaaaaattaggtgagtataattatttaaagaaagttgttatcattgtaactatacttattatataaattaaattagttatttttaataattattattgtattttaagtatattatttttttctctaataaattagaaattatgtgtagatgtgtaaacttctcaaaattagctcgtggcccaaagttatgggccgttgaaagagaatttgttggcccaacacaacagcttcgtcttcttcttcttcaatggctgacagccattaacatattatccatcttcaacagttacaaaaagcttcataatttgaccataaacaaaatcgaaacgcagaaaaaacaatgatgaacattcgtttaaacccaaagtttcccatgtccacttctatcttcaactccaaacccaacaaaactcttccatcaaaactcaagagcacgttaagcagtgaaaacaacccaactgagcaatcatcatcatcttcttcttcagctggaaaaattaaacgcttggttctctcacaagaagaaagaaccaaaatcaatccatattcagacagggatttctacgcttacccgcggtttgtgacccacgtggatgatgggtttatctccactttaactgacctctacagagaaaggttaaaacctgaatttgagattcttgatctgatgagctcatgggttagccatttaccgaaagaggttaagtacaagagagttgtgggtcatgggctcaatgcagaagagctttctaagaatccccaacttgattatttctttgttaaggatttgaatgaggatcagaaatttgaaatggaggattccagttttgatgcagtgttgtgtactgttagtgttcagtatttgcagcagcctgagaaggttagatgtttgattttttgtttcactcaattttttcatttgcttaacacaaaatatgcatagtgtggattataataacatcattacttctgttgggatattgtaaaattacctaaaataaccttgttgtattggcctatacatgttagaccagcaaaaaaatgacactaaactaatgattgaacacatgacaattatgactagcaagaaaaacaagatatgttgtgtaagtgtaaccaaaactcgtgtcgttgcgctatagcgcgcaacaccaaatttttctgcttcaacctttctcagtaaatcatgtataacttttgcattcagaatctaaatgagatgatttaacatgttttgaaaagctcagaacgagctatatcattttgagtttcatacgctcttcgaaaaaataatgaaattattataaaaaatgggctcaaagatctcagtccatcacaaaatgtcttttcagcacaaacctacacatttggagaaaacacatcaaatctaaacaaaaataaatactaatccatctattaattgactaagaatgagtgtacaaatatgtactcattagttacaaataatcattgtttgtcattgactaaactcactgttatatatgtatatattaggtgtttgcagaggtgtttcgagtgctaaagccaggaggggttttcattgtgagcttcagcaatagaatgttctatgagaaagcagtaagtgcatggagagatgggatagagtacagtagggtacagctagttaagcaatactttcaatctgtggaaggatttactgaagctgaagtgattaagaaaacaccaggtgcttctgcacctgctgaagctgcccaaggagataataaattaccatttggctggtctctggggttactcggtttggctgccccttcttcagac

SEQ ID NO: 105885 - DNA, 1882 bp, Cannabis sativa
  modified_base (324)..(324): a, c, t, g, unknown or other
  modified_base (405)..(405): a, c, t, g, unknown or other
tttacgtatttttttttatatttttaagctaatattgaaatttaagtgtgtaattggatatccaattaaaaaacgatccaatccaataagtaattggactgaattggattacattttgaggtctaattggattggatcggatgattattttccaaattcaattactaattggattggatcggatgatgatttttcaaatccaattattaattggattggatcggatgagaaaaaaggttgaattggatcagatgcccactcctatttggtattatattttttttgtataaataattttttataggaattttttcatttttacantttaaaacagttttttttttgcatttttactaaattctacctagaaactcctattgcaactagtactgcaacctaaattgnaacaaaaaatcgtataaaaactcctattacaactagcgctgcaaccactttagaaacctaaatcataaatttaaaaaaaaaataaaaaaaatagtatatgcttttttatattattattgctacgtggcaattgatgtgctcaataccattcacattgacatctaagcaagggtgggtcagatttgggatgatgtcggtgggatatgggttgtgctccttcaaaatatcttcatctcggctccaatggtgaaacaacatcaacatggtgcctagtgtgtgggtaggttctaacacaatctcttcttcttcttcttctactccttttctttgttggctttgtgtttttcttgcaggaagcaccggtttgcgtctcgagtgtggctgagaggacaactagatgagcgctgagagaattgtgaggctcctgtgattggttctcaatggttttcgacgaatgtagtagcttcagatctacacacagatgcatgtctaaactttagaaaatggattggctggttctcaatatgagaagtttttttttttaattattattttctgttaaaaatctgtttatggttgaaaaatgggtttgataaatttaagtttatggctgaaatttaagttaatgattgttgtaatttttttttttaaggttttatcttttaattttagcagaccccgatttggtagttggatggatgtgatggtggtctaagaaaaaagatgaagaagaacaaagtgatgaaaaaaatttgagaaagaaaaatctgaaaaaaagaaagaacagaaaagaaaaaaagaaactattaatttttttttattttataataattttttttttatatttttaaataataatattgtgtaccaatatagatatgctatgtatacaaaaattgtacgcatgagcagtttatgttggcatttgagtgtttatttggatgacaccttaaaaatacaaacggaatcatagtttagaggattttaccatcaaatctcgagcttagaagtttaaatgtaagtgaaatgataattaagagggtttagccgctaaaaactctttctcaaatacacaaaaacaataaaaaaaattacaaaaatacagcggaattttaaatatttttacggttttatttacagaaaatacgacattttgatgtatttttatgttatacttttgttaatttattattgattttttattatttgtatgttattttttgttatttgtacgttattttttgttattgttttgatattgttttccagttatttttatgtatttttcttgttgttttagtattattttttaagaacactataaaaatatataaaaaaaaaaaatctataaactaaaacatttacaaaaaaaaatggggacttataagaatctactagcttttgaacgtgcgttgcacgtgtaacatatattattaaaaatcgtatttaactttggattatatttttttgactaaat

SEQ ID NO: 105886 - DNA, 576 bp, Cannabis sativa
actgccacgaacagtaaaactgttatactttttcctacattaactaacgtaaacagtaattaattgtacttttttattttttaattaaaaaaacaactgtacaaccagttaacaaacctaaaataaccagttgccaactaaattaaataattaaaaaaaataaactattctaacgtgagacctacctgccgtacaacggattccaatccgtgattcacacttctgggcacaaaatcgttcgcctataaaagtaagtaagaaacatctatctaagcatgcatatcaactatcctactgcgttcactgccaatggcctaaacaagaggtgaaacctgccatcaaatacggctgagatgtcatttcaattatcaattatttcacttaataatgtactcagagcaatatatttcaaggattttgggcttcatctggagaaagaatacaaatacaagagagaagatactttgttggggtaagacctagggctgaacattttgagcgggtttgacccgaacccgagcaacccgcccgaacccgaactggtgaacccgcaaaaaaaaaaaattaaaaagtttc

SEQ ID NO: 105887 - DNA, 532 bp, Cannabis sativa
ggtttggtccaagccctgggtccatattcgattccaaatctcgggtcccacactggttccatttctggtgccgtgtcacgagctgggtcctaggttcaagtttgtttcttggtccggtactagctccgggtcctagttctgtttcccaggtccctatccttattttggctctaggtgctgattattgtgtgggtttaggtcctggtctaggttcgggttcgagtcctagtctcggttcgattttaggtctctgtctgggttttgatctgggttttggtttgggtttaggtccttgtcctggtcctagtccttgttcggtgatagttccatttgcgattctgagttcaagtttgggtttgagttcgggttggagttcgagtcctggtgtgagtttgggttcaggaccgaattttagtctaggtccagatcaggctgtgggtgtgggttcgcgtcctgggtcctggtctaggctgtgtccaagtcccaagttccaatcccgatctgagtcctgattcagttctgggtctaagtc

SEQ ID NO: 105888 - DNA, 568 bp, Cannabis sativa
  modified_base (250)..(251): a, c, t, g, unknown or other
atttgacgagcatgtcatccacatatacttccaaattctgtctgatatggtctttaaacattttacttaccgatctttggtatgtagctccgacattcttcagaccaaatggcatgagtttataacagtacaaacccatatctgtttggaaacttgtatgttcttagactggtggatgcatcttgatttgattgtaccctgaataggcgtccatgaagcttagtatctcgtgtcttgctgttgcatccannagttgatctattcttggaagtggaaagcagtccttggggcacgccttattcaggtcggcaaagtcgatacatactcgccattttttatttggcttaggcactagtacaggattagcaacccagaccgggtagaaagcttcaattatgaagttgttgttgcgcaacttttctacctcttattttaaggctagggctcgttctttatctgacagtcttcttttttgttgaacgggccaaaaattaggatcaatattcatggcgtgtgaaattatagaaggatcaattccgaccatatcctcatgtgaccatgcaaaaat

SEQ ID NO: 105889 - DNA, 641 bp, Cannabis sativa
agtttggggaagacgatggcccgatggggtccgatgggcaccccgatggggtccgatgcttgcgagttgggggaaaaaaattgggttggggtccgatggggttgggttggggtccgatgtgggggtccgatggggggtccaatggggtccgacgggtccgatggggggtctgatgcatgcgggttgggaaaaaatggggctgagttatgagaggggtatttttgggttttagataaaagtgtcatatattttttagtttgaaatgtattggtttaagaataaaatattaaagtttttaaagtataatttttcaaatttcccaaaatattttctatattgtacatatattttaaaagaaatacaactaaatatataaaaatgataatctaaataagtgtatatttttcatactttgtgtttttcctaaaaaatacggaataaagtaaagccacataatagaaacaatatagcatacattttcagacacgtttttagatttgtagtataagttgctttaaaattaaaaggaattctgtaatataaattagaaaaaattgtgagtgacacatatacttttacttaaaatggagattttttagttagtcaaactttgtaagttattttatatatcatgttgttat

SEQ ID NO: 105890 - DNA, 653 bp, Cannabis sativa
atcacgtaatacgcctatgctagttagggtgttacacctggtctgtctttgtgatatccgtggtgcatcttgagactgattttggttgtctgcaccaggagcttctgcagcaggtatttcttcagttggttttattgccggtgcatcagttggtgggattatttgctcctccattcctcttccatctatatcatgcatcgaggtagctgaatctgtgtccttggggatatctcataaacacacaagttcgtgctctttgagaaaatgtagttctatgagcagttaaggttgatgcaaaagtaagacagccaaaagattgaaggtgatcataatttggttgtttcttgaaaagcaactcttatggggttttatttttaaggagaagagtaggggttctattgattaaataagtggcagtaagtatgaattcagactaaaattttataggtaatttggcttggaaatataaagcacgtgcagcattcaataagcgttgatgtttcctttcggcaatggcattttgtttaggtgtctcgacacaagtaaattcatgcatgatgccatatttagaaaaaagatctttaaaaaccaattcgggagcattatctgacctaaaaattttgaacatgtcattaaattgagtttgaacatat

SEQ ID NO: 105891 - DNA, 706 bp, Cannabis sativa
aaatcataaaatttagaatatgtctaatgttatacaacacatataaaaatcaagtccaataatcaagttgagtctctacctctctcaagtcgttatactttgtccaaagacgatcttaaactctcaagtcccgagctccaattgtttagtccaatcttagatattactctcacctataccatcaaatggataaataattattatcattgcattctacattcaaaatcgagtccaacgacatatcatatgactatatttaaattttggggttctgaagcctcacctaagcggtgcacattaactatcgatggcagtaaaaatcagtgtaccagaaatgtcgccaaaaataggggtagtatatatctaaacaaccacatcgacaagtagatcacactgatgccaactgtttgtcaaaacggtacacaatatcgccggaaattcgtcagaaaggggcggagctacaaaaatgtcaccggaaaaagtagtgagttaggcaaaatagcttagtgtaggttgttctcctcgacgagttgagtctagtggtgaagacaacctttcaaacggacaccggaggtggccagaaaattcgttcaaagtttgaaccgccaaactttgacttgcgatcgtgagctaacggcggcgaaagggtagcttggggggtgaggtcactggcacttggggttttgtgggtttcctttggttatgg

SEQ ID NO: 105892 - DNA, 841 bp, Cannabis sativa
ggccaagccttggcagatttcttgatagaaggaatacctccaaaggaaaatctgcttgttgagcgagacacggatacttggagattatttatggatggcgcatccaacaagcagggcttaggtgtaggggtgatattaatttcgctagaaggctttaagtttcattatgccttgagatttcaattcgacgcgtcaaacaatgaggctgagtatgaagccttgatcggttgtttgaggatagctaaagcgttgaaggtcaaaaatctcatatgtcacagtgattcacaactgatagtaaattaggttctcggggaatatcaggctaagggactgaaaatggccaagtatatagagaaagtttagaagaacttggaaaagttttattatttcaaaatcgagaaaatcccaagagaacaaaaatctaacgtcgttgccttagtaaaactggcctcgcagaatgacttggatgagctaaacttggttctggtggaaatgttaaacgagccaagtatttgcgaaaaggaagatgtcaagatgatagatagctcacccacgtggatgactcccataattaactgtctactcaacggacaacttccaactgacaaaaaggaagcacaaaaactcctatattcaatgcctcgctacacaataatagatggcaagttgtatagaaggggctattcaatgcctttccttcggtgtgttcttcctgcagaagcaaatgagatcatcagagaaattcatgaaggtttttgcggagatcatgctggttggcaaagtctatcaaaaaagatcattagacagggatattattggccaaccataaacaaggacaccc

SEQ ID NO: 105893 - DNA, 851 bp, Cannabis sativa
  modified_base (352)..(354): a, c, t, g, unknown or other
atccaatgatcgcgagtcgtgaaagtgttctgcccattaccaatttttgaaattaaacctttgtgcaacaactcttttccccagcaaatgctacgccatacaaaggagggacagtgcccagtcgagctatccagaaaggatgagtgaggaaaatacctagcagacaaaatttttgacaccgttgagtttggctgtttgaggattcgccaggcttgcttagcgagtaaggcttggttgaaatgtatcagggaacgaaagcctaagccaccttcctttttggatcgacagagttttttccaactttgccagtgagttttggggcggttattatcattgacaccccaccagaaannngccataacagattcgagagaatgacaggtggccaccggaagacggaagcacgccatcgagtaagtgggaatggcctggatgacagatttaagcagagtttcctttcctccttttgaaaaaactttattcttccaattatggagatgaccccagaccttgtcatgcagataatggaacagttgctttttcgttcgcccaatgtgctgaggaaggcccaggtatttttcgaaggaagaccgcaccgggatacccataaaatcgtatatcaaagtttgatccctgagctcaacatttggggagaaatacagagaggattttttgaaattaacctgctgtcccgtggccctcccataggcctcaagcacctctttgatgatattgcaggaactaatggtggcttgataaaaaaggaaactgtcatccgcaaataggaggtgagagatagcaggggctcttctagctactttaaagcctaaaagagctctccttctttcttg

SEQ ID NO: 105894 - DNA, 2859 bp, Cannabis sativa
taacttagaatataaaaacttgcagaaaagataaaaaaacttcttaaaatttcaaatattgaatttcattataataatcaatagtataatattaggttataccccctatacttagtacatttattgaaataaattgactaagtataaatacatgcgagtactattgatagtaatactttaagctttcgccattccaagctcttttgatcattgcaccatcaaggttggataatcggtaagttgcattacctattttttagggattaagtacggtccttgccagttattgccaaaaactccatgtgctgagttatgcatgttaggcataaccttacacatcaccaaatctcctactcgcaggtttcattctttgatctttgagttgaaatagcgagctattcgttgttgataggttgcatttgtcaaatgagtctgatcgcgtttatcttccagaagatcgagttgtaacagttgattttttgtattattgttgatgttgaagacatctctcctcaaagatcctgatccaactttaactggtaccatggcttcgcacccataagaatgtgaaaagggggtttcaccaatcgttgagcgaggagttgtattatatgaccatagaacttgtggaagttcttctggccatgtaccctttctttcttcgagcttacctttgagggtatgcttaatgatcttgttaactgcttctgtttatcaattactttgagggtatgcgactgctgaaaaagctttctgaatccccaagtcatcgcatagttggtgcatctccttacaatccaattgcttacaattattagaaattaatttgtaagggattccaaacctgtagatgatggcgctatagataaactctcgcaatttagaggctgttatggtcgctagaggtttagcttcagcctattttgtgaagtaatcgacgctaaatacaacatattttactcctccttttccttttggtagttcaccaattaagtctatgccccagactgcaaatggccagagactagtgacataagttaattggttcggtggcctatttacataggttgctattcgttgacacttgttgcatcttttggcaaagctagctgcatttgcgcggaatgttggccagtaatatccttacctcatgatttttagggcaagggaattaccaccagcatggttaccgcagattccaccgtgtacttcccaaagtatgtaattgcattcagtcccatcgatacacttcagtaatagctgactaaaacttgtacgatagtgcttgtcatcataaatgacataccgagcggctcgatatcggagttttttggcttcagttttattgccaggaagctctcctattttcaagtagtcaattatcggggtcatccaggtgacctttctgactgtatcaacctccatcatcacatctcgattgatagttggatgagtcaatacatctacaggaattacgtcaagtaattttgcttctcttgttgaggccagtcgagccaaagcatctgcatgagaattgtaagcacgaggtattctactaacaagtatctttttaaacttttgtaataactcacaagtataagaaagatatttggctaaacatcctcctctggccaggtactctccattgacattctatgatttgcgagtcgctgaatgcttaaaggtactcgactttcatctcaagagtgagcttcaatcctgcgattaaagcctcatattcggctttgttgttagatgcaagaaactaaaatctaaaggcagcatgtaccttgaatttattgggacttatgagaattattccaccccgatccttctttattggatgtcccatcaacattcaaagtccacccttcgcctgttgatacttcagggtcaactcgctcttctgtgattatggctacctcgtcatttggcaacttgagtatgaaatcagcaagggcctgtcccttaattgccgatcttggcttgtacctaatgtcgaactggctcagttctactgaccatttgagtaatcttcctaattgctagccacactttgctctgcttgtaattttggaacggaatcgattggcatgtgaggtaaaggtactacaggagacctttgttatttcaacatttgaatttcctcgtcatgtcgttgaattatagcatccatctctacgattctctgctccaaatctcacagagtctgtggcagataatcatcacttttgccaaaaatcctccaatggccttcacctcggttataggattaatttatactccattctttccaaccgttactagccctgaccacattattctgactctccatataacaccaagtgtccattctatgggacaagcatgccaatcagtaagtcagtctggtcaggcaacaaccgaatttgcatacttactaccgcacttatggattttaggacaatgcattcagataaataattataaactattacacattctaacatgcttggttaattataataattactttacaaataaatgcatactgaatcgtgaatcaagcctttctctgataatgattgtacatgtcttggcgatcctcagtagacaacctggaaactctaataccaaaattataataccctaatacttaggcacactacagtgatttgctaattaacgggcctcctttgttaatcaaaggtgttttcttgaaaagtgtgtcaaattgaaactttgggtgaagttaataacctttataagtataaatatgtttatatatttacacaattccgaatcccatgcttaaacctttacaaactttttgaaaatattttagaacttgttgcacaacgacaacaaaatatagcccca

SEQ ID NO: 105895 - DNA, 908 bp, Cannabis sativa
  modified_base (148)..(154): a, c, t, g, unknown or other
atttaaaataaacaaccatattcaaaacatattaaacaagaacgattttaatttttattcctattaaaatactgttacaattacaattcattatcctcatcattagttacctatacaacattatcatcactgtcactctctaattctnnnnnnntgtcttcttcggtatttagacccttggtgtcatcatcgacaatgaaatcatctaattcttgaagttgtgaattcgcataatggatgtttgcaacttcagttgggtccacatcatggcgaacatagtcaacatcatccaactgtggaagttgaacagcgagctcggtttcagcttaattgttttcctgtataaagggtgtctccccatcagtgtccgggaagtcccaaacatttcgtgggatgtactcatttacaatcagccagtctttaccgttcttcaaatcaggaatgtaatacatcaattttgcttgagatgcaagtatgaacggttcattttggtacaactctcggttaacgtaaatgctagtaatagcaccgtcactatccattctactcccattagtgtcaaaccacttacacaaaaataagagaacactgcattcttttaaataactgaacaccataattttttaaagtgtgccataaaaatcattagagcataagtaggaaaatcatttattgtccacaacactgccgcacgcattgaaaaatagagttccgttgtaggcatcttgggcttcaacactcgtctcccacaactgtttcagttcatcaattaacggtctcatgaatacatctatgtctttcccaagagaagatagacctggaatcaataaggcgaacaacaacgattcagaactcatacactttcacggtggcaaattatatgagacacaaataactggccataggct

SEQ ID NO: 105896 - DNA, 638 bp, Cannabis sativa
  modified_base (42)..(42): a, c, t, g, unknown or other
  modified_base (400)..(403): a, c, t, g, unknown or other
  modified_base (568)..(600): a, c, t, g, unknown or other
ttggttaccaccgtcttactcattatgattgagtacttgacntgctatgtgtgggcatgacactttatcactaagggttcgaatatggtgatgaataatgaaggaggtgaatcattattgaaggaactctctcatctactagttgtcagagaatgacaactaggtttaagtttggctgaagtgaatagttggatgagatgagagcatcatgttctttatatagtgtttcaactagggcttagggctgaattatatggattaaaaaggaatagaatattgggaaaaaaatcaacactagggccgaacattaataggaccattcagtagttacaaatttcccactttatttcaaccacttattcttctttcagtaataccgtattttccaattcaatcctannnntgtcaaaactatttatttaataactataattaattatcaaataaaattatcatttatgttatttattaattagaccattcaaagtctcttaattaataaattaatcccaaaatctcttttcttcacaataaagcccttagtttgtgaaaattcataaataagacnnnnnnnnnnnnnnnnnnnnnnnnnnnnnnnnnaaaatcaattaactgagtctgtaagcagtattatctca

SEQ ID NO: 105897 - DNA, 1323 bp, Cannabis sativa
tccgatggatccgatgggtggtccgatggtcacctgatgctattttttttttatgtataaaacatataaaaaaaaattggtagcagatatggtccaattggtggtccgatgggtggccgatgggtggcccaatggtgtaaatgaggggtattttagggatatcataaaagttgtcatatcctacaaatattagttattatttgtttaggagaaaaattttaaccaaatgtaagcataaaaaatcaaatttccccctcctaataggttattctagtagacatcttaaatattatttatttagacatttaacaaagttttttagtttaatgttttattataattgtgtacattgtagttatttacaattatttataaattttttaaaattttcgaataatttatagtgccgaaaataatattcaaatattttattacacgcgtgattattttttcttatatgtatggtaagtcattgtttgaatcttattttcatcattataaattatttataatattttaataatttacaggtggtcgtacaaagccataagaaaaactagactaaaaatctcttcttaatatcgaaacagatataaaatttatcaaaatgtcatttggattgtacctatagacttaccctaaaaaataaatttcttttaaaaaaaaaaatcaataaaagaaaaatatctaatacaccttcctaaaagagtgtttatgtaaaccacaaatttgttttgacatttaggaagtttttataattttttttaatgattttgtacggtgtaattatttaggactacctataaatttttaatacatgaaaaatatttaatacaccctcctaaaagagtaattttgtaggcgacgtatctaacatttatgaaagttttttaatctttttttaataatcgtgtacgttttagttatttaggagtacttgtaaattttcaaaaaaattgaattatttataatgctaaaaataaaatttaaacaattgtttatcatacgtataagaaaaaaatgattatgtgtgcaataaattatttaagggactttttcatttatatttttataaatgattttttatttatttttgaaaatagaaataacataatattgaaatggaaacaacttttataaaatagaaacatcataactttgaatttaaaacaacataaactcaaaatagaaaaagcttgtataaaaatgaaaaaaaaaatatataaaaaaaacataaaagtgaaaatatatatattgtatacatggtaattccttaatatttaaatctcatttttagtattgttgtaaactatttaaattttt

SEQ ID NO: 105898 - DNA, 649 bp, Cannabis sativa
  modified_base (77)..(88): a, c, t, g, unknown or other
aattaatttaacataattttcttatttaattaaaattctaagaaaatgtcaaatatttaagcgtcttgaataaaatnnnnnnnnnnnntaattttctatttaattaaaatataactagaaaaataccacaagtatacagaaaataactatctagacatttcattaactaattccttattttctaattataatatattttagtctatttattttaataaataattaatgaaaaatttacttgatctaaaattatttaaaataattaattttcaactttaatctatgtttgaaaaaaaaaaatcgaaatatctgcattaaatataatgcatttcgaaattagtggaaaaataattaataaaataaaataaaatatattttgaaagttattctaatttaagttttactgaaatttaaattttcaacttaaatataattttctatctaattaaatatcctaaaaataactaatatttaagtgtctagaataaaatcaacttaaatattaattttctatttaactaaatatattaaatataagaaacaaataattaagtatctagaataaaatcaacatgattattaattctaatttaatattttcttatattacttgatcatgtaattttattgtccataatatgacaaagtg

SEQ ID NO: 105899 - DNA, 536 bp, Cannabis sativa
  modified_base (163)..(178): a, c, t, g, unknown or other
tctactattatctattaataagcaaagtttaaaaaaataataaataacaaaaatctatgaagaaaaggaagaatagcaacacaaaaaataatgggattatttcacaaatacacaaaaacaataaataattacaaaaatatggtttcacggaattttaaatatnnnnnnnnnnnnnnnnattttatttacaaaaaatactgtctttttatgttgtactcttattaattttttattttctatatgttattttttgttgtattttaatgttattttatgtagttttcttgttgtttttgtattgcttctatggaaaaccgtaaaaatgtaaaaaaaaattctttaaacgtaaatttgtaatttttttacaaaaaaaagtgtcttatgtaattatcctagaaataattaggataaattaaggaatacctccttttgtattcattaatcaaaaataccctcatattgtattttattaaaatctacccacttttgtgagtgagttgcctaatatacccttacctttcacttaaatctagcat

SEQ ID NO: 105900 - DNA, 559 bp, Cannabis sativa
tccacctagtgcatactataaggtgtcctcatggtaacagggtaccatacctcgaagtatatatatcacatggtttatggaaactttcaattactctacttgacacgtaggaatgagtagcactagagtcaaacaatacagaataagaagaaccatttatagataactgacttgtcaccactgacggactagtaactgcgttagcctgagtcatggtaaaaagtcgtcctgggttctgagtagtactcttcttaggctcctccttcttggcctgaggacaatctctgatgaagtggcccaccatgccacactagaaacaagtcttggcccgatattcaccctgatggtgtttcttgcatttcggacactcaagataagatcggaatgaagatccgcggccctgacggctacctctatttcctcgaaactatctggtaccccctaatattccggaagcattaaccttccgtttatgatcagggttatcaccgtcggtccccttactgacattaccattagcaggaggattcgatgccatggcggcatcctttgcagtctg

SEQ ID NO: 105901 - DNA, 672 bp, Cannabis sativa
aagaatttggaacttttatctccatccttaagccagtcaattctcgccctttgtttccagtaaacagctttcctggttcttgcttcattcaggttccgacgaatttcacattctaagttccaatctctagagccagcaggcaacgactgaactctatcaagttttgtctccaaatcttttataacctcatcaattttcccaaactgcgatctcttccactgaaggagcgccactctagtagcaccaatcttcttaaaaacacgggcggggggccacagatggtgcaccgaatcccaagcattgacaacaacaagcttacttctaccatccctcgtccagttttcctcaaatttgaaacactttttgaacttggacgctatccctaccgtatcaagagacaacggcctatggtcagaagtactcgtctgaagcgaacagagaatcgctttgggaaacaggtgaagccaggcttcattcataatgcctttatccagggccgacttcacgtggctgtctcccgaacggtgattgtcccaggtcatcatgtccccttggatacgcatattgattagaccacgggactccaccaggttagagataaaagggataaaggggtctctacccgacgagccctccctctcagagggatcaaggacaaaattagtatcccct

SEQ ID NO: 105902 - DNA, 676 bp, Cannabis sativa
ggtctgaaaaaactattaaaaatcttattatgtacctcaacctgatattgaaatgaacaaagactcactgaaagtaaatgaaaagagcaagcctgaaagttcacattccaaagactcggttgaagaatcgagtcaaactttgttgttcattccaaaagctccattcccacaaagattgatcccgattaaaagagttaatcagtatggtgacatcttagaggtattgaaacaagtataaatatccctttcttagatgccattaagcaaatacttgcctactctaaattcttgaaagacttgtgtactgcaaaaagaaacaccaatgttccggaaaaggcatttttaatgaaacaagttagctcaataattcaatataaaattcttgttaaacacaaagatctagggtgtcccacaattccatatattattggtgatcatgtgattaacaaagctttacttgatttaggagctagtgtgaatttgttgccttattccgtgtataagcaacttggtctaggggaactgaaaccaacaactatgatacttcagttagctaatcgttctgtgaaaatttctaaacgtgccatagaagatgttttgataaaggtagataaattttatgttgaccaaaagtcattcactcatttattttgatgataaacaaatatttgattat

SEQ ID NO: 105903 - DNA, 595 bp, Cannabis sativa
ccccaatacactttgtttactctatgagaccgagggaatggcttttggcagggagttattttgtattctggtcttttagtaatttttccctatttttgtattagtgattgttttaagttaaggggctgagttgtctttttgtactatgactgaaccctataaatataggggtgaggtattcatttcaactagcttggaattagaaaagagtagactctttgtggagagcactcctctcaaaagattgggaatttggaaagacgagcatctcgaaagctcgatattgtaactttgtaattgcttttcagaataaagatcacttgaggaattcattactggtgtttattttgggaaatattcgataggatatttctactcttaagattattctattacgatcttccaaatatacttgtaaatggtctaaagattttttttttcttttttggttttgaagactttatgttagtcttcttgtgtatattatgctctaagtttgccttggattttataaatagcctattttgaaatccttttcagaagatgtatgtgttgtgcctttattgtcttcaattctaagcaagcaagtatgctt

SEQ ID NO: 105904 - DNA, 542 bp, Cannabis sativa
aaataaataatatatcatacaatttagttatataaaaataataatttaatatatatagcatgctaataaaattatatacctacattaaaatacttgtattatattaacaaaattaagtttaactattatacatcgcaaaataaaaaattaatatcatctatgaataataatataccatacaaaaagataaaaatatactgtacaataaaatatatataccaacaacccataaaaaaattaaaaaaattgacataagtttcactactacaaaaatgggttttctcagcgtttttaaatagtcgtttaaagtgttcccgtcggtttctataactgtcgcctatacgactgtcgtaaaacgggaataataggcaacggttcaaaatcgtcgctaatgtgagtttcccaacgattttataactgtcacctattaactgggtattggcaacggtttataaccgtcgcctatactctgttgtaggcgacgattttaaaccgtcaggaataaaaaaaaaaagaataaaaaatacagatttttctgccat

SEQ ID NO: 105905 - DNA, 997 bp, Cannabis sativa
ttggtttaacaagttttatttttttctcaattaaattaacattaaacaataagtttcaaaaattttaaaataataaataaataaaaatactggccaagtggttgaactaaatccctatttttctaattagttttgaatagagatatttttaaaaaaattaatctaacttcccaaaaatcatggtagaatgcaattacattattcattctcttcttctcttgttattgaatgcgaaactattttttttcaacaaaaaaaaacctcgttgaagtgtgtgacatatagaacccatagccatgcttttagataacttcaatagttaccttgttcaagcatattatcaatagccattacaaatctcaaatcaacttatctcttctatgtattatatctcctgaagctccattaatgcatatatttaaggtgagctattttccttcttattttcctagctttattaaaattgtatcaataatatgcaaaagaactactttcaccagaacacatatacttttagatagacgttttgtttgcttcatatttgcttctttggcctctcacaatcacgccgctatgatgattgtggaaccgatggcgataggcatccacaagagagaatttcatatttcatcattaatgtatgtattgggttttaaaaaattattgcacaattattcaaaagtggccttatcaaagtgcaaggtaactagatatttgatgtaatacaccaatattcaagtagagtagaaatttttatatgtgaaaattacatgaaatatgagaatttttttttaaaaaaaaaagttacagaaatatagtatttttaagtttgtcactcttctatggtattttttcacatttaaatttttttatggtattttatatgccatatttttgtaaaccaaatatctaaactcatatttcatgtttttgttttttgcttaattaattttatttttgagattatttcacaaatacataaaaacaacaaaaaatt

SEQ ID NO: 105906 - DNA, 648 bp, Cannabis sativa
  modified_base (490)..(492): a, c, t, g, unknown or other
aaataataataaaaacaatgggtatgtcactatgtctacactctacaggacacctcataaaggtattttagtagagtccctatcaatttgggcatattaaaaagctttttagttaatttttttcacaattgcgtaaattatatagttatatagaactatttgtaattttttaaaattttttttgagtagtttacaatgtggaaagaaaaatttatgtatttttgttgcatgcgtataattatttttttttatacacgtagtaactgtttaaatttaatttttcggcatggtaaattatttaaatttttttaaaattttacaagcaatcttaaatagttacaacatacgtgatgattgaaaaaaaattaatttttttcttctaaataccaaaacaaatgatatctaccaaaatgatccacatgaggtctactaaaaaaatttaaaaagtaaattgtatttacggagcaagtatatatatataaatatatannnatatatatatatttatataatgtggtgttactttatttttttttgtgaggacaaaacaaaattatagtgataacaactataaaatgccatacaatcctataaatttaggctatatattttaggctaattaggaatttttctccctgaactttgaca

SEQ ID NO: 105907 - DNA, 676 bp, Cannabis sativa
ggttgcaagatggggatatgaattctgccttatttcatgcttgcattaagcatagaatgagacaaaatcatatcctatctatagaaaaccagcagggctgcccagttactaacccttctcttatctcagatgcattccttgatttttataaaaacctgctgggtactgcaagatcgaacaggaagaagattgagaaggctatcattagcaaggggcctttggttagttcggagcaagcagcttgtcttttaaaggagttcactgaagatgatatcaaaagggctgtctttagtattcctgggaataaatccccaggacctgatggtttctccagtagcttttaccaagacaactgggagatcattgggaatgaggtttgtggggctgtgaaatcttttttggaatctggtaacattttgaaggaaattaactctactataataaccttggtacctaaaagtaaatgtcctaattctgtcaaagattttaggccaatagcttgttgcaatgtgatctacaagattgccactaagttattgagctctagaatcaatgatattctcccttcaataatatcacaagctcagggtggttttattaaagggcgattcataggacataatatcttgatttgtcaagatttggtgaggcattatggtagaaaagcggtcaagcc

SEQ ID NO: 105908 - DNA, 589 bp, Cannabis sativa
tataactaaagaaacaacatttcaagtactagcatacccagtagccctgacacgtccaggatgctctggtgtcccgagcgcttgcgtcagaatatcattttggcccttgacttgaatttttccttgagtaagctgctcctctaattgagcctaatgcacacatatatttaagcaattagtatatgaattatatatactaactcattagtagtactcaattaaggattaatatatacttactatcttctcgataattttcttgtcgtaatcagtgacaagttttgttctcttggtccgagatttgatccaaacacggtagcgtgggggatcctaaacgtcgaggtcctttttctacattattttataacaattaaatgagtacaaattatattttaaagcacattattagaattcattgattacctaccatatcttcccgtacgttcaccattccattccaaccacttcgatgtctggattagatctttgtcaaacattccctttgcaccttactcaatttctacaatgccaaaaaaatacattagatacatgtacttgtatttaagagtttatcttagtacaaatataa

SEQ ID NO: 105909 - DNA, 973 bp, Cannabis sativa
tccaaccatccgagtaacaatggactcatttttcgtgcgagcgtgtgcctcgtgcacacttccgtctctcgaacaactcctgtcgagtgatggttgcaagtatccatgagtgcatccatgcatcgaagctctctagccaagatactcgcactgtccataggttctcactatgataaggcaaatcccaacaccgatgctcacctagtcactcgtgaccaaggtagcatgtgtgacaagatgcttacactaagcggacatgctaatgcttctaatcatgccccattcgatactgtctaaatcgtttccctcattgaccaaggactcccatacgttcatggtccaatccttaaggcaccatgcctccacacatgttagcatgcccttgagacaagccaccaaactagtgcatatattagacctctatctctttccagcatggtgcatcagttgcatgtgcatatgcaaactagcccacgaaggactaccctggtcatctcatgttgagactcatagccaaggcacaccacaacatctttcagaggtttaggccacgtcccgtgcaagcggcataccgcaagccaatggaaacgtacccgctaacctctgtcagcattcttcaatgtactaccgggtcaacccgataatgtccatgagtattcaaaatcctggagacatatgagtcccctcatggtcctcatatgcctgcccactagccccactaactagtagtagctcacttaacaccaaggtgccatggtatggtggagagctgacactagatactccccatttaaagagcatcctaagcttttagccttctactaagaacatatatgatttttgccctgtacacatatggtcatcaccatataccaaatcacagagtttctcaaatctgattgcgtcattacattcttagacccaaataaatggcgaatgccaagtcccatcccaatccagataatattgaaga

SEQ ID NO: 105910 - DNA, 603 bp, Cannabis sativa
  modified_base (566)..(573): a, c, t, g, unknown or other
catgactcgttggtcatagagacccccatcgctaataaagtggtggccagagtcttgattgacaacggaagttccgtgaatctacttttcaaggaggcctttaatgcaataggcctgacagaccgagacctctcaccaagtgggtcccagctcacagggtttaacggaacgacacttatcccaatggggaaagtaagacttccagtcaccttgtgcccggacaccccccagagcacgttcaaatacttcactttcgtggtggtagactgcccgactgcgtacaacgcgatcctcggccgacaggccttggtagatttcggcgcagtcacatccatacagcacttgtgcttaaagtttccaacccaggaagctgggataggaacggtgagaggaaatcagggggaggcaaggcaatgttacaacgttgcaacctacctgcccgtgctgatggtccgggaaaccattgagccagaaatggctgaagaagatgaattggatccccacgtggggtccgagaaaattgtaaaaccaatggagggcgtcgaggagatatcagtgtgcgaccnnnnnnnnaccaaggtactccggctaggaaaaagccta

SEQ ID NO: 105911 - DNA, 570 bp, Cannabis sativa
aagtaatcaactgcgaccactgcatattgcacgccacctttgccattggtagctatccgatcaggttaattccccaaatggcgaaaggcaaaggacttttcatctgagtaaactcgttaggtggtgctcgaggtatcttcggatatgtctggcatttgttatattttttaacgtaggccttggaatcttcgatcattgttggcctgaattaaccttgccttagaattttcttagataaactttgcccggcagcgtggtttctgcaaaatccatcatgtaccttaaacataagtcgtgtagcttcttatagggtaacacatctgagtaaggcatggataatccttgtctatacataattccctctactatgatgtaccgtgcaaccttccttctcatcttctgagcctcatttcgattatttgggagttccccagtgataaggtaggttgcgattggagtcatccagtttggggatttataaatcatttcaatctcctccgtgccagtgatgctaggttcttcgagaaactgaataggaaccagattcggtttatcacttacattactact

SEQ ID NO: 105912 - DNA, 3219 bp, Cannabis sativa
tatgtattggattagactggatctatccaattcaagaaaaaaatagtaaaattttaatgttaatttttatgtatacatatatattttatgtataatattataaaatttaaatacccatccaaactaaatgaaatactaattagtttaattggatgttggatgtattggatttttagacactccatccaatatccgatccgatccaattggatattcaaaaataacatccaatctgatacaatcacaattggatatccaatgtttggcggtcggttgtgattggatcggtcggttgtcattggataattagatcaatttatgcacacccctcccaacaattttaaatttctctaaaatggtctgtaaatggccaaaaaaaccatctctatttttatgtagtgcaaactctcaatcttacatagaaatcccagactctctcacctttaagaattaaggtttgataaagtttacacagaaattacttttaaaaaaaaataacaatatggttcgacatataaaagaaagatattaatgttcaaaactaaagtctcttctccaatttatctgcacaaactagtggtaatttgaggttttgtcgagcagcgcccttgaaatcatacgtgcaagcatgtgcttcgggcaagcgatgatgaccacagtagagattgccacaacgacatgaaaacctcgtcaatccaactttcttattgcaatcattgcatctatttttcgtaatttttaaatctttaaattgatcagaaagagaattagtaatggcatcattctcattagtatcattaaaagtcagagtagtaatactagtagtatcactactcaagtggatgttagataaagatttacttattatttcttccataataaagtctttatagcacttagaacacatatttcgattctgagcccttccataaaatccacaccctttaacacaaagattcaatacatcacccatagtatcacctttgatttaatctcactcttcttctttaatgattgattaattaatctcttcactaagcttacttatagaggtttttgagctaatctagtttgactaggattataaataggtagggaataatttgacttgaattaagattataagatattactaaaatcaagtgcataatatattattgcataaaggcataaatttaataatttaaataattattatataaattttgtactatatagtatcatatattagatatgacttcaaaattttagtttaattttactgatattttagtaaaatttgactaattttggcagaatttaattttataagagaataaattaaaataaaaaaatcttagatatatgaatagattttggagaccagattgtacggaatgcagttccaagtgctttccaaattggtcccgcgtgattagctggctttagatcgtggaccccacttaaggtagttgagtatggggtccactactctaacaaactacgtcagtgccttctcccatcaccgacccgtcatcttatcaaactcgttcttaacgccgtttcttgccgtgaaagcttttactcttgcgagatccttccgccgttaacgtcggcgaaaaccgttattgagagtttgttgcatgcatcaatctatgtgtattgtactttttccttctcgtccagaatcttcgaaatattgtatttgttgtgtcttacgcgctattgtgcaatgtgaaaggactacattcttcaaagtcagatgataatgaggttttttttaattatatttagttttaatctggaccgttcccatgaagttaatgattagctgattttatatcggcggtttccatttattcgtgtgtgtcacgcgcgataggactgcgcattgtttttgaatcataaaattagtggccgggatgcacgtagcgcagtggacaggatccctgttggatcctatgcagaatttctgccacgtgttgatttgggtcaaagtttttcatttttcccataatgatttatttgtgagaacccctaaaataaattgtggttagctaccttattatataattattagtgtaattaagtattaagtctcatttaattttaaaaaataatagaatattattagacactattaatactcaataacaatgctcttaaaaacatctcataaacttgtgacatatattaattacctatattttcttaaatttacattaaattacataaaatctaataattaattaggttattagccattttaacacgtagatcgtttaacatttctcataattttagatttggttttatttgtgtatacaatattggtggtctctttgtttatttgtttattcttttttgaaatgggtgatttggttgaattatatcatttcaactataatttaatgttgccatcaacaaaactataatttaatgttaatattggttgcagtatttttccgacaaaataaaaattaaatattaattgtaaacatctcatcttaatttttcgaactaagaaaataaaaataaaataaaaaaatgaatctctcttataattatattactattactttttagtatattcaaataaataattaaacatatgatgatataattacctcaagcttaaaattattagtaaagaaattaatgttaaagcttaaaaatgacacaaacgtattgttcatagttctattattgatgatgttatatctttaatagttattgttgatggtatagttttttgttatactatttcgcaatttgtaaatagtattgcccatacacatactaactatatttgatattaattattaatgacaagtatttcttaatatagtctaaattttaaattacgatgtcaatattgatcaaaatcaataattataaaactatatattaaatgaaacatacaaagtctataatttaaataaaaaatagtttaactatgtaaaataattaatattagatgatttggagtaatattcaactcattcaatatactaattatttttttaaatacccaatatattaattagaacagtttaatttttttattggtttaatcatgcataacatttttcgtcattttttccggtttttgtttggatggtttatttagattaggtagtttgtaaaattttttgtatgataataagtgacgaaattacactctataccctttttatattgtcatcttttatttttaccttcttttttaaaatctatcat

SEQ ID NO: 105913 - DNA, 966 bp, Cannabis sativa
tattgggatggcttttaacaactcccataacatccaaattacccatttaatcccatttacaccccattaagaaatggtaacagccattgggtgtgggatatttgaattttaaaggttgtgattctaaacattatatataaaggcattggttcaccctttgagacacactcttctcttctatctttcaaacacaaagctagagagttctaaggcttaataatttctagaattatttccacaaagccctaagtgtttcatagagggggaaatattcttcttggacaaaggtgtaaaagctttgttcaagcttttggtgatccccatctccactttgggtgtttgttcttcttttctttttttgaattttatattgttctcttgttctccgataaacactcctatatatatactatcatatatatatatatattcatatcttgactatatagtattatatatattatatatattatatatacatactatatatatgcactttgtatatacactctttatatctctacgatatatcatctattatatatatattctatatcatgtatattcactattatatatatatacttttatatagtttatagttacttctatctttgagttttgagttgtaactcttttcttttatttgtattttatgctatgggaatgtaattctttatttaatatattgttcttgtaatattttatttagagttgtaattgtcttagtcttttattcatcttattttattattccattgtaatctctctattatttctaacaatcaagaagattattttttgttttcaatagaaggagaaacaatcaagatgatgaaccaagacttggtgagattggaccacttcgatggctataatttcactaggtcgcaagacaaggtgaggttcctcctaaccacactcaagattgcctacattgtagagtccaccttggagcccttaccc

SEQ ID NO: 105914 - DNA, 635 bp, Cannabis sativa
tttctttaaaatcatggatcatgcgatttctgaatacagcccaaaaataaaagttttaaaaatagttacaccccgatctagacaatacttccttcataaaaaagtgtacctattttcctaagctttaaaacaagataaagatcttttaaaatggatcaaaagtgagagagatatcaaatttttactgaagacactttttctgaaacaaaacttaaaacgaaatatcctaaccgagtaaagatactgacttttgactggtcagaactccgatctagggaaaggtttcttcaaaaaaaaatatggattaatattgaattatctttctaacagtacaagaatcgctggaaaataatagatattgagagagatatcacacttttactaaggcaatagcggaaagaaattttaaaaaaagctgtaattcgacagtcagtataaaacatgaatttttgacatcgaaataatcagaattaggaaagaggttcttcatgaaaaatgtagaacattaaattatctttaaaacggtacctagatcactgaaaacggacatacggagagagagacatatggtagttttatgaaaacctatttctctgaaaacgaaaaataaaacatacttacgaaaatcctacatc

SEQ ID NO: 105915 - DNA, 626 bp, Cannabis sativa
atatgttttgatttatgggtaccagtattgaactttaatctgtggtgctttcctaaaatacaatgttcacagaaatctaccttagataccttatctttgccaagtagtttctgattattgactatttgcagccccttttcactgatgtgacctagactcctatgccataaagtagctttgtcatctttaggtgctggaacaacattgttgcagcttattataggctccccacataggtaatagagaccatcttccttcactcctttcataatcaccatagatcctttgcatagctttatttgtccatctttgatttactttcaatctgcaagtcatcaagcacacttagtgaaattaaatttctagctaggttaggaacataccttatacctctaagtgatctgaccacagcatcaaacatcttgaagctcactgtcactatgccttcaattccacatttttgattattccctaatatgacttttcctcctttgacatccctataaccagataataattccctgttgtttgtcatatgaaaagtgcagccagaatctaggatccaatcatccttaagattagtagcagccacatatacttctccactatcatagccatcactgtaa

SEQ ID NO: 105916 - DNA, 4600 bp, Cannabis sativa
  modified_base (3649)..(3650): a, c, t, g, unknown or other
  modified_base (3781)..(3791): a, c, t, g, unknown or other
  modified_base (4274)..(4288): a, c, t, g, unknown or other
atgttctttgatttgttaatgctttttggtggatgttgattgaatttggttggagtatatttccttcctcaattctgttatgtataatgatttgatatcaatacaaaagtttttatctcaaaaaaaaaaaaaaacccatattcaccagactttgatatctaccaaatcatgtccctcaaactttgatatgtattaagtcatgtctcctgaattttcattaatgttagaatttttttactaaaattagacaaaagtttttaaatttaacaatctcaataattaatttaagaaaaatttttaacgagaaaaaaaattcgcataatttagtacattttaaattcggaaaaaaaatattaattatctttttccaaataataacaataaagaatatcaaactgaatcacaatcattgaaactagagcccgtgtgaaaatatataaggatttgaccaaaactgtaaaaaagaagaaatacatacgttcaatagaatcaatactatgaccataagttgataaccggtcagcagtactattaaaaacatttaatatttttaatttttgaagaaaagaaaaagaaatagtaagtttagtgtgattaaataaatatatatataattaaatagtacaaaggtagaaaatccagtctctctctcaaaaaatggcgccaaaagtagtcatgttgagagatgttttctgtcgactaaaaatgaaaagtgttctatctattgtaggacccattttcagatgtatttcctctctctctttttctccctcaaaaccctttaccttcttctattatatatataaatcccatttcccactctcaacttcacgccccttctacacataaattctttatatatatctcactagctttctcattttccgccgctttattttttgttttttttcctttttcttcttcttcttctactactttcaatgtacatctttcttttatttctctctcgattatatagcttctacaatctactacacctcatcaattcatagatatatagagagagaaagcatttaaacgtgaaacgtgtctttttttttttttttcttttttgaagttcctaagtataaccatatatataaaatatttagtagagtagagtagagtagttatatagataggatgaaagatataagtgggagtggtggaggtagaaaacaaggggctccttcgccttgtgcagcctgcaaactcctccggcgaaggtgtgcccaggattgtgtgtttgctccttattttcctgctgacgagcctcaaaaatttgccaatgtgcacaaggtttttggtgctagtaatgtcaacaagatgttacaggtaattaattaattaatttacactttttacatatatttttttccccaattataattattatatatataatgctgtgtctagcattattctttgtctttttcctctacaacttctttttccaccacctctccttacccctaataattaaagttttcaaactagagagtcgcaaagttatataaatattccatgataaaagcacacaagaaagacaaataaaaaaaggaattagtcgaaatacatagcgagatctcaaaataataaatttactttctataaacgtgtacgtatactttaaaacttacaacatggtgtgattttacattattggggttgtaatgtattttatgttatccaaattgatgatatattattagtaaatttaagagcttgaattagttatctgaattgagtcactttggaagttgttcccacatgcattaattaatttaaaaatatataatcttaaaacaaatgattattaatatataataataaaacaaaccatctaattaccaactctttcactagctatagtactagtcaagattattagctaaccttttgacgaaaatacaaggtacctagctaaatcaacctcttgctgcttttctaattatggatctttacgaattgtgacattattagacagaatcatccatcttcgtcaatgtggttggtatttctagttatgttttttcgatgagtcaatcatttgttgagctaaattcttataactatatgtatatataaagctctctctagtttagatataaaataaagatattattaatatatttaaatatatatatagagatcaaatataatatactattaattcatgaatattaagttttaactaaagggacgaaattatgagagttgttgggcatgacttttgattatcatgactcatgagggtaattgagtaaattgcagggaaaaggggttattaattcttattggctaaaattatttagttttataaaatcaacattattattattacctccaacttttttcaaaggcttttcacatgatcacgtgaagctgtttaatttgtagtattttgattttcttatacctgcatacatattgttttcaaaagaaatatatacataaatagaataatggtcataataatgtgctgtttggagtccctttttcttctccggggccattttagttaccaaaatagatgccaaaattaaacacttgatcaataagcttagtttgagataataaaataaaatggaatagaagaatagaattaaatttcattatattcatttgtattttaaaatattaaaatgtcattctaatagaataattttttaaccaatttagtagaattactattttattttaaaatgaaaggtcactctaatgcaaaaagaaaagaaatttaataatttttttatacattttaaatttaatttctattcttatttcaattctcattcttatattttttatgtttttattctttttaaaccaaacgtcaccttaaagatcaatgctaagactaagagacccgatgtcaagcatacaaagagtgtcaaattgttattaatgtattttaatatcgagtcacacatattttaatttaaaaataatataaaaaattactaactatctgtgacgcgctatattactataatattaagcattttaaaatgtgaaatagtaatttattcaaaaaagatattgttggtgaaaaatgaaagtactggctctatgatagagataggtacctataaaatccaaatagaagttctaaataaaatttcactagatttgtgataaatttcttactttattttactatttaattatttatatgtttttttgaataatttgtttcttaaatttttatatgattacttgaggaattaatttacgattagtatttttattttaataatatgaaaggggtgtcttcaaaagaaagcacccattatttaaacaaaaaagaggaaaactaattcagagtccaaactaagctaaatttaggagtgtcaattcgtgtttataggttatgttaatgttgtgtcaagggtttagatattacaagcaaaactaaacctgacccatttaatatcgtgttaaaaattaaaactcaaagacaactctcttatcaacaagttcacttaatccaatttatttaaggaaaatttactaaaatattcgaatttgagttaatttttattgaaatactgccatacgattctttttttccccaaagatactgtgtttttataaaacaacatatatggaacacaaaatagaacaactaaaaataacagtggaacanntaaaaaataactgtggaacaacaggaaaaacttaacacagcatacagcataaaacttacacaatatttttgagaaaaaatacagtactatttttgaaaaaaattctgcccacaataaaaaagtaaaaaaannnnnnnnnnnagtatgtggtgtaaataatcttttatttaacccatttatacatgtgtaaaagatgcttaatttttattaatttatcaatttatactaatttaactagtttaatacaatttatttgtaataaattataataaatatactaatttatattttaaagaggtttttgtcgtgttatttttgaatattaacatattaaattaattactcataaatgtgtagtaagaggattaaaatttgttaaaaacatgttaatgggtttatattgacgaaattgttaatgggttatataaacatgttaattgtcgtgttatttttggattagagatttgtttaatgtacgagttagcagtgttaatttgaaaataacaaaatcttatttatttagggaaatttacatgatatactaagtttagctatttttttacaaaaatattgtcaggcggtactttttacttttttactgtgttttttttataagtttcatannnnnnnnnnnnnnnttaagttttcactggtgttttttagttgttctattgttgttttgagttgttctgttttgtaatttactggtgttttataaaaacacagtatttttgaaaaaaatttcgtgtgaccgtatttttgtaaaagttaactcaaattctaatatttttgtaaatttccctttatttagtgcagttgtcaagtgttgttattgtatttggcccattttgttgccctttgtttttttctaattacataaggcactattttttgtaaaatatttatatttttacgttcaaagaatgtcttttttttttttttacattttt

SEQ ID NO: 105917 - DNA, 568 bp, Cannabis sativa
  modified_base (285)..(286): a, c, t, g, unknown or other
ccacacccggacctaaacccaatcccaaacccaaaagtggacccaaacccgtaccctgtgacccaaaattggaaccaaaaccagaactgtaatccgacaaggaccgacactccaaatccgacctacagccgaattgggagcccgacttggatcccaacgcaagcctagactcgggacccgaacccgagcctgaactcaaacccaaacatggaaccaaactagggacacagaacaagggtcgggacctacaaccgcaccccagtctcgatcccgagcccaaactcnnaaatgggacctaggacttgaaccagaaccaggccgagacccagggcagtgatccagatcttgactcaggattctagtaacggggcctggaacagaccagtagtcgttgtctagatctaggaatcagagtaggaacagaacccagacgaagaaccaaacccgaacccagacctggacctgggacccaaaattaaaacctaaacaagaatcgccgaacaccgtaccctagaacaagactaagaccgtgactaggacccgtacccaaacctagaactgaacacag

SEQ ID NO: 105918 - DNA, 550 bp, Cannabis sativa
  modified_base (152)..(176): a, c, t, g, unknown or other
tggtcacagaatacaaaattcatattccatacattaacatacagttagaatccattgatagaaaatggattttaataacttgtgaaagtcatgctgtattgtccaatgtatattaggaaactgaaattaaaaaatttctatttggaatctannnnnnnnnnnnnnnnnnnnnnnnntataccaaatatacatgagtaattattctagcttggacaaccactactaatttaactctaagtttaagttgcctaaagtaagcatatacaagtaggagattctattagatcgaggatttatatcatttcggggaatgtcaggaatatagtcatctgcgccattcaatttcataagagaaattagagtgacatcataagcgaatgatttataaactattcatccaatgatatattattaagcaaattcgaaataaaaaggctaagaggaaacattaaaggataattccaattaaaataagaatccaacgaagtctagcatctcgaggttatattgaaaagatttaaccatgtaggaccaacaatggagattgaat

SEQ ID NO: 105919 - DNA, 895 bp, Cannabis sativa
  modified_base (328)..(340): a, c, t, g, unknown or other
aaaacctcggtcaacaattgttatttctcttctctggattgtaaaatttatccatatttgtgtttaattacatatttaagattaatcaccttttgtatgttttatgatcccaattcaaaatctgaaaaagtgagaattgtgaatgctaaaattggataaactaggttttgatgtaaaacgaaagtatttgcatagcctttgtgacatttagattattgcttaaggctgattacatgttaatctagtttagagatgattacataacatgtgatttagggcctaaaagatctgaaaagaattaggttaattagcattaacaattgggtannnnnnnnnnnnngattcttttccctaatttgtcatctttgattaaatctttttagctgaattttattttcttgttaatctttatttttatctccatcacaaaactattagtttgccaaatagaaacataagtctaatctagtggtatttagtctaattccctgtgggatcgacctcacctgtgtgagtactacttgattatgtacgcttgcgtattattcataattttcgcaacaagtttttggtgccgttgccggggagttgtttaaacattgatattacataagattagattaaattctactttggttaattctttctgctaattgctaacctatttctttcaaattgtcttaatctatttcaggaattgaagttgtatgcgacgtcaaggacaaagtgtaatactgtcggttgatcctgaaattgaaaagacctgtagaagaaacagaagaaacaaaaggcaagaaagaagtggagcaagagctgaaatagaagaagtcatggctgacaatgctaatgccggtaataatggcgacaatagcagtaataacggaggtgccgttga

SEQ ID NO: 105920 - DNA, 608 bp, Cannabis sativa
  modified_base (47)..(47): a, c, t, g, unknown or other
  modified_base (545)..(545): a, c, t, g, unknown or other
aaaaattctaattagtctttaattaataccaaaaagaaaaaagaaanaaaaattaaaaaaaaaaattgtttcaacgaaaatcagattttctaacagcgagacaacttattagtttaagctaatacaaattaatttgagaatttttaaggcaattttgatacaccttaatataatgtattgtgttgaattataataatattatttaataaatataatacaataattaccaattagactttggtcatagtcaaagccaactaatatagtttcttacatatgattcaaaaaaaaaaaaaaaaagatagtaagagctgtgttttcaggttttcagtttttaaaagtgagaatacaaaacagttttttgtcattttaaaaatttaatggtgtttgacacaaattttttaaaactatttttaggttttttcttactaaaaaaattaatattttaataccataccatcacatgaatccatccgggttcaggttcgggtattgtttcggatctaagatccgagtatgcaagcaaaaatataaaatataatatnttagacaaaaaaaattgtttttaaaaattgaaaacaactttttggtgttttctgttttttagt

SEQ ID NO: 105921 - DNA, 2009 bp, Cannabis sativa
gggttcttagggtcacttacctttaccttccccttgtcctgtgcaggagcagagattccagcattggtagggttctccctagtgtttcctccgacacattccactgaggggtcatcatcagaatcttcctcatctagatctctaaacttggcttgaaggcgagctatcattttctccatcttttgagaaaatttctcttaacatgctagcttttgtctggtctcgagcaactcgttagacactctagctacttcagggtcttgctcataatggtagtcgtctttgtaatacccacctttgacgtaatcttcatcgttttcctcctcttaattcatctcaacatctttgtcatcaccgacacggtcatgttggatgtttgggttgtcctctcgattgttcatgttggatgtaaccccgcctctcgcatcgctcaactgggcgtgctctggcaagagagggtttacttcctctatgacagtctcgaggctaccttgaaaagtcttcttaggaaccgtctttcatgtgaaaaccatggcagcaacagtggtttacatctttcttcagttctcaatgaaagcaccaaaattttaccgagattttgaaaactaaatatttgagaactaaagaaaaaataaagtgcaaaaataaggagataaagattttttacgtggttcatgtattaattaaccttagtctacgagtcattattttggcctcttagggcgtttttgatgtgtttgcaatatttttgcaggaaattttaactccatactctcagtttctcttgaggaagaagaccaagagtaatactagtagagttttagctatgtaggttgtatttccccctttgtatgaaaattgaggatatttataggctaagtggtaggtatggacagacccatgacctgcttaaggtttttgctaaaaacccacaactggggtaaattacatgtaaaattagagcttacagttggatcccgtgagaaacattatgtttgtgcgtgctgcagctggataatgaagaccattctgtactaagtggacacatgtcatccaaaggtttaacctgtaaaagtagaggtcacgtgtcgctcaaagctttctcctttacaagcagagttctgtaatacccacatcacaaaaaggtggtagaggtgtgcgtactaccatgcttggatataggggacaagatctgatattcgccagaaaaagtataatcatcacttggtgatctggcgtgcatgaaaggtagacatttgcgatactccaaggtggtcgacattcgcattaggcccttcgagtacccgtcagagtatcacccaggcaagcttccatgtttagacccttccaggtttgggagaagcaattcaccttccacaatcaggaagcgaaggcagagttaagtaggcttccatgtattcttccatcttaatattttcccggttccatgaagcttttctgtgacaggattgtaccaaaaggtttttaattagggaattattaagttgatcttcctcattaaatgccacgtgtcatacgtctaaaaacacggataacactattaaaataaaaagttaaagaaaagagaagagccatcacccaaaaaaacatactatcaaaataaaaattagaaaaaatgttgatgagtcatcacctaaatatagtctttagatattttaatagactttaaaaaattagaaaaagttgcttcaaattaaaacatactatcaaaatataaaattaaagaaaagagaaaagccataaaaaaaaagaaaaaaaacatgctatctaaataaaaataaataaaaaaaagaatttatttcatagcttgttgatgagccatcacactcaaatacaactttttgatattagtaaattgaaaaaaaaaaaaaaaagaaataaagaaaagaaaagatgatgcattaataaaaaagtaaagaataagtgttctcaatgtgagattagtgcaaaggagttgaaaatgcacctttccaaattttgtaataatt

SEQ ID NO: 105922 - DNA, 656 bp, Cannabis sativa
  modified_base (220)..(226): a, c, t, g, unknown or other
  modified_base (596)..(616): a, c, t, g, unknown or other
tttgaggcgaaataataaattatgcatgaataggaaagtgatttaggcattttttagatcgattgtacctttcaagccatccctataattttatcctaattatcgtttttgagcattaacctattctttgttctacacatattgagcataaaaaagataaacccatgaatatctaaaaatttaaccctaattataccataagtagatctttagtttgggnnnnnnnggatggaaaatttgttgtatgtgtaacagaaagagtgtaaaaattgagagaatatgaaaaaaatttagattgacagtaacttgaaaaaaaaaaagataaatataaagttgttgcaatcttgttaaaaaaaaatatctctcatgtacttggaaaaaagagtattgggattgtgtgaaaaatattttggggagacatgattagagaagcttatggtataggaaagcctaaatgaccattttaactacctttaccctaagcctaacattacaagcctagaaagaccttctgattcttggttgtgaattaatttatactagtggagaataataagtgttgcaagcatatggaattttgggttagtggattgatnnnnnnnnnnnnnnnnnnnnnagtggttcaattgctagttaattgtattctatggtttcat

SEQ ID NO: 105923 - DNA, 579 bp, Cannabis sativa
attatttactttttcttctttaaagtattatttaattattaattttttaaaaaataaaaaatagtgtggtttacagtgtcccactaaatttggtgagacatgctagacaaagccatttatgagaataagtttagtgtcccattggagtaaatatagtgtgaaactatactatatttagtgttttagtgtcctattgggatggcctaagaaaaacaaaagtaattatttagagcatgaacaaaagtataatattcttaaaattttcacattattttattttaaaatacactaattaatctatacactaaactaggttatatatatgtcgcggtaattattataataatcaatttaaaataaaatagtttaattatgattacgtaaattttaaatattgtaagtgtaaaaaattatgccttgttattaattttatgaatgaatgttatgatataaattataataatttattgtgtaataattatttttatttattttaaatgaataattattttaagtaattatatatttatttggatgaatataaataaaatagataagagaaatcactatattatataa

SEQ ID NO: 105924 - DNA, 1592 bp, Cannabis sativa
  modified_base (491)..(492): a, c, t, g, unknown or other
ttgatccatattcttcccaatttgtcacgtgttttctattgaaatggtagccgaatttcgggtataaaaatatagttttgtaattttaaaattttaaatatgtatttttgtaaataaaatataaaaaatagtatttttgaaaatttatctaaaatatacagtttggaatcagtaaacggtgatccaaaaacatgatgaggttatgatatggtgttctttgcattgtctgcaactaacaatctagtgattaaaaaataaactatatgtgtagataaatttattattaagagtatttaattttttttttcctaaaattacacatatgcaaataaatttggaattaatttacaaatacacaaaataacaaaaataagattttatgaaattttaaatatttttatgatttttttattttatctacataaaatacggtttttttatattatgttaatttgttgttgatttgtttgttattttttgttgttgttttnntgttattttcatgttacttttattagttttcttattatttttgtgttaattttgtaaaaatatataaaaaaaaaataataaacataaaaatatatttttttttcacaaaaaaaataaatagtacattatataattatctcaacaaattgtacagaagaacaaagtttggatatggtattatcggctcccaactcccaagccatgcccataaatcaagttttgatctttgtggcaaaataattctaatacacactgtaaatgtactaaatatgaaatggatcatcaagtctctgtttttgtgcccttgaattgatttaattttatttaatctaccttttaaaaatagtgtaaaaaataatatcaaaaaattgtctaataaattcatttcacatcataaataatactacattattattggtataattcaatatttcacttaataacaatgtttattaaaaaattatcaaaatgatcattttactggaaactttatgataaatatcatatcactataaaaaattatgatagctatgcatattaattaataaaatatgaaccatattaagatgtgattccataaacaacaatatagcaatctctcacaaaaaaatatatatatatatatatattcactttattcaaattaagaaaatttttaacttattattgatatgttggcacataatacaaatttaatttgagttttagagtaaaaaaatgaaattgaaataagatcattggcctatacttagatctctaaaagacataatatgaccataaccacttcttattttccaatcatcaacactgtacaaattttttgcatcactgaagacttcagcattatcaaaaataatttgtatatgagattcatcaatggttgtcatttgttcaataaatgaatctttttttttgatcttctattgtaaggaacctgttacccatttctggattaggttgtcctagcagactgtatgtctctccactccattccatgtacgaagctaaatttatatttagagcactaaatatgcgttcgggccaaaacctaatttgaatacttgattttccatattcaatccaccaattttcatttgctt

SEQ ID NO: 105925 - DNA, 516 bp, Cannabis sativa
aaggcttcaaaaaatagaaacacataaacattcataataaggagttatcaagaagaacacacatgtgcggttccaataagatttggagatcaacgacaagcaacatcaaaattgatagcagatttcataaaactaaagttcttaaacctgaaaacaaagtgcagtccaacagatataaagggagaaatgaaagacaaatacggaataaagatgaattacatgaaagcatagcgtagtaaagagcgagcacaatctttgccttacgagactcaatcttatctggaggaggtctttttttagaaccagatggctctgcaacatcacccattcccttcttcgcaatgcgtttcaaacccattttaggatcaactttagatgacttcgaaggaggtttcttagcattttttgaaatttttttagcaggtgaaggtgacttcgaacctgacctagtggtggccatttatagaagaagagaagaaaatgtgagaagaaaaactaacagacgttatggaagat

SEQ ID NO: 105926 - DNA, 502 bp, Cannabis sativa
ctggttcaataatttactcatcattccatcacttcctgggaacagttgtctaaacacttcacaaagcagttccaggccgcaagggataggtgacccgaagcgtcctcacttaccaacataaagcaacaaactggcgagacgctaaaggcatacttaagtcgttttagcacggctgctgcaagagtaaaaaatttggataatagtacctagcttactgctcttcaagcagagatcactactgatctctccattgttggagccaaattatgagacgacttatagggtcgtccagtgaaaaaaatcatcgagttcaatgaaagggctcaagtgtttgttcgaaaggaagaagctcaaaaagagatgaacttgttaaaaaaatgctcgggaagcaaacccaacactacttcaacaagtactgtctcgactaaagctgataacctagggtatctagttcaaagaggaaagacgaccctaaggggtgcaaacataaccatcccaatct

SEQ ID NO: 105927 - DNA, 847 bp, Cannabis sativa
  modified_base (752)..(759): a, c, t, g, unknown or other
  modified_base (804)..(820): a, c, t, g, unknown or other
tcagttataacgtagacatcctgatgataggctcatcagcccctttttatgaatatagaacgcatctaaagcctacaagcttgtgcgggaatatgaacagacaactcgcaccttaaaagtcgcatacgctgctgcacttattaaaacggattaaattgttcttcatttattcttttacttttattctgatgtaatattgttatttattgtataggagttctataactgatcagttatgtaactaaaagaacacttgctttctacataaaggagtgatccaagatgaataaattaagcaaaaattatttataacagtggactaagcagaccatgatctgattgaaccactatattcccttgtcttcattttatttttccagttgttatattttcttggcagttttctttgaatactcactattctaagtagagtatttgctatttttcttttgattatttactgtttgcatacattttggtgttgtctgaatccctccgacaacatttggtgccttttgtgaaaactctcttatcgattttggagcaaaatcatcatggccaccaaccaaacaaatggaaataacaacacaagatcctttaatgttggaaccatgcacgttcctatccctggagatggaacaaatccaactgatacaatcataggaggagtgggacggaccaacgtcaccccctcaatctattctcaaaaattgctggacatgctggggagacatctgttgggttttatgccnnnnnnnnaactccatttcaatgtaatccatcaataaagaaatagaagtattnnnnnnnnnnnnnnnnntgttttggttcatgttatcaattgctt

SEQ ID NO: 105928 - DNA, 526 bp, Cannabis sativa
acgcgttgaagtgtcactaaaagggttcagtgacacgtgtggagtgtcactaaaacccaattttctagtagtaattatttcataacactaccccttggatgtctataaaaactgtttcattaaaaaccttgctcaaaaacttcgtcaaaagaaaaagagtgcagtgtgaattaactctcccttatttaggcattcgtggagatcttttaatcgacgaattccaatcttgtatgtcgccttctcaaatattgatgttggtaataactttgtgaataagtcttcaagatcgacacttaattgagtttgttgaacatcaatatagtcattctcttaattaagatcatgaattaagaagaatttggtaaaaatgcatccctttagctctatcttcttcattatagctttagtttagcaagtgttaggggtgttcatcaaactgcccgaaccgctcaaaccgcccgcaccgcaccacaccgcaaaaaaaatgtggtatgaaattctttgcggtgcagtcgcggtttgaatt

SEQ ID NO: 105929 - DNA, 520 bp, Cannabis sativa
tgtttaggttctaattttgggtaccaggtctaggtctgggttcgggtttggctcttcatctgggttctagtcctagtctaagtcctagatctagataatgattactggtctgttctggccccgttactcgaatcccgagtcaaacctggatcactgtcacgggtctcgatcttgttctgattcaggtcccatttttgaatttgggttcgagatcgagactgggtgcggttctaggtcccgaccctggttctgtgtcctagtgtgcttccatgtttgggtctgagtttaggttcgggttcgcgtcccgagtctaggtttgggttgggatccaggtccgactcccaattcaagtctaggtatgatttggagtccaggtccagatccggttacggatcttgatctaggtcgaattttagttattattccaagtccaagtcctagttccagtcccagtcaacttctagtttttgttccaattttgggtcacagggtacggattcaggtcaacttttgggtttgg

SEQ ID NO: 105930 - DNA, 4226 bp, Cannabis sativa
aaaaagtatttttaataaaaaaaaaatgatcctatataaaaatgtgtttaataactttttttaattactattatttatttaagtaaactaaaatatataaagtagagcaacgacacaagacgatatgagggataaagtgtagtaataatgaagaataaagagactacaaaataaggctatatgattaaaaaattatttaaataaatcttgataataacttggtcttttttttcaattttaattattatgctaccaataaaaattaaattttgaccactggatattatgctaaagttagatttcactttgtacgtagtaataaaaaaataagaaaatataataaattgaatttaaagaaatatgaaatgtttgtagtaaaccaaggtttggcaacattggcattcttcggggtaggagtgaacttggtgttgttcttgacgagggtgttggatcaagacaacgcagaggctgcaaataatgtcagcaaatggactggcactgtctacctttgctctcttgttggggctttcctaagtgacgcttattggggaaggttcaaaacatgtgctatctttcaagcaatctttgtctttgtaaaatctctaaactcaccaccaattttttacatatatattgtttatttctttaattattcgtttccttgtgcatgcatggtagggtttggcttcactatcactatccacatacatatttttactcaagcctataggttgcggtaatgaaaaatctagttgtgaagaccattcaagtttggggatagcattgttctacatctccatttatttgattgccttaggaaacggagggtaccaacccaacatagccacttttggagcagatcagtttgatgaggaggaccctatagaaggtcaagcaaagatcgctttcttcagttacttctacttggctttgaatcttggatccctattttcaaacacaattttaggctattttgaggacaaagggatgtggactttgggattttgggcttctactggatctgctggcctggccttgttgttgttcctttgtggtacaccacagtaccgacactttagtcctaagggcaacccgctttctaggttttgtcaagtggtggttgcagcggctagaaaatggaaggttgagatgacgccaagtggagacaatttgttcgaggatgtttcacaattgacatctcaaaatggtgctagaaacatgctacacacccaaggtttcaagtaagttttggtccttgttaattgattgcttcttattaatcaatttctttattaagtgaaaaaggaatagagaagaacctatatgtgcaagtaattaatgataatataatattgaacattgtagatgtttgccacgtaatatgaaagaacaacgaagtgattattaataatttgttttattattacttcagatttttggataaagcagcagtcatcactaagaaagacctcaaccgaatgaaagataatgttgttcacacgaatccatggcatctttgcacagtgacacaagtggaggaagttaaaagtatactaagactactccccatttggctctgcacaattctctactctgtcgtcttcacacagatggcctcactcttcgtcgagcaaggcgctgtaatgaataccaaacttgttggcttccatattccaccagcgagtatgtccagcttcgacattctcagtgtcgccgccatgattttcttctaccggagaatccttgaccccatagctattagaatcaccaaaaaccctaaaggactcacagagctccaaagaatgggaataggccttgttatagccataatgtcaatggtatcagctggagttgttgaagtgtacaggttaaagtacatagaagaggagtgtaataatgctaccactggcataatatgtagtagtagtggatcatcagtatcaagccaaagttccttgagcattttttggcaaattccacaatatgttcttgtgggagcttcagaggtttttatgtatgttgggcaattggagttctttaatggtcaagccccggatggcttgaagagctttggcagtgcattgtgcatgacctctatttctcttgggaactatgtgagtagcttgttagtgattatggtaatgaaaatctctacaacagatgatatgcctggttggatccctgcaaacctcaacaagggtcatttagagaggttttattttctcctggcagctttaaccactgtggatcttatggtctacattttgtgtgcaaagttttacaagtatacgaagtttgaagaaagaaataatgggcaagataacaattgccatgaaagtactactaatgttcactctatggagcttcgggtttgagtatgactttattaggatgcaatgtttgttttgatcacgtacgcacgagtctttactataaaatcatgtttggcgcatataataaatatatgttagataaaataagaatgtgtgccatgcattcatgtgtttgaatttgcttgtgaaatagagtataatatgcttatgttagcgatgaagctaaagaagaaatagaatttcgattctattatctctaattaagcagagcagacaatttaattaccatgtacgaataagatgtactaaagcataatgtcttatatttgtataatttatgatgttatatttccaacttgaatgtaagatgtgattgatactattaatcaacttaaggcgatatgaatgaggattaatcttcttttctacttccagtagtcctattttcttttccttgctaaaatcttgttattattttgcaaaataatttgcacaatattctatttttgaattttatgtggttttcgtatcttttttttttaataattaaagacttttatttaagaaaacccaaactagtagccacaaaagggggccacttcccttaacaaactagaatttttgacttttgcctctctagcccaacaagctaatatatcagcaaacacattcttcgtctaaggaacaaaggacacagtaatttcgttaaaagacgtacagaggaacaaacaatacgagaacaaagagaaaacgttccaaccatacggtaaagaaccaaccgtgaaggcaagagctgtcgtcttcgagtcggtttcaattcgaacttttggcccatctttctccaaagccgtttgcaaagccaaagctataccacaaagtacaccgtcgatagaagagaaccccacagcaacccatgagtcctctaagacctgatcatgcttgtgaataatagcaaaacctgctattttcccaacgacaaaagcgtctacaatacagcaccagtagtcctcctcagaacaattttcaagcatatgtatctttgcagcagcctcgtccaaatgttcgaaccacaatcggttactaaaaaattctgcaactctcgaaatacaatccttatacaccaaatttatatcacactgtttatctttgaaaatcaaatcattgcgccacttccacaatgtatcacaggtacaggcaatgaaaatttaaagttcaaaatccttcaaattacaccattagatgccaaaatctgtgagattattccagtttaagcagtcaatgtgaattccccttctaaaccaaatcccacgtgtgaaaggacaacaacaaaatagatgaaaagtagattcagaatctgttataatgtgaaaattccacctagaaacttgagaccaagctcccgtaaaaatgacatgtggactcactctcctcgaggattgttaagctatcagaaggagaccactcgaggataaacctcgcccgaatcaaacttagcgagatgatgtgaccttgacagagtcaagttgcattattgcgcctcgcatgacgtaggaccaagaaggaaatattcaagacttgcatataccaagatattcacgatgtctacgaagacttctcctgcgaattagtaaagaccgttcctttacatagcgagttagtacgaaagacttaatatgctcgatgattcgataaggacttgcacgttccagatcatcaacattggtaaggtatccgcaggtgcgacttgattaggacgcaaatacctaagtacgagacttgttaatctcgtcttaacaataacgcacctttagcctgcgagcttgtgcgagcaaatgaacagataacttgcactatgaaagtcgcatacgttactgttaggttttgtgccctaaa

SEQ ID NO: 105931 - DNA, 642 bp, Cannabis sativa
tttcccgcttttactaggtcaaaagtatcgtgtattaatgtattaaacacgtctttattaaacacgtctttaactaaacacgtctttaactgttgaatctgaagatgtctcgacagagacagaaacttgataatagtgatcccaatagcgagctggggccattcttccttccgaggtcgacaaggtatgttttgtgtcgatcgcggttatttacacagaagtcttctgacttgccagggttgtaagcctcgctcctgttagctggatgaagctataggaagtcttctcatagcgagatggtcaccttgcttatttgttctttgagccaatccatctttttcacttagtttgttcattgcacgctaaggactttcatggttgatacgtgtcgctttctccggtgcctcactattcacatttagcgatatatggtttctcgctaatacgctaagtgccagcttgtacattgatttctcgcctaagaccttacagtcagcgggttacaaatatactctgactcttatgtaattaatgagctattccaaaagagaaattgcattgattcatattcccttcatcctgacacgtgtccttcattggggtggccgccgaatttttggtataacaattgctccttaaaaa

SEQ ID NO: 105932 - DNA, 576 bp, Cannabis sativa
aaaaaaaaaaaaaaagtaaatattgtgcatgattcaattgcttagttaaaattttttataattgaatatatagtaaagggtaaaggctaattatgtaattcaattagtgaaagcccaaaaaactattctcacttttatataggttatagattaattaacaatattttttaaaaattatttttttagattataataaacctaatagttacttagaccaataataatataacactaaaagaaaagtactaaacactagtaatactcttaaacaaaagtggtgccttccaatattttttataattaattaatcttctttttcacagcaaacaacctcctcagccacgccaattcataagagtatgactaatttagaaaaatagtcaaaatttgtgcatattattatttttatttaaaatgtagaatgtttaagtcgatagatagtagatgtgtacattgaccgattcaatcactttatgctacattttatttaaagaattcttatgaaagatgactaaaaattaatttattttttcattaatatatcgcatcatctaatcagatgagcttgtacctacg

SEQ ID NO: 105933 - DNA, 1439 bp, Cannabis sativa
ggcataaaacccaacactttattaatttgatcaactaacagaacgttaaattaagtgttaagtttataaatttgaggatacaataagaactacagaaatgacatcaactttatatgaccaagatataaaaataatgtattatgaaaaaatttgattcataatctcacacctgtttcttctacataatctcacacatatttgattcaattcataatatttgattcattacatattccttctataaaaaaaatcaatcttcctatattctgcaaagtaaaaaaaaaacttcacacatacgtatatataaataatttaataattatttaatttagtttatatttattattttgtattttttttaaaaaaataattgatttatgattgatatttttatagaaaatttattaacataatagtaaaatatcaatttgtaaatttatattctaataaaaaaaatattaaaaatgcgagaattgaggagtaaaaagaaaaatagctttggagagattttagagtgtcatgtcacattctcattcaatttctttatatatatactaggcaatatagccgctcttcactcggctaatttaattatttttagtattataataaatagttacttaaaaatataattctagtatatagtaaaattataaatacattatatatttcatattattattaataattttatttattaaaaactaaatgcacaattttataaattcttatttagaattatttactaagaagtttgaaatttattatatttcgtattttaaattgctttgttaaaagaaattatttttataaaaataaataaatagggtggtgtagaaaaaaattacggtgtttcccataatatattattttcatatctcgatcattcaaaactattgttcttattatatctcacttgttgtctcattgtatctcacttatttttatcaccgtatctcacctcttgtcatcattgtatctcatcccttgtcattaccgtagttcacttgtagtcatcacttttttattttccaaatctatatcttaatcttagatttcatctagaattttaaacattttttcaacatttttaagacgttgaaaaattaattagtttgttctgttattattaattaatatgttttaaaaaagtaattattattttttaaatatcttaattaaaaaaagaaaaatatatatataaaaatgtgatattttagttatgagaaatgctaaaaggcaatcctccttggtaattaagcaggtcccatataatttaaaaaagataagatttaggtacgtaatatcgttaaccaatcgtagggtacaccctatacaaggtgttgggcaccattggtgtccaataacaatgctctttagttataattatgtgatacttaacattaaagttatagtttcaaaaaaagacgtaaagtatg

SEQ ID NO: 105934 - DNA, 624 bp, Cannabis sativa
cggtttggtactcctcgagcaatcgtaagcgatgaagggagtcacttttgcaataaacagtttgaagcactcctttcaagatatggtgtccgacatgaaactgctttaccatatcatcctcaaagtaatggccaagatgaaatttctaatcgggagatcaagatgattctagagaaaatagtgcaaaggtcaaggaaagattggtcaagaaaattagatgatgcattgtgggcatacagaactgctttcaaaacactgattggcatgtctccatatcggttggtgtttggaaaggcttgtcatctatcggtggagttagagcataaagctttttgggccatgaagactcttaacatggaattaaaagctgcaggagagaaaaggctactacaattgaatgaactagaggagtttcgaaatgaagcctatgagaacgcaaaaatctacaaggagagaactaagaagtggcatgaccaaggtctagtaaggaaggactttcaacctgggcaacaagtgttactattcaattcaaggttcaaaatgcttcctggaaagttgaagtcaaggtggtcaggaccattcacagtagtcaaggtgtttccttatggagcggtggagttaaaa

SEQ ID NO: 105935 - DNA, 546 bp, Cannabis sativa
  modified_base (133)..(150): a, c, t, g, unknown or other
ataggcccatggtccccacactaggtgagacaatactgcttgtaagaaaagaggttttaaggtttatttgttaattaagattctttgtaaaatataattaataaataagataaatgataattttatttaatannnnnnnnnnnnnnnnnnataaataattttggcatttataagattaaaattgaaaaatatttcattagtgaaataaaagataaatggttgagaaaatggcaaaattataactagtggggcccatctatatggtcggccactatagtgtttaattttgttattaatttatcattttttattctatataatttaaatgctaaccctaggtgaaataatataaaaggaataggatgctctcattctcatccaacctcataacctagttttcattatgtcagacaactagagtttttgagagcctccttttcttctctatttcgaaatcctctttctccctcttcataaatttcaaacctatagtaaaagagtacatgcccacccatatcaagtcaaatactcaatcatagtgtgtaa

SEQ ID NO: 105936 - DNA, 578 bp, Cannabis sativa
cgaacctgcttctctagaagaagtgttgttcgaaagtttgtcacagaaaaatcaatgctggggtaaattttgcgcaccttggagtccttgccaacctggatgtctttgtgttggaccatctggtactggagcttgcgttggcctttcaaaataaaactacgtaatttaattatctattgattgacatttatatatatatttataaatatatattaaatattattaataaagtcaatcgtataagtaagtgtaatgaattataataataataataataagaaatattgaacaagtgcgagtattcaacccagaacggtaagtactcaaactgggaacacaaatacttagtaaaagactggaaaaataagtaacacaagagaaatatagtggttcagtcagatcacagtttgcttagtccactgttgcaaatattctatcccccgttacttcactgtggatcactcttttacatacaaagcaagtgtcctatcatttacacaaggattgcattcattatcaatttgtttatacgttgatttacaataattaagctaaaaaacgtaaacataataaatgaa

SEQ ID NO: 105937 - DNA, 721 bp, Cannabis sativa
aaaattttaataaaaaaaaaatgattaaaaatagtgttacaaaatacaccttagattagtacatgatatacatttgttttccacatgctttatatttttcgtatttagctgcaagtattttttaaataaacaaaaaaaattaattattttatcgatacctggtacttaatcatttttgtttcacatttttttgggatttcaataaaattattttcttattttaatttttaataaaagaatatcttaggaaatatatgtaattactctaaaattaataattttctaagattaatcttgcataattttaccaaggtctgatacttattattttataagttttttttggaggtttggtaaaataatttaaaaaatatataattttattaaatttaaggttgaataaatgttggtgtgttataatttttgataaagagaaaaaattatataaaaaaaaattcaccatataattttcgatctaaaaaattaacaaagaaaaataaaatatattatagaattttatagatattaaaagatcataataaaaaattgtagttatgaatatagtatgataaaacacctactattacacaatcaacatatcacatataaatagaataataaaatagatatacaagataaaatatataatgtatggcatgatgagttattataattaggtgtaagaaaaattctacagcaagaagtacgttattaactcatc

SEQ ID NO: 105938 - DNA, 1278 bp, Cannabis sativa
  modified_base (63)..(75): a, c, t, g, unknown or other
  modified_base (144)..(154): a, c, t, g, unknown or other
  modified_base (381)..(395): a, c, t, g, unknown or other
  modified_base (768)..(770): a, c, t, g, unknown or other
aggagacattatattgcgctgcaaccactgtaaggttcctaaaactttatatgtgtttatttnnnnnnnnnnnnnaagttcatgtttaggatgttaataacctacttgtagtaaatatagatcttggtaaaataattctaacannnnnnnnnnnagccatggtaattgatttattttcaagaaatttggacttaaaacgatatatgtgtgatttggatggtttcatgttgatctatgtgttttttacgattttttgatatttgtgaattttttacgaaaaataattggattttcgttctggacttatttttgttggatagttttaaaagaattaagcaatttacttttttacaaatcttaatttcgattttatttgaattnnnnnnnnnnnnnnnaagttttgaaaaaagataggggtggtgtcgccccatacgcccgtggatccaagtaatcactcggtcacgtgcgcttcaaacacgaggttgtccaacttttttcggtctgaagcctcggttttgtctgaaattaggggctccgcgcgcagatgaggctgcataccatcctcatcaaatctaattttttcaattttcttcaatttttcatgctttttcatggaattaattttgaattttttgtataattttatatttacatttttattgttcatatttcaaatctaattatcagaattatattaatttgtttaaaaaattaatttaaaatgttagtgatatttgaagcttgaaaataggtaaaaatctaattttnnncttaattaattatcttattttttaaaatttgattattatatcttatttttaaaatttaaggttgtatatttatattttttttttaataaaatgaccttatttgaaatttaaaataaggttattttaatcatgaaattttaaattgacgtaaggtattttgctaacttttatatttattatttttttatttaaattaaattgtaaaatcagaaaaatgatattaaattatcattttattttattgaatatttagttttctaaataacatgaaatttgaaaagttgttagcattttttttggaaaagatatttaggttagttgaaacctaatttttcaaatttataggcttaattttaattttttttaatttatttattttatattccgaaaaaaaattattcatttaattccttttttttttcaaaattattaaattaattaatataaaattaaataaaccctacatccaactatccaacttgtaacatgtttgtgtgttttatattgt

SEQ ID NO: 105939 - DNA, 1367 bp, Cannabis sativa
atccccctctttttcttcttcaaattttcgtcccttatagtgatagagtacatgatcacacaaagcaattctagtactcaatcatagtgtgtaagactatgaagaatcgaacacctgaaggagaatgatctggctcagatcttgataatactctgcgacagataggaacaagggttagagatttgagtagaagaagtcatttaattctgttgcaaccaatgtaaggtttcttgaactgtatatgtgtttcaattccattattttagaaattcatgtttagggtgttaaacaacatacatggtagtaaatttagatcttggtaaaataatcctgaacaccatggtccctaaactacctaagataatattattttgtagtcttaattaattagttttaattaataaataggattctaaataagactatgtcttatttataaattttactaaggaagggcatatttgagaagaaaacgagaatttggaatttatttgttaattaagagaccttgtagggtctaattaataattaagataaatggtaattttgtttaataattaattataattattaaatagataaaattagcatttaaaaaattagaatagaaaaatggtatttttaaagaaaagataagtttcattaaggaagtaataaaatggcaaaattcaaatttgtgggcctccatatagggtttgaccaaaggggtttaatgaagtcattttcttatctttttttaatcaattttaattataaacctaaccctaggcctacattataaatataacattatagttcttaacctgataacaagttttgactctctctttagtattgagtgatttctcacacatatcaaggtaatactcgggatagtatggaagactgtgtgtcttttacaacccaaaagagaatccaagtttagttcttgatcacactctttgaccaaaaggatcaagggtgagagaaatgaacaaaatgagttaattaattttctgcaaccagtgtaaggttctactaatccctttatgtgtttatgttattgttttaggcttttccatattaggatgttagattagaattaatttaacatacttgaatagtaaataagatcatggttaaagaatttctaatagtcgactccataatcgtcacgatgtaatagtcccgcgcaaagccacctatcattgtcacttttttgtcattcgtattggccagccaggcatagtccagttgagaaaaatgaaagtgtaacgtccccgattcaagactccattgggcccttacacccacggaataatgtctcttatacacgagtacgtcactctggctgtttcatggactgatgacagaccctacagaccaac

SEQ ID NO: 105940 - DNA, 574 bp, Cannabis sativa
gacacttctagagtacacacccctaaaacagatatattggtgtgaccctttaatattacagtgtaattcgtcgaagtgttaggatacactgtatttttgtggggtgtagaacattaaaataaaattactattttcaaatttattatttttgtaaaaaaaaatgaaaatactgaaatctaagagtcatggaaactgtttcatttcacttaattatctaatcaacttgaattttaaaaaataaaatagaagtgtaacttttttcttcttcctgagaactttgaagtaagaacaccattgttcctacgtccacccatcgattctaaactatctcgtctccctctttttacatttttcatatgtggggctttttcttagtgctctttgggcaatattatggattttgagcccaacaattttttttgtttgggatttgaagaatatatcttgattcccttgttaatctttttgctgctgctatacttgaagtattcaatcaaataatacacatacatgtttatattgtgtttacgcgtagtaattttttgatagcatgttttcaatcgaattagaattt

SEQ ID NO: 105941 - DNA, 1147 bp, Cannabis sativa
ggctcacttcactcttttcaattgctgcttgatagttttcccataccttgtatggagatcctgtcttgctattggcaaggctgtattccacctgtactctatctttggcttacgtggaaatgccacgttaggtggacaaaattttggataacaccaatcaagccactattattttgccatgactcaattgattttagaatatattatcagttccctgctgcttattgttccatgtataaaaacttctagtaaacttgtcatcctccaatttacactacctaatacattatcgaaaaagctacaaacttattgtacttaactttcacgccaatcctttcttccttattcagaatatcatttaaaccaccaagaaccagcgatgctcttgagtgatacaatgtgacaaatccttccacaactctacccttccttcctcctcattaaaaccatacacaaacaagataaaaaaaaaactatttcctttatcaaatggtctaaccaaaaggtgaattaattggctagaacatttgataatagaaatagagaacatggtaagatttcaggtcaccacaacatgacctccattattttaagcattaattgaagtgaaacaccaaccaaagaataagctcacatacaagggtcccattttatgagccttcactcttgtttcaagaagcccaatcagcccaatcttgtaatgagagattagtttattaaccttatttttcttttgatgggtattaaattccctgacaatccacgacatggttctatcaattggatataagaggcactcaccccctccactaataacattttcttttgaatcatttgagctcttgctcttatctctttctaatgcttgaaagttcttgctaatatcagtagcaatagttaaaacttttccttttgtttccagcctttcgtaattgcctgaaagccctctatataaaccatggtttgcttatctttagctttttctaccagtgttggagccccatgcctttataatgtctgcaattagttggaacccattcataattcacactaacaaaaacctcttgatcaaactcattctcaaatgtaatcgacccaggaaaatccaaattgatagtaacctcaattaaaactctcacaaaatttt

SEQ ID NO: 105942 - DNA, 508 bp, Cannabis sativa
tcctcttcttcttgctcttttattgcttctcttgattctatcactattcctaaaattgttcgtgaagcaatgtctcatcctgtgtaacatctcgaaaaaatgtattgatattttaattggacatcttttattaaatatgtaattaagtgggtattagagtaggattataatcctacttaaactaattacgagttgattagggaaaatatgagtaaataaaccgtaatttattaattatggagattatattagaataatgtgggtatcatagataccataattcaaataaaatatttttgggcctggaactgtggaacttgacggggaggtcagaaaagccacgataataaaagatgaattgaattgaaattacactggactagtttagaattttaagttgtcggtttgacggattatttgtaatgactaaaataacactagggtggattttgggcaatttagtcttttcttagaattttcattgttgtctttagtgtgacttttatgg

SEQ ID NO: 105943 - DNA, 1005 bp, Cannabis sativa
atgcacattttactgaaagatgctcaagctgtcaaatttgcttcagtagtcgcgaccaccattttccatggttgctaccctttttcatggtcgcgaccacgatcgcgaataggaggccaagatgcgagcttatttttcgattttgcctatggtcgtgattaggctttatgtagtcgcgatcaggggcgaaatacgagattttgggcaagtttttgactttcaccattcagagtttagaagccctaattcctatataaagggttgcgtgttttagaggcaagggggcagaaataaaaccctagagatggaggaggcaaaggaagcaattgtggctgcccggaggaagatcaccaactagttctttcttcccctttttatgtctttatgttaatttctgtttcaatttttatggatgtgaacatgagctttttaaactaaattcccaatttagggatatgatgaatgttagatgatgtttctttatttcagttaatgtgattattagtttttcttccctatattgtgtgatttgttcttatatcttttaattacatatttcagactagtcatcttgaatgtgatttatgatcctaatatgaaatctgagaagtgaatattaggaatgctctaataggaaaaacataagttttgatgtaaaatgagagtacttacatagcttatgtgatttttagattctaaatttaatgcaagttatatgtaaatttacttcactgcaacaaaaggaactttttatcccactttttacatttgaaaaaataaaaagtcggataaaaacttttgatcccacttttacatttggaaccttaaataaaagataggaagggccttgtttggcaatcgcacaaaaaaaggtgttggaaaggaaatttttaagccattgccaaacgcaaccttagcattttaagtgagactttttatcccgatttttatgtaaaaactgggataaaaagtcccaccctattttttttatagctgcacatatat

SEQ ID NO: 105944 - DNA, 1056 bp, Cannabis sativa
atctgataccatgtagaaacttatttaggcaaagtttaaaagacgtaagaactaagaaaagaaaaacagagagaaagtagaaccaaagagaaaactgcctaagcaaatttatctttattaaatatcaagctagcctttgtatagctatatgtacttgttacaagaagtatgcataacagaaaaactaacttgaacctaatgaacccctaacaacaaccaaaataacagaatttgttttattgcataacagtaattgatcaaaatataaagttcaaaataatataaatttaaaatcacatgtttttttaatttataatcatacgagtacgtagtcaacaagtaactaataaataaccaaaatgataagtattattaaatggagttcatttccaaaacccttacttaatagctaaggggtgccaataccacaagacatgacacaccgttattggtgtataccgttaaccaattataagatgccacgtgggtgtggtattgagcatttaagataccaaattgcaatgctcaattactgaagtccatagacctcagaagagagacgaggtgtcaaaagaacctctagtggggttgccttaggaatagtcaaacccgggctttcactcatgtcaataggcccatcaaccgagtttttgaactcaaacccttgaagtaaacgggcgagtgtaaggtggagcacttggattgcaaaagatgcgccagggcaagaccgacgacccgacccgaatggaatgagttcaaattgttggcctctcatgtccacgtgtgcatggcttgtgagaaacctttcaggttcaaatttctcagggtttgaccagactcttgggtctctttgaatcttccacacattaaccactaagcgagtgccagctggaacatggtaacctgctacggtgcagtcttccaaggcttctctggggccaaggaggggcccagctgggtatagacggagggtttcttttacaatggcttgaaggtagacgaggtttttaatgtcggaatcatcaacttgtctatccctacctacgtggaggtcta

SEQ ID NO: 105945 - DNA, 564 bp, Cannabis sativa
attttatataatagtatatacatattacaaaaaaagttaaaataatgtttataaaactcatataaaattaataatcaattgtatgatcgataacaataaaattaactattaactaattacataaataccaaaaattttaatagctagaaatgatcctaaaacttatattctaggtacgtatcataaaaactaactataaattaattacatattgcaaaagttaatagcaacaatcctaaaattttgtaatttaatattatttagttttaatttttatcaattgtttgatgccaactaaagaagaactgaggttgcacactccttgttcttgagggttctttttctaataaactccacaagtatttcaatgaaggatagctgcccaaccatttttgttactcttgtgccctaaaagtaaaaccaaccatgttggtagtgtaacagtagacaaatacctacggatataaaaatatatatacataagagaataataataatcagtggcattggcattaaccttgaatcaagtaaatttgaagatatcatctgttgctgcaattcccc

SEQ ID NO: 105946 - DNA, 772 bp, Cannabis sativa
ctaatgagggtgactggaaaaatagtttttagtgacactttacacgtgtcactgaacccttttacattcactttttgcgtgtcactatatgcatataaagtcagattttgtcagactgaaaaggtaacagccacacgctaaaagtgtcactatatcctttttttaattttttattattatttttagagatatagtgacacacaaaaaatgtcactttattaaatatttaaaaaaaaaaataatatttaattattattacattcccatttaacaaaaacaaataaaaatctattacaacattaaacacaaatttaaactaaaatattcataaaaaaaaaagtggataacaaatacagtatagaaagtttaaatgaaatatttataatacaagagaagtgggtatgaacacaaataaaaataaaaacaagaaatgagaataaacatgtctaaaaatattagaaacctaaacatcagatctttaaatccacttaaacaacgaatcctgaagctgcactcacaaacagaaagctgtcgtccaccgccaacttggaatcgcaatcttggacgaacctagagccgttgttgaccgcctactcataacaaagaacaatggttaaacagtgtgatatccatgacgattttcaaacaatgtgagagaataagaacttttctttcaaaactgtgttcttccaaaatgaagtgttgtatatcaaattagaggactcccctaatatgtaattggttctgtgcaagaagtaactagggtgcatgt

SEQ ID NO: 105947 - DNA, 546 bp, Cannabis sativa
atgcttattttgtttatttgtagtaaaataaaatataaatttgtaataatatttaattactcattattttaattttcatcccactaatatattgtttggttatgtgcagttaaaacatcattgtcctttcaagttttgagagaaatgatagcgagttttcagaacaaattacatgccgctgatgatgacaatggattgcagtctgttacaaagattttacaactatgattgcttttactatcagagttcccgctcaaatgattttttagatcattattagaagtttttacaagtttgttattcagatttacaagtttgttacacacaaattagttgtgcatgctcttcggatgaataaataacttgtttggctagatatgaatatccatatttttttgggtgtatagtattattttgattatcctcccaagaatagtatttatttgacgaacatatgatgtatagtattcataactagcctgtgtgcccacccttttttgctctgcggcagttttttttcagttaaggaagttttttctttttctc

SEQ ID NO: 105948 - DNA, 795 bp, Cannabis sativa
taacaaattagaagttattcttgaatagagtattctttaatagaggttctactgtatatatatatatatatatcatatttttatgtaatactatgtaaaatttaatttagactaaaatattatatataggtgtccataaaagttaatactagatatagttttacataaaaatattgcataaaatacaattcaatataatactatgcaatacaatatggtataatacggcgtaccaaacgaaccccaaaagtcatctctatcaacggtttaaaaaatatctttatgctataggtacaaaaatagggtactcactattatctcaaattttatccacctaacgtggtatgtccacataatcaaaagcaaaagacacgtggagaacaactcgtcactaacctgccaagttaatgcctacagcttgccaacctgccagattagtgcctacaacctgccaagttagtgcatgcagccgccaggttagtgactaaagccttcgggctgtcaggttagttcctgtagccttcaacctgtgaggttagtgcttgcagccttcaacctgtcaggttagtgcttgcagtcttcaacctgccatgttagtgcatgcagctttcaggctgctaggttagtgcctacaaactactaggctagtgtgtgtagtcttcaacctgccaggttagtctgtgcagcattcaacctatcagattagtacgtgcaaccttcaacctgccaggttagtgcctgcaactttcaacctgccaggttaatgcatgtagccttcagactgccaggttagtg

SEQ ID NO: 105949 - DNA, 1265 bp, Cannabis sativa
  modified_base (776)..(776): a, c, t, g, unknown or other
tgacttgagtcccattgagccaaactcattcacttttatgagtgacagacagaaggggcttcaaaatgcagttgaaaacattttcaacaacccagatagcaggttctgtgtgagacatatgcatggaaatttcaagaatgagttccctggactattgctgaagcaactactgtggaatgcagcaagatccaccattgaagcagattttgataggagaatggaagagataaagaaggtgaatgtgaaggcatacaactggctggcagcaaagcaaccatcagaatggacaaaatcacatttcaaagagggggtgaaatgtgatatgctggtaaacaatatctgtgaaagcttcaacaatgcaattcttgatgcaagggacaaaccaattattactctattggagtccattaggtaatttcttattttatttggcttgcatctgtctggtaggaagtttacatgattcagggttagagttcttgttttttttttatatgatttacattctataaagtactcttctgcttgctgttttactgtattatagtggttgcttttatgaacaagtacgttgaaaaagaaatggattttccatagctgttgaggttgtgatattagggtacttaaaatttataatttgaaatatgagtgggagtttattgtctctttctaacaattttgttggctgatttaattctaaatagtgttgcacttattgtcaacattgatttgttactttccaggtattggcttatgtgtcgtttttacaaaaaaanggagagtatatcaaaatggaaaggccctatacacaacaactttgttaaaatcactactaagctaagagaggttgctaaacgatgtgtcataacaagggcaaatgcaactatgttccaaattcagatgaatccaggaggtggttttactgttgatctagaggggaaaacatgcacgtgtaggggattccagttgacaggcatcccatttggacatgccttagctgcaatctggttttgcaaccatcaatctcatgcttatatccacccttggtacaagatggaggctttcaagaagtgttatgaacatacagtttaccctataccaagccctgataagtggcccaaaacaggtcaaaatccaatcttccctccaggtgcaaacattttgccaggcagaccaaagaaaaagtgaagaagagatgctaatgagccaccccctccaaattgcacaaatacaaggaaaattggtgcaattatgcattgtagcaa

SEQ ID NO: 105950 - DNA, 569 bp, Cannabis sativa
aaattacgcacgatgtagaaaatgatgagtaggagtagttatattgttttcgaatgaataatgaagtgatttggtagctagtatacaatgaaatgggtatatataggagaagatggagaatgggattcaacaaagttgatcatcgattttagacttggaaaggatactactatttactttgaataggtagggtgtggctatttttctagtatttcatttgaacatgataaataaataaaaggtgtttttgtctggccgtatttcattttgttttctttgtttttcttttaaaactaaacaattgtaaaatttggaatacaataattttttttttaaattatgtatataattaagtaatatgctaatgtggcttctcttctacttcttttttttaaaaaaaatttctgttatataattttttctgggtaatgaaactgttattgagtgtttgtaataaaaaaaaaagtagggtcaaatacgatccggttgggtcgggtcgggtcagacccgattaaacttctgaggtaatcggggcgggtcggggcggggcaatggcttgtcggggcggg

SEQ ID NO: 105951 - DNA, 536 bp, Cannabis sativa
  modified_base (428)..(457): a, c, t, g, unknown or other
actgggcccctcaacaataaggggttatgtttggtccttgaaggttgacgtggtgtgtgataagctatctttggaataggtttccttatgaggtgaaagtagtgataatccaaataaaacaggatgagatataagacccctataattaatggagaagagatctgcaacacgtgatctccttatttcaaaaaagactaattagtagtttttctccttgaactttgacatgtactaaatcgtgctccctgaacttttttggctatcaaaaattctccctgaactattgagattgttaaatttaatgatttttgtctaatttcattcaattttattatttcagtgattgtttatttactaaaacatgctctctagactttgatatttactaaatcatgcctctcaaactgaactttcatccatgttagaannnnnnnnnnnnnnnnnnnnnnnnnnnnnnaaatctaacaatcttaatagttcacggggaatttttaacggccaaaaaagttcatgggacatgatttggtacatatcaa

SEQ ID NO: 105952 - DNA, 1018 bp, Cannabis sativa
  modified_base (422)..(428): a, c, t, g, unknown or other
aacccgaagaaggggatgtgtgcctggtcgggtgcccatactaaataaggggcaatgctgcctctgcatccgtactttaggaaggtagcagatttcttccgcctttgtccgacccagtttactcccaagggcattaagtatttgtctgccttgttcgtcctctatgccatccagaatttgggtgtgccttctccacacgaggtcagttggttttttgacctgaagtctacccccaagcaaggcaggtcggggcacttctacttctctcagtctgacttcaaatggttgacaggcaccacagataaggccgtgagcaaaattgggaatttcgctgacgagtattatatggtggtagacatgggcaccacttaaattcggtttcatatatattaccgtccacccctcacgctagctcttagggnnnnnnntcaaaggattgttcaactgtcggatgatgctcagaatatcactttgttgacctcggaggccaactttgtggagtacgggctttatccaacagattttgttcctcagcctgtgaaggagaagaagaagaagtccagtgctggccaggctgagggagctgatcaagagaatgaactcattcaactgaagcgtgaggctaaattgaagggaggtgcaagagccaagcagtatgctcaggaatattctaaatattctgagcaggagaaggagctcattcaactcaagcacgaggctaagttgaagggaggagctggggccgaacaacatgctcaagaatattctgagcaggaggatgaggctgaggaagagcaggaaagaccgctcaaaaggaagaaaaaacttccgaccgggcacaggcccatcgaacatatgattcagatcagggagcccagtctacctgctcggccatccactcctgtagtaggaaaggggaaagctaacctggaggagcaagaagactcgtcggatgacgatgcccctacagtacttgttcgggcagatgccccttccaaagtgcagggtactccatctt

SEQ ID NO: 105953 - DNA, 713 bp, Cannabis sativa
aaaagctaaccgaggtcacacatctcatcaccttatcaacccaatctacatcatatcccagccttatcatcattgcccgaagaaagtgccattcaacccgatcataagcttttgccatatctaactttaaagccatcttcgtaccattccgaaatctattctttctcatgcaatgaagtccttcatacccgataatagcattatcgtgtattaacctttcttgtacaaaggcactttgagtgtcagaaatgacagcactcatagtagatctcagccggcaagcaagacacctcgagacaatcttataaataacattacacagactaatcgggagaaattcttccactcgaactggtttctcaactttgggaagtagtgctatgattgtttcatttaagcactctagatcagccccttcattcaacatcttcaagcacaccgctataacttcagtttgtagtttaccccaaaacttctgataaaatagagtgggtaatccatccactccaggagctttaaccggattcatatgcttaacaacatgtattacctcgtcagctacaaacgggcgcattaattcctcattcatgtcatttgtaactttaggcctaactctccttaagacctcctcaacctgatccagatgaagagaagacgccgaggaaagacttccataataatcctccactaactttctgatcataccagtgtct

SEQ ID NO: 105954 - DNA, 601 bp, Cannabis sativa
ccttgccttaggaattttcttggattagctttgtcctagcgacatgatttccacagaatccatcgtgaacttcggataggagccgtggaacttcttcttcagtgacacatttgagcaatggcatcaagaatcctcttctgtacatgactccctttactatgatataccatccagcattccttctcattttcctagcttcatttcagttatctgggagtttcctagactcgaggtaggttgctattggggtcatccagtttggggatgtatcaatcattttgatttcttccgtgccagtgatgctaggctctttgaggagctggataggaaccaagttcgccttgtcacttggaatttgtctgagaccgtagcttttgaattgtttgagcagatcatgtattttgctagaatatgctatcatcttttctccccgagcctcgtattctccagatacatgatttaccaccagctgtgaatcactgcagatttcgatgtgtccggccatcatctcctgggctagccttagcccaacgattagagcttcgtacttggcttcgttgttagatgctttgaatccgaacttgactgcagcgttcaggtg

SEQ ID NO: 105955 - DNA, 850 bp, Cannabis sativa
  modified_base (93)..(93): a, c, t, g, unknown or other
ttgtacttttgttgacataatataaaattttataagcatcatatatattttttttatttttatttgttgttattatatatatttctattgtanggtatatattttttgttatatggtatataagttttattgaatagtatgtatattattttattttagatcattcatgtttggtttttattttattatatataaaggtgatatataattttattaatatggtatatataaatattttttaataattttatattattttattttttattgtaggtatatatgctttgttgtatgatatatgatttttattgtctatactatattatttatttaagatgatatttagtttctattttattatatataatttttttggtatgtatacatattttaatagtattatatataattttgttagcataatatatattttttgagtattaatttagtattgttattacttctttgtggtatataaatttattactatagtatattaattttcaataatattatatatcaaatactgttatatatatatttaatgatctaatatatttattcgtttatgttacaatataataatatgcaatactaaaaaaattatataatttaattaaattattataattttttttttaaaaaaaagtaaatgtatttttataatttttattagttaatttattatattttgctattttttattttttttttaaaatgacatttattaacttaatttctaaatttatggtcattttgtatctaagctctacttttaactcttcataaaaaacctaatgaaatcataataagaaaagttaataaaataaaagagatttttacaaaaata

SEQ ID NO: 105956 - DNA, 528 bp, Cannabis sativa
cgaaaatgaatagaaaaatataatatgaaaatagggaaaaagaattattagttaaagtttcaatatagaaaatcttatgaaaaataaaactaagcataatgaaacgttatcttcatcttaatcggctcagcagtttgaatggtgaattgattgtactttggactctctacatatatacaattggattcttcatttaatgactgataatctcttcgtagttttttagagaaacaaggtggcgaatggtctagaaacaacttatcgagaatattgaagttttaagtcttgagtctataatcagtccaacaaacaaggatctattagtattgactacccaggccatgttaagaaacctataagtgcaaaagagtctcagacataataggaaattcatatttgcatgtctatgattcatatagttttcttggaaacaaataaactattatattatataagcaactgatgcctctgaaatgtgatcatggcaataaatccagcttattggcagctgagttaaacatctctctt

SEQ ID NO: 105957 - DNA, 525 bp, Cannabis sativa
  modified_base (333)..(339): a, c, t, g, unknown or other
aaaacaaaaaaacatgttactttaacatatggacccaatttaatcaactccttaaacatatggtataaatacacagtacattattctttttgtaattttttttatatttttacggtatcctataaaaacaacaccaaaataacaagaaaataacaggaaaataatatcaaaataacaacaaaaaaataaaatacaaataacaaaaaatcaacaacaaattaataaaagtatgatataaaaatacatcaaaagactatttttttttatataaataaaatcgtaaaaatatttaaaatttcgtacaaacgaatttttgtaattttttttattatnnnnnnntatttgtgaaataatccctaatataaatatgggctattttcaaaaatatgggaaaaattattaaggttatgataaatatggcattatctaaccaatcaaactaaaaattcaaaattaaattaccatattctaaaaaaaaccatataaaacattaaaaagaaatctgaatttaaaattcataaaaaa

SEQ ID NO: 105958 - DNA, 3222 bp, Cannabis sativa
aaaataagtagtgttcaaaaagtaaaaggcccacatgcaacacaaaacataaaatgtctatactataaaaccataatgatgaaaactaataagttgaatctacatgtgtgcaggtgcaggtggggctgaagaagaagctgcaaagcttggatcacttgagtgtgggccagccatagcctccacaagttggctagccacctagtcaaagtcccagccaaccacctccttagcagatgggctgaccatctcctcatcatagtgctttgaggatgacccctcaggctggacagtggtctggtccgcttccaacctactctcaaacatcactttcccttgtgtagtgtactctctaggaaagcatcgtcacccatgtatgaaagattagcattgggtttgcgcagcttaaacccatagatgagttctaaagacaagctgacgtactcatcccttatggcctactagccataaagggatgccctcagcttctgttcacaccccgtgaggtcagtctccaacctggagatgttagcatcttgcatggtgttctcttgattcctggagccaagcataggctccaaactagaaatcatgctccgattttgtaggctaagagcctccatctcaaataaagcctggtcctttgctaggagatcagcttcctttgtcaggagggtaagctccaaggtctttatctgctcacgaagagcgctcaaagaccccctggagttatcatgagaaaagttcagcttcataagggcctaaaagcaaaacaaagaaaaatttagtgtcaaaagacaacacttgctggccagcccttccacaaaactactaagattggccaaccctcaaagacataacattggccagccaactctatgcaacggccactattgctagccagcctgtaataatgccaaaaaaatgagcaaagttaagtgtgcaactcatcgcagataaatcccaaaggccagtaggataaagcttagctagctcgttgtcatcaagcttctgaaactcatcatccatagaaggaaaagctctctctagatgcctgcgagctacttccatggctttttgcttcgtggctaagcttgctcctcgactagatttttaggcacccgtacttgaaggtcgttccctcctaactggagggtcatccatcacaagctgcccgactggcataggcccttgaggaggaagaggaagagatgaacccatagcatctatagcatgagtggtccgaccaccttggcccttagacaaaccgaaggctcatcaaaaggtccacaagcaagacctctcaacctagaagacatatctacaaaaagaaagtagcaaagtcaaaatgcaagttacaaatattcaatgtaagacaatatgaaagaaggtgcaataaaccatcaaataccattgtccttataagaggaaccatttgaatcctcaacaaccatcttgcccttgcctctagatgcaggcaaggggcgagtaagtcccacagagctctggcctccagacctaacctaaagagaagcatcaccaactgtgcccccacaagccaagaactggcagagggccctttctctcttctccaaacctcgagctacccaagatagagacacatcatcatccatgatagggacttgtctatcactagggtagatccctttaacagttggggctccatccatactaactgattgacccttgccccccacaactctagaggcaggagggtacaggccaaacctctaaaagttggccacactggcaaatctctttatgttcctcttctccacaaggagggacaggatgtgatttgcccaatccctcatctataatgtacgaatggagtgcttgtaaaacggcacccactggaaccagcggtgtcgcaactcatggatgtcctaagcaatgaagtagttcttggcatacccgccaacttttgacatagttgtgttgttggtgtcacccaaccactggtagccaacttgactaaagtaaaagtacctcgtctggttctgctttgggccagactttagatcaaaataatatcaaatctcatatggagtgggctaaggccagcctatctctacatacaaaacaaacattgtcgaaaggtattttatactatttagggtaatttgtgttagacacatcctaaaataagcagcaatgtatctgaagtaagggtgtagcggcaacactacccccctgctatttataatgctctaacctttagcggtcatctcacactaaacaccccgcacaagaccactagctaatacctcctcaaaattcttgaccaagataatagatgcatgagagacccacttgtctccctgtgatctatcatccatatcctgaggctcaaaaggctgaatcaagacatggtccattagtgaaggctgaccaagcctattcaatggttccttgtcgatatcatatctgcccagatgacaattgggaaagacaaaataagttctaataaataagttctaataagtccttctactcataggcgcaacctcccctaccttagatttagagttggaactcttgaccccctagtaaacctcaggcatctctacctgaccaacctttggatctacatcctcacgaggctatgtggcctcctctaaacctctgactctacccatcgttaccaccctggaaacatgaggatcatatggtggcgctctacaacttgtttgcttcattctgtccatgactatcagtctagaacataagaaaagcaagggacaaactaaatgttctctctcaaaagtaaggctaataggacatatgacaaaatggctattacctcctcaaatcaacactcgaaatcaactgcatacaagagacaatgggaggttaacaacttcaaaaagctacaaatatagttctaataactgtacctaagggtaccttccaggtaaatcacactcctactgatggttggtcagctacatgatggatagagggggctgttgttgagcctgagaaccctggctggccccccatgccgctggttgttgagatctagcaatttttgctgtttgacctttgaggaaaggtctatcctccctgtggcaaaggaagatctatcctagttcctgaggaagaaggttggttagcatatcgatagaccctccctaatctatcaataagtcttccttgaagtggatctctaatgatgtccttgttgggttttatgacctaaat

SEQ ID NO: 105959 - DNA, 633 bp, Cannabis sativa
tgggagtggtacgtggtgaccagatgctgactcgcgattgcaatcccatagagctacaacatagaaaagccaatcatcagttgatggcaattttggcagaataaactgagaagaaagataaagatcttgaccctcgagttcaagattaaagaaacctgctaaaaccaatcgatgaatcgaaagaggttattctcgacccaggaaatcccaaaaaatgtgtatacattgggaagaacctggacaagcatctcaaatagcagctaataagctttttgaaggcgaaccaagattagtttgcctggagacatggagataagatcgggatcgaccctaatattatctgccatcactcaaatattgatccaaactacccagcaaagagatagaaaaggaggcccttggattctgagaggcaagggaaactaaaacgataggttgacaagttgttagccaacgactttttacacgcgaggtgattatccctcatggatagccaatcctgttctcgtcccgaaacccaacgaaacttagagaaattttattgacttttccgatctgaataaggcgtgtcgaaaagactatttttcacttcccaggattgaccagttagtggatgcaattgctgggcacgag

SEQ ID NO: 105960 - DNA, 1017 bp, Cannabis sativa
tcctattttatcaaaaatcatagtcattgggatatcccgaaacttgacacttactttgacaaggacattgttgattttatcctcaaaatctcaattaatccttttatttaggactgtctcatttggggacatagtccttcgagttcccttaccgttaaatctgcttatcatatagccaattctcacaaccctaacccaagctcttcaaaccctaatgtcttcaaccagtggtggaaaaccgtttggtccttaaaaatccctcccaaaataaaacattttatttggagagcctttcatcactttctcccttctaaccccaacctttatttcagaaaaatccttgatgaccctttttgctccatgtgttcgaactgacttaattctaattcgcactccttgttagagtgttccaaggctcgaaaatattggataagtaccagttttccaacttcttacattaagaattaaaactgtgacattaaaaaatttcttttaagagggttagacacttttcaaaaagagaaattggcagtatttttttgtattacttggagcatttggaacaatcacaacaaatctttatttgctaatgaggaggctgtatatataaatacaaaaccctatattttatcctttttgcaggaatacatctcagcccaagacaacttctccttcgagccaacttaccaagcacaagatctggaggaaactcagttaagatcttcacctttattgcctgctacaagaacttacaagcttagtgatgcggcagttagaagtcaagacaacaagcatgggtatggagcaattgtgcaagactctcacggtcgaataatagcaggttttcattcttttgcttccacgggtctttcccctatttttgcggaggcagaggctcttaaccgagctttgatatggtgtaaagctgtccattttctaataaacttggtggtctcagattgcttggatttagtcccaagaattctcaaaaggaaaaaagattactcaactctatca

SEQ ID NO: 105961 - DNA, 1974 bp, Cannabis sativa
  modified_base (29)..(39): a, c, t, g, unknown or other
tattaaaaaaaaaaactaaaaactaaaannnnnnnnnnntacgtgacttggcacgtaacatctatctagtatacatatatacatatttttcaacatacagttttaaaataaaaataaatatttttatacatatttttttttttcctttaaatttgttatttgttattttatttattttaatgtgttattggagacataaaatagctataatttgttttattttgttactagttatgtgaaaaaaaatattttttcataaatattaaataatttgaaaagtaaccaatccaaaataacccattcattccacacttaattggattgaaaccaaaatatgaaatccacatttagtgcacatagaatgcactatgatcaaaataatacagattggattggatcaacccctactaaaaagcctaagtcaatacataaatctcaaaagaaaagataagaaatccaagcaaaagagcacaatttcccgcttccatcaatgctactgtttctgtgtcaatgacttttaaagtccttcaacttcatagatttaaacattatgaatttccaatcgagcaccgccattaaatttcagtttcaagtactctacatctcaacccaaatgagttagaaatatttctactccttcccttaacctggcagatgagaactatgaatcctccattgttgtttttgggcgtctggtgatagataagcctttcagtaggaaatctttcaaaaagtttttcacttcactttagaataagtatcttgagataacaattgaggactgcatagatgggttgtttttgtttaacttgaagaatagggttttaaggggacaaccttggcatttctctggtcattatcttatcctccttgaatcttctggaatggatcaaatcaatgctgaagatctcaaagctattcctttttgggttcaggtttatggaattccttttcaacggatgacgaaagagctgggtgaaaggattacaaattctattggtgaattctcagaatatgacttgacccgtagacgtgattttatgtctattagagttcttgtgccttccacaaaaccgattcttagagggattctattggatttggggaacggaagagacaacatatgggtgtcattttgttatgagcgactgataactctgtcaatattgtggttgtttggatcatgagaagagagattgtgtgactctaactgaattagtggaagaagggcagtatcctatccttcaattcaatgaggatattctgaaagctatagggattgatcatggaatgcccaatgctagatcaccaactattggtctgaatgggtctctacatcgggctattgctgatagggctaaggaggtttctacatctcacacaaaacactcgtttgtggagccttcacagaagaagcttaaaataggttcttttagtttgacactgtcttttattttattaatttatatgtcaaatttatgtcaattttataatttaaaggataattgtgatgaaatttttttgatataaatttctataggacaagaagaaagtgttactgaagagaaaaatatatttcttgtagaaggaattaatccaatgaatccaaaccatatggctaaggagacaagtgagactttttctccaagtaactcatccaataatatacagaaggggactatcaattatcaattaactaaaagagacgaaagccataaaagagaatcaggataaaccaacattgaaggtggaaaataacaattgtctatgtcacaatgaaaggggaagcatgaatggtgttgagataaatatctgtaatgttttattatcaatagagtccagtctgagtttcacaaataactagctatatttaatttatgtgggtgttgtttatgttattgagtccattttgtttctatggcttttaagtaataaaaacttttattatcagtaaaagtaataaaataaagtgca

SEQ ID NO: 105962 - DNA, 918 bp, Cannabis sativa
taaattctgggtccgccactgtgtccaatggagttagaagaaagctaatccaagaaaagaccgcaaaagaattgtggaacaaactagagcagccgtacatggcaccatcaatatcgagcaagattaatcttcttgaaagattatacgggtttagaatgaactcttctcttttcttagatgataatattgataaatttaatgaaataattattggtttagctaacattgatcataaggtagacgaagaaagtcaagcaatcatattgctcagatcattaccaatgacatatcaagaagttaaagcagaaatcaagtatggaagggatgtgatctcgttggagggtgttcatgcgacattaaaatcaaaagactttgaattgcaactcgagaaggagactagaaaagatgaagcctatcttgcaagaggaagaagtccaaagagaggatcatcaaggaacagccagtgaccatcaagatcgaagtcaaagatcaaagacaatcgacaatgttatcaatgtggaaagattggccacattaaaagattctgcagtcaattaaagacgcaatctggtttcagatccaactatgatgacaaaagatgcaacagaaaccagaaccagtattcaaaatctaatggtcatggaaatcaaagaaaagactatgcagccgtggctgagagcaatggaaatggaagtttagatggggaattattttttattttttagaaaataataacagtaaagagtggatcattgatttaggatgcacttatcatatgtgtcccaacttagaatctttctttgattaccaagaaactaataatggtggtagagtactaatgggtaatgatgtttcttgcagggttgttggaattggtaaggtggctataaggcaattcaatggtgaagtgaagatttt

SEQ ID NO: 105963 - DNA, 1083 bp, Cannabis sativa
tgggcttgggaacccatgggccatacaattcattaaggatattgttatccaaaagaagcccattgtgttgtttctttgtgagacgttggccaagaaagagatggttgagaagcttcgaatttgtattggttttgaaggagcgtttagtgttgatgctcaagggaagagtgggggggtggctttactttggcgagatgctgaggaatttcaattagttagattcggctctaactatattgatggtattgttcatagtcgtgactatggggattggaggttgacggggttatatggtgagccaaatcgtagcttgcgtaagcggacttgggatcttcttcgttcattgaaagctgagtgtgagttgccgtggtgcatagttggggacatcaacaatgttacttcccaacaagataaaaatggaggtaatctttatccgtcttggttgattaatgggttttgtgatgcattggatgagtgtggtcttcatgatttggatttgagtggctacccttacacgtgggaaagagggcgaggaactgattcttgggtggaggctcggttggatagagcgttggtttcacagagttggcttgctaagtttcctttggccaagctatataacatggaagtgtccacttcggatcactgccctttacacttagtccctgttaccgagactattcatgtgaataatagagtttttagatttgaaaactcttggctaaaggaaccaatgtgctttaaagttgttgaagacagttgggatttgtcctccggtctctccattacagaaaaaataagggattgtggtaatgtcttgcttgattggggaaaagattacactggtaattttggcaaaagaatcaaggcttgcaaggctgaaattaaacaatggaagatagggcgcgactctgagtctgttgagcgttacaaagctgctgaaagtaacttgaataatctttatttgcaacgagaaatattctggaagcagaggagtaagcagctctggttgagcgaaggcgatcgtaattccaagtatttccatgccaaagcaacatcacgaagacgttcgaatgttattca

SEQ ID NO: 105964 - DNA, 530 bp, Cannabis sativa
  modified_base (26)..(29): a, c, t, g, unknown or other
ataaataattttttaaatcgcttaannnnttttaaaattttaatttatttttaatttttttaataattcatcaaaatattttttttcttaacatctaaattaatttttttaagatttactaaaaaaaagtgttaaatctttctcatgtttattttgaaggggtacaatgtgatagttttcaaagtttaaggggcaaagttgataatttacaaagacacgtcatcatttaaatgaaataataagccggaacctaatagaaggaccaaatttttgtagatgtaaaagttcaaggagaattcttaacaagtcgtatattttaaggggaaaaatctatattgttgaaagttcagtagtaaaatttgctaattattcatttgttaaagttaatgtagaaagccaaaaagatactgttaaaccaagaattctgttaaatttaaatttaaatttctttatataaaatatcttcaaaattttcatttttaaatatatatataataatattataaaattagtaaagaatattctgttaa

SEQ ID NO: 105965 - DNA, 770 bp, Cannabis sativa
tcttactggaattgcagttagaatattgtctagcagcaacatttttcacacactagatctttccagttgcgccttaatttgttttttgcgaattaatttgagataaaactctatacacactcatcttcattttaaattttataacaaattaataaatgtgaatttgatgactaattaatataattaaaaccaagaagcttaattataatatagctaggtggaattgaagacattattattatcaagatcagtgcaagtactatagtactatatatatgtaattatttcattaagtggttggaagttcattatcaaatattgtcccagtacgacgtaagttactatttcattattaagaggtacttggtggttagatccatatatattatatacatatatacgagagaatttaatatttattattgtttttactatgtatatatgatttaccagtttcatcatgcatgctaatacaaaactatatatattttttaaaattagatatactaattaattactatctagctagtttaatatatttttatgattataacaaattaatttattatttaatttgcatatatatatataataatatgaatgtgtgtttttattttaagaaaaatcattatttatttttaatgtaatactcaatagtttggtgagtggttttacatattatttattaattaaataaaaacgtaaaacttatattaaaatacatcaataataattacctcttgacaacatttccttcacaattttcatgt

SEQ ID NO: 105966 - DNA, 546 bp, Cannabis sativa
tccaaattcgttctttaatatcagtaaaaagttgcttcttatccctctcagagtaagctggcaaacccaagtatttttcatgacaatcacttataggcatcccaagaatattctgaaaagagtgctgaacatgtggaggagtatttggagagaaagacatcactgatttatccaagttgagttcttgacccgaagcacggtgatagatatccaaagcacgtttgatagacccacaagatcgatcatcagcttgacaaaagagtaaactgtcatccgcaaaaaataaatgggatattgtaggagctcttctagaaacatcatagcccttgagtcgaccaactctttcctcatattgtaataaacgagacaatccttctgaacaaatgaggaagaggtaaggggaaaggggatcaccttgacgaagaccccgctgaggagtaattgaacccaccaccgaaccattgatattaaaggagaaggaagtagtgtgcaaacatctcataataagggagatccatcgactattgaaacccatcttacccatta

SEQ ID NO: 105967 - DNA, 650 bp, Cannabis sativa
ttatgctgccaaaatttcaatagattaggataaattttactaagaaaacataaatattgaaggaaaagtacataacacaaataactagttaattactcgctagttctgataaattaggtgacataaacaaataattatatacacatttatataaatttatcaattataaataacaaaccaaacaaatgaattgattcactttaggaaaaattattccattcccggatccattccaatcaactaagcattatcctaattagttaattacaacttatacaacttaataatatgaactaaactaaaacaagaattatagtaatatataaattactatgcattaattgtgagaaacttagctacattatgtaagtagtaactaattataattagttactaaatattgatttttttgttaggatttttgttatggataaatcatggatgcgtgaggagagagacacaatgcgatttcaagtgggttcgatgcatttttagagtttgccttaaagaattctaaaaatcatgaatgtattcaatgtctgtatgtagattgatgtaatagatctaaaggaaatattacaatgattaaggaccatgtgcatttaggaggtttcaatagaagttatactacttggtattggcatggcaaa

SEQ ID NO: 105968 - DNA, 775 bp, Cannabis sativa
gaacctaacataattaccacccattagttttaaatttattacacattttttctaatacaataattaaaaaaacaacagaaacaaaacaatttctgcactgaagaattaccttctgcgagcacgagcagtgaaaagcttgacaagttcatcggtagacatgtcaaggagagcatccaaatcaactcccctgaaagagaacttcttgaacgttctcttcttcggaactcctgcaacagcaacatcagcttcaacttcggcctgaaacatcaagacatagcaacaatgttagaatttgtaatgaaaacgaaaaagaaataaagatgaaagcttttcaaattgcaatattaacccaccatgattgcagcagctactctcggaaacctaaattcttagttggagacgacggagcgacgaccctgcctgagatttttccagcgaactaaaagagagagagagagagagaaaaccagaggtgagaaagtatctcatgcggcacagggagaaaaacatagtaaaagattaccttacctacggcgaatgcaactgcgtgtacgaccggcgaagaagatcgtcacgtctgggagagaatgtacagagaaaagtgataatggaaacctaaaagcggcacattgtagtgtgttgtgttcttatgtatggttctagttagggttaggtgaagagaaagataacaggaggcccaataacatgtgtaaagcccatatgatttgtttctcaattctatggccggccttcgttgggttcaattaaatgggtt

SEQ ID NO: 105969 - DNA, 757 bp, Cannabis sativa
aggattaggctatcaccgaactgctcggggctgaacctctataaaattcttgtgtcttatcatttatctcttatcaaaaagactcattgtcgttggctaaaagcgaagtcaacacaattaatgtaaggttttctcaaacccttacgtgcttatttcattgttttagaaaattcatatttaggatgtccattcaacataattgttagtaaatctagaccctggtaaaatattcccagcacggtgatccatccaacgcagcccatgcaaagaagctagcctataaatatcccagaaaaagcacaagaggatgggacctttttcagatggaagactcattcttcatcgtcctaagcaaacacatttttgtaaccctatattcaactccagaatattcctactaagcttcttcttcttcaagaggaacacagtggaaaggggttatagtccattctacatccatttgtataaacagttactagccaaagagcctaataaaatagactagtggactaaggatagttaacacctaaaccacgcaaaaatatcttatatgttattatgctatttactctgttattactttcttaagctctaaaaaatatttacttgctaaaaaactcggtaaacacataatgtatgggaccacctaattaggtgaagtgacactactacaaaattcactattcacgtcggtcaacgcgactgttcatcgcgttgaccgacgtgaatagtaccatattcaatatattcgtcattt

SEQ ID NO: 105970 - DNA, 559 bp, Cannabis sativa
ttatcccattttaccaatattccccattttaagtttagggaaaaaattattccttaatgtaagcatagaaattcaaatttcccttcctaaaatagctttaatgaattcaaataaaaaaaatctaaaacgatccactcccctcccaatcgcaacacatttctcttcaaacccagaacatgaacttaaacccagaattcaaactcaaatcccccatccacatttacttgaatctccaaagatcatctctcactgttgaaccaaatccactttcaaactcctctttgtactcttctctgttggaaaataagaagaactttggagagaatacttgattggaagaagctatattttatatctcaacttgtgtgatttgtgacttcgtacaaaatgatgggattacatctctatttataggactctatggactaatctagaaacattattaaatggctagcttctacattgttctacatagttctctctactaatacaagtgaaagataattctaaaaaatttaagggtactcaaacaaataagaaagctctagacactttagta

SEQ ID NO: 105971 - DNA, 1556 bp, Cannabis sativa
  modified_base (896)..(900): a, c, t, g, unknown or other
gttttatgatttttttaaaactctgaataatttactaacattcaaaacttatgtttttgtaatgacaacaaagattataattctttgaaaaaatgataataataatagtaatgagtttttttatttttacacttcaaaacagttttttttttgtatttttatggaattttacataaaaactcctattgcaactagcgctgcaacctaaattgtaacaaaaaatcgtatagaaacccttattgcaactacgctgcaactactttaaaaactcaaaccgtaaattaaaaaaataataaaaaaaacaatatatgaagtaatttccctaataataatgcaacaagaagaaaattattatttcattttgagataattattaatatggtatttattaaaaggaaattttgacaaaccatacccatgatctcttaatagacgacccattttaaaattatatacttctaatattttttaactttaaaatacctctaatattttcaaacaaattttctctctccaactctttaactccttcctctctcaaactcactttttctcactccaagcgacacacccacgaccccctctcctctcaaactcactttttctcactccagcgacacacccactaccccgtctcctctcaaactcactctatcttccacttagacaaactcacccacaccctccaccgtctatcgcattctctcactgtctatctctccattgctcctcggttcctcatgacaacccacgacaaccattacaaaattttttacttttagtcacaaatttcacaataaaatttttgactaaaagttaaaaagctatgactaactataaatcatcattcctatgttgtggctaaaatatctatggctaaaggtattagtcacaannnnnacaatttgttgtgactaaatatgtttttaacgacaatacattttgagtctaaaactaaattagtgacaacttgtatctaaacactatgttttagtcacaagtaactttttattgtgattaatagtcacatttagtcctcaaattgtcccaatactttcggtattgcttggaaactttaagaacaaatgtcagatggatgttaccactccaagatccattcaaaatggtcttcccaggatggcattgtaagtaaaagggaaatttactataacaaacgtgttgcacttaaaagatgatattgcattgcttccgggaacttccccatttattataatcaaaaattgtatttttcccatggagatcaatgtgtctctgttaaaaccatacagttgaatcgggcatgataatagattggcttttaccagaccaatggcttggaaggctattttaaaaatgatattcaaagagcttccattatctacgaggattctgtaaactgttttatttgctatttgagcctctataactagagggtcattgtgagggaatggtacatgcctagcatcatcttttgtaaaggaattggcaaattcatcatccttggaggatgggcaggtgactatagtaggtggcaagcttcgttttggctcaactca

SEQ ID NO: 105972 - DNA, 791 bp, Cannabis sativa
tcgtgtttccaggagtttgcacgtttggattcgtcaccattggatcgccttgatcagcaaagcctccccttcgagtttgtacaaccatcctattatcctgtcaagattaagacaaaagcttgtgtttttgctctcaatgaaagtactaaaatattgacctcgcttctagccaacgacagtgagttaaaataaagcgattagataaaataaataatagaaagcaaaaactataaagtgaaaagaacaccaaattttaaagaggttcaaccccttaagaatggtaataacctactccccttgtatttgtattgacttgagagaagaaataaagtgttcttcctctctaaagctcttacaatggatctctgagttattttctctcttagatcactattctctcttaaatgtttctctggattaattctttcgtaccccctcaatagtgtgattatgccactatttataggagcttataattacatgaagaatggtttttcttattctctaataaataaaataggaaactacattaattctataattacaatgtaaagaataggaaaccaaggcgtatgccgtattgtctttattctctgactaaatcccacgaatgtagggattatctacgtgtcttggaagcgatgagattgatctctagaattgctaatttatatgttttgttcggtacaaatggatctgtatcttggtcggacatcttcttgattaacctgttgggatatccgagtgttacaaagatttaaattaaccattcatgagctgctaggaatact

SEQ ID NO: 105973 - DNA, 816 bp, Cannabis sativa
ctcaatcaaaactcttgggaacataagcctttctttctcttgtaatcgcatccaccataatagactttcccaattgcccaacaatttttaacaaggatttctccccccaatatttgagatctaagtcctctaattgtatccaaattggcaccattttcacatcttctttcttaatgcttgagttcgggtcccatggcttcataatgactggttttctattgaagaaaatataacccccattcaatacttcatctctctgcccaacagagtgaaatctaattaagaacactccatatgctaacagctttaccttatccactttgtcattccatttctgttttgcaaagccttcaaggacatgtaaaggtggattggctccaagaacatgacacaccaaagaaggcttccaatagttaacctcatcttctatatcttctaattcaatcttcaccttcctatcttgctgagaattcttaaatgaattgtctaaatttctcactacagttgcagatctcagaataggaggagtagggttcatacctttggataggttactgttacattgctctatagccttgataaagctcacaaaatcgtgttgaacatcctcttgcctttgaatttctctgagtgagcttcgaggagacagaggttcttgaaataagtctgcctggttcgatctcaagctccttctcccctggccaaattcgtctggttcatcctcacttccagaaagttcgaacggttcaacctcgtcaggaaggttgatttgagattgcatctccatttgaccacctcgctttccctggttcttcg

SEQ ID NO: 105974 - DNA, 2248 bp, Cannabis sativa
  modified_base (364)..(364): a, c, t, g, unknown or other
  modified_base (2213)..(2223): a, c, t, g, unknown or other
tctaacaaaatgcttaaaatacaacttatccattataatggtgtaagattcttgagtgattggggtgtgctccggttttccaccaccgcccaacaagaaataaacattcgacgggaaaaagagagagggaagagagagagggaagtcttttcagttttttctagagagagagaggtgcacgagagggaagtttttttagtttttaacaatttttttaatttttttaaaaaaagggtaaaatgggaagttcatgtaatcaatggaattaatttgtacaaattagtgaagggtctaaattttgatattggggttttattaggggcaaaaagtgaaatttcccttttaaatttacggtttgggtttntaaagtggttgcagcgctagttgtaataggagtttctatataattttttgttgcaatttaggttgcagcgccagttgtaatagggatttttatgtagaattctgtaaaaatgaaaaaaaaaaattggtttgaagtgtaaaaataaaaaaaaaaaaccttttaatttattaatatgaatcaatccactcataggcaacatatttatacattgataagaaatcaagcttgtgggcctctttgtacaatgaacatgatcctgctatctttataattactttcagcactaatgtttatggggagtagtgctcctcctccatatgctcaacatgtttctccagctagatctttaggattcgagtatttttattaggtattattagtatttaacaattttctaaatgtgtcactttatatctcataattgtataatgatactttttaaaaattattacattaaattataaattatataggaattgatacttaactaaaccactaataatatcaaaacggaaaaaactgcaaaactgtagtgcttttaaaatttttcttaggatgcacatccatttatatatgtcaaaataaaagactagctgctccaatcattaagaagaatgctcttgataaataaatattaaactcactttatagagttcctaaattgtgtctaggtgtttttttttctcgaagaattagactttttttatgagattttgatggtcaattatataatatgaattagaattagaattagaattagaaaaattaagttaaataagatgaatataatagatttaacattgatttttggagataatttaaaatgatatataagtagataattctaagtttaagatacttagcgcatgctttgtttgtgataaaaaatcaagtttagaggtttaagctaatattttgtaacaactaaaacttttacaatccaaaaatgtaaaaaaaaaaaattaaactttttaacatcttgatgaaatcccaaaaatccataagaacaaaacctcgtgcgcacttttaaaagattcatagtttataaataaaaagcactaaacacaaacattctaaatgttttgaatactttataaattttataatagtctttaaaccaaaagcaaacgatttaaacaatccccaaatgttgctctatatgttttgcaatcagactccatctcttaatgctcaaattttagcttacctttacaacaggaaacaagtaagtaagcaaaaaggacttactaaataaaccttacagagtagaaaccaaacaacatatcaatcacacatttagaaatatcattcaagagagatacaaaagaattagagaattcataggtcctagcaatttcttggaataatgccaagttgtgaaccattcaaacagagttagaaaatcatcaaccttagtaattacttggtataacgccaagacatgaacaatttttaggcccacgcataaaaactatgataactaactactaacgattccataataatgagatcactttccaactcctcaattttacgacctcatatttccatatccttacgtccccataatacaatttcgaaaaatctcatttactccataattactcctaattccataagcatatataatagctcaacaattataaatcacatgttgctagaacaccagagagcaatatcccatcatattctatcatgcatctaaacgtatacaactgcatctcagaccattcttttgattttagagacaagataaactcccagagatattactatcccatacctaccttccccatcgtccatgttatgttttattgagaagagagaaaacgagagagagagagagagnnnnnnnnnnngagagagagagagagagcacgtata

SEQ ID NO: 105975 - DNA, 714 bp, Cannabis sativa
attcagttggtatttaacggttatctaacgggcgtttcaaatctgtaaagaaaagtaaacataaggagattttgccaccaaaaaaagataaggagattaagtgtataaaaattaaaacgtaagtgagtttcgctataaattacccaaaaatatttatataaagtcccaatttaattttgccataaagtaggacaattgtttgtattggttattaaattaaaatatattgaataataattttaaaaatatatatattgaatagttaaaaaaatagattttttttttttttattaaaagtagtttttttatacttttatagaaattcacataacaattaatagaacaatttaaatcgcaactaaaattcacatagcaacacatataaaaatcaccggagcatttatcatagcaacctaaataataaattttttttaaaaaaattaagaaatagtatatgaagtaatttctttaaaaaaattataataattattaaatcaaactatataagatgcaatagtaatatgaatatataaaaattttgtgacaaattacttttaaaataagactattgattgaaatttttttatatttatatgtctttattttgagaggagtgctaagaagacctttgtatttcattttctttactataatttgataaatagtgtcatcattaagtaattatttttactaaataaaaagccatcatagtca

SEQ ID NO: 105976 - DNA, 610 bp, Cannabis sativa
  modified_base (502)..(520): a, c, t, g, unknown or other
ttgcttgggaaactgtcctagaattggttaaccggtttgcaccaattttcccaaggaatccaaaacctgatcaaaatgtgcccaaacctcaccaaaacttccagaacacctatattgacctcaaataatataatccaagcaataaaatccagaaaaacatccagaatcaacatatgccatgtatgaaccaagcatgagtttcaaactcaaacttgtgcatccaccataccaaaccctaaaaccagcaactagaattcaaacctagctcaaattgaacataaaaattgaactacaattcattcaaaccctaacagcccctataattaaaaatcatatgcctaaaaccaactaaaacttaaggaattcacaaattaagagtttctagggtttaccttcactagctactccttgaaccttattgaattccagtaaaaagaagagattcagctgggttccttctggtttggggtggcctagcataaagagagagagagagagagannnnnnnnnnnnnnnnnnnagagagagagaaagagagaaatagggaaattattacaaaagtaaacaaaaaccaaacttgcattttgaaagaaaagagagagagagagag

SEQ ID NO: 105977 - DNA, 765 bp, Cannabis sativa
tgattgtactctttcaatctcataacaatttctcattttttttttgtttaatcttaaattagtatcatatggtctaataagagaagaaaaaaaggaggtaaaatataccaatagaaaaaaaaaatccaattactacctaaagtacgtagtaaatgctattatttatatgaattcttgaccgtatgacagaagccatagcattcaaaacccagaagatgtttcattactcattgctcagaccaataaattacttagtgcaagaaaagtaatgtaattccatacgtagaaaaagtttatagtgatttaacttaatacgtaatattattaattataagaatgaaagaaagaaggaaggaatacctccatgaccaggaaaggagggagccagtgagcttagcaaaaaagagatgaagaggtttgatgtgatgatgatcacaatgaaatctagagagtaagctaaaacaaaattaaaaataatggaaagaaagaccttagaagaaaatttggtctttatatctttcttaaaaagggcttcatgattccatttaatttaatatggttgggacccaccttgatgttaaaagatcagcctcatcagccattattataactgaaattttacacaaagtttgtgatctttcattggcttttgaaagttacaactgttcggacaaataacaacagtccaccagttatgttaatctaccaccaaatattcaaaccagttcacctatttggtatttgggttaaactaacacgtaacat

SEQ ID NO: 105978 - DNA, 602 bp, Cannabis sativa
gaagtttacaaaaaggatctgcccaaaaaagaaatgggcgcgccgcggcatgctaaataccatgccgcggcccatgggttcaaaacccagaaaaacagcagcaagaacacgaaaatcagcttcaaaacacaatcaaatcaccccaattcacaaccaaactctcaaatcatcaaatagggttgctaacaaatattagagggtcaaaataacctatttcatgcatcaatttctaataataactcccaatttcagattgcaaaacataacataaatcatgctttaactcacaattcaacaagctcaagaacttgagctaaaaatccatcaatctagaatattttccagcagccacataccaaagtaacatggatttcaacctaaaaaataccctaaaaatccaatcaaagctcaacaacaaagaatcacaactaaatcatggaatttataccttaatctcttaagagcaacaaaattcatccatacatccataaacaagaaaatttcaactaattcatactttttccacaacactttcagcaaggaattcaataaaaatattcagtaagaaagctacctcacttccaatccaaagctaaacccaa

SEQ ID NO: 105979 - DNA, 1060 bp, Cannabis sativa
ttcaagctagggtaaaatcctcttttttacctttcaaaaaataccctccacatgaccccttaattcccacttagagctctaaaccacttgtcttttgccacctcagtcatttttcgccacatcaattaatgagttgccacgtcatcttttttctacattaatttcaacattcagtccctgctactttttctacagtaaaatccctgcaaaacttcagcaaaaaacttgcattttctctattaggctctttttttccccaaaatctaaataaaacttaataaactccactaacaactccaaattacccaaaagaacataaaaatacaaaataacatatattctcacaacatggaaggaaaagaactaaatataagtaaaatacatacaaaaattaagctaaaaaagcattgcaaataactctttattcaagagttatcgacaccaatggcgccctttagcaattctcaaaaagaaagtaaaatctcaaactaaaagtaatatcattagtgctttcaaaaaaaaaaaaagtaatgtcattagttgttggtaacacaatataatattttattagtacaacataaatttaatttaatgttacttttagtattatttgaaagaaataatcagttggtcacatcatttctatttctctttatttcttatgctatacaaagtaagtagtcatttaattaatattacatttatttttaaaaaaaaacatatggcaaggtccaaaagatacattttattttttaaaaaaagacaagattatttccaaatgcgcgatttggcgcgtcctccttccaccactagcaagtggagcctccacgcatcaccatttgtactcacatcgtataaaagtaaaaaaaataaaagttaaaaaagaaaaaacatattaacataaaaaagtaaaatagaatttttttaattaatttgtgtaaatatccttaaaaaaatgcctatacaattttttagggataataatataaattattacatggaaaatataaattgatactttatttacaaaaataccttcataaggtgtggacaatattta

SEQ ID NO: 105980 - DNA, 888 bp, Cannabis sativa
tttgcctataacaaactcgatgcttgatctgaccatgtcctcagctaactgaggtgaaatctgaatcatactagttacctgcccgggaccttccttctcaggacatcagctactacattggccttcccaggatggtaaaggatttcacagtcgtaatccttaaccaacgcctctgtctcatattcaagtctttttgagtaaataaatatttgaggctcttatggtcagtataaatttcacatctctctccgtagatgtaatgccgccaaatcttcaaagcaaacactaccgcggtaagttctagatcatgagtcgagtatcgttgtacatattctttcaaatgacgagaggcataggcaataacccgatcggcctgcatcagtacacacccagaccctgtctagatgcatcacaataaaccacgaatatttccttatcagaaggtagtgctagcactggagctgtgactaatctctattttagctcctgaaagcttgcttcacactcatccgtccacacaaatcactaattcttttagtgagctcggttaagggtgttgaaattttagagaacccttccacaaaccgacgataataaccagccagacccaagaaacttctaacttttgtaaccgtttttggtctcggccaatccctgacggattctatctttcccagatccactttaatttcatctttgctgacaatgtgtccaagaaaggacacctgagatagccaaaactcgcacttcttgaatttggcgtacaacttatgttctcaaagctgctataaaaccatccagagatgttgctcatgttcctcttctgattgagagtacaaaaggatgtcgtcgataaatacaataacacaaatatcaaggaaatccttg

SEQ ID NO: 105981 - DNA, 809 bp, Cannabis sativa
agagggcttatttttagtgtggatcagtggggcacctcaagaaagattgtctccaactgaagaaagaggaacccaagccagaagctaaacctgcatcagcacgtgtgtttgctatcacttacgcgaatgctgtcgccagtccttcagtagttacaggtcagcttcttatcaacgactttacttatactgtattatttaattcgggagctacacgctcatatgtagcaacgagagtacttaatcagcttggtaggcctagtgatgtttttgagatgggtttcagaaccctgttgcctaatgggaaattgattatatcgaggaaatggattaaatctgtgttaatcagaattgagggtagagaactgggtgtcgatctagtggagttacctttggtcgagtttgatattatactcgaaatggacttgtccaaatattctgccagtattgattgtaaacagaaaatggtaacttttcaaccgaagaatgatgaaccatttgtttttgttagatcgattcaaggttctcgtgtcccaagaattttagcattgaaggctagggatttactacacagtggatgtgtagggtttctagcggttgtaattgattctgaaaaacctgtgtaactcagacttgaggaggtcaaagtggttaaagaattcctggatgtgtctcctgaggaattaacaggactaccaccacaacaagtgatagatttcattattgacctgatacttggagcgaaattggtttcaaaggcaccctaccgtatggctcatgcagaattaaaagagttgaagatacaacttcaa

SEQ ID NO: 105982 - DNA, 851 bp, Cannabis sativa
  modified_base (782)..(796): a, c, t, g, unknown or other
aaatgttgaccctgatttttcccataatacgtggaccaatgcaatcgcgacacgtagatctgaagtgtatggatttgatataatttggctaagtcttagtaaacctagagggtcggctaaaaaggcacctcccggagaaagtatgagggaaccactaactcccggagggcagagctatagcaaagcacttccgggagatatcagaccctctctgaacaatcatctcgcatttaatgccgcatgggagaaggtgtattgatactgccataaatattaaagtctgacagcgtaaccccccatctccagctattacgctatgattaataagtctactgacagctactttatgagggatcacatcagtcaagaagggataaaggagtatatctatctaacccctaaaatacctaggggacagaccatacattccctattttgcatgagctaagaatgcatgcccctactgaagtaacatggaaatatatatgggacaattctagggattacccaagagaaaacatataaataccccccaaacaaactaaggcagcgatcgagaattctgggattcattacaactaaatagaaaagtcaccaagaacattctctgtataaatactctcataaatactaaagactcgtggactaaggctcattaatgccccaaccacgtaaagatctcatgcattaaacttcttacagatttcttatatattattatattggttgccaaaaacctcagtgaacaagggcattagcaaagtttaccagcatcggatgtnnnnnnnnnnnnnnngaagggaccgatattgatcttacataagatctcctaaacttaccgttataccttt

SEQ ID NO: 105983 - DNA, 538 bp, Cannabis sativa
agaaactcttaagcttctttgctatgaaacaccatcgagtttgcccgagaatttgcatgccatccctatccttgacattttttctgtgagtttcctccaacttcacattctcgaagagatcctcactacattcaaagattcgcaggtcgaagagctgtctatcgccccaaaccctaacttcaaacagtaagtagcttttcttcttgatatcttacatgcttgttacgttacatttctgggtccaattgctgcatcatttatttgtatcgtcgccatctcatttggcttaagtaatttttagggttgaactatatttgggtcaacattagggttcaggcaatacgtaggttttttcagaaccttcaactcaccaccttcaggtttgataaattctttccagggattgggattgctttcttcttgcagcaatgtcccaatacagttcagaaatttatcgtccaaaagatttagaacttgaatttcctatagaatcagtcgtcccttataaacccaaccttcaaaaaccacatcaaaatta

SEQ ID NO: 105984 - DNA, 1586 bp, Cannabis sativa
gttactaaccacttaaagtttcattatcttcatatcttttttgtttcgttgcacggaaaggagaagatgggtcctcaatggagattggacaatatccattccgaacacaaagtactacaatagaatctgatgccgaccttctgtgacgtcccatattcttcattagttcatttaacattggatctcttaaaataactattgtaaacaatattgttttctatgtttacagtaacattgaagaaaataatatatataggaataaaattggtcatatgagagtttttttaattgattaataaaaaaagataatatttttactatatctatgtacattcctaatatactgtttaataagtagtttattaataatacacattttttctcttatatataatattttaagaaggaccaatttcgaccatatgctaatataatatacatttatttttttaagtttccaaacccccataacaaattaccttcccaagataatattttaactctttcaaataaaaagacaatattttaactattaaaaaatttgtctatgtatcttctcattatagtttttaataattttttttatttacagtacacatttattttggagaaaatcttaataagcaccaatttcgagattttgtaatatataatatacatattttctaagtttcaaaaactctttgccttcccaagagtatattttaaaatgctaagtttatcattatttatcttcccaatatagtcatcgttaataattttagggaaattaccccgtgtaatattttttttattattttttcaaatttataatttgggtttctaaagtggtttctccagtggtttttatgtgggtttctatactcatcgaccctttttcccaactctttgatcttatttccaagctcttccatatttttttctctcttctccatcatatcagtccttgcttgtaaatccgaaagctggtaattaacattcctcatggttctacacaattcgtcgaggttaaccatggttgttgaatgggcaagttatcaagatcaacatccagatatatacaaaagacaaaaataaaactgaaagcggtcaattgtcactgaattaaacataagtacatcgacacaaaaaaaatattaaaagagaaaactacagacactactcatttggcgcttcaaaagtgaatagctttctccattgtaatgtctccaaccttgttaacttctgatgtgagaattaacgacccaatatataacctgtgaatggattcaggcacctataagtgatcaaataatatcaaaccttacaatctacacttgaataagtaataattgtaataatgataaattaaaagtctttacttgtgcacaaaagacattgacaccatccacgtactctccaagaagtttgttcatcactttcaagctactaacacaccttcggtggtcatgtgcttctgccacaacaaagtcaaaaaatttccaacccggaccaaaggcttcacttctgctctccttaaatgcattatccattgaagataactacacgctcataatcacaaaaatatttgttataccacataataa

SEQ ID NO: 105985 - DNA, 811 bp, Cannabis sativa
atgttttcttgacaaatcagaactatatttgctggaaggcccaattacagttcgtggttgctctttccaccacaaaagcagaattcatggcaactacagaagcattcaaggaagctttatggctttggggagttctttatgagttaaaacaaatcaaaggggaaatgactatgtttttggatagctagtcatccatccatctttgtaagaatccggtttatcatgaaaagagcaaacatatagatataagactctactggattagagagaagatagaagaaagactggttgatttagaaaaggtcaaaatagaagataatcctgctaatgttgggactaaggtcttgatagtaaacaagttcaagcattgcttgaacttgatcaatctcataagttagtatactgagattcctggaacatcaaccatgatggatgcattctttcttcatcatcgtcacacatttaatttaaagtaacaaggtggaatttgtggtatagtttctccaaatgaaaaggtctccaatatcattcctagaacgttgttcttagaaagttaggtgtctcttggatgttgttcccatacagctaacttacccaacccagaaggaatcttgcggaatgatagttgagtctggaaagaagttcctggatgactatcatgtccactcctggttcagtctttaagattgctagccctcctccaaaaaggaatttcagacagctagttatccttcctgtaagtttattcctcatggaaggttattcttcctgaaaggtcattctccttggaaggcagtttcggatagtcgac

SEQ ID NO: 105986 - DNA, 572 bp, Cannabis sativa
cattgtctccttaattgtgattttgctactgcttgttgggagaagcttgccgtgtgtgatgggggtcgggtttgggattcattccgtgactggttgcagcatttattgaacaccgttgatgctgagaaagttgcacaggctggtacgttatgttgggcgatatggaaggctcggaatgaattagtttgggatcagaaaagtcggagtgctaatgatgttgttcagttcgctttaaggtctattgatcaatggaagaaagctcagttgagtgaaaactatccttcgttgaatccgttatttctcaacaaaggagatgagctatggactaaacccgtttctaatgggatcaaacttaatgtggacgctgcaatttttgacagcaacaaccggtttggctttggctttgtggtgagggactggaacggagagcttgtggtggctatggggtcttctcgaccaggaagaactaatcctgctgatgccgaagctatgggcattagggaggcattgagttggttgaaggacaagccataccaacatgtttgtgtggagagtgatagcttagttactgt

SEQ ID NO: 105987 - DNA, 592 bp, Cannabis sativa
attttgttacggatataaccaatacttataataataataaatatgtaacaatcacaccattctataacaatattattaatcttatcatactaataataatatcacaaaataatttaccatattatatctctaataataataataatgtaacaaatatattagaccataatataaaataaattcacataattattattattatactcacaataataatatgaacaaaatatataattaaattatcagaagtaattaattatttacttaacattccctacattgcaaaaaaatatattctaactcaagaaataatattttttattgtcacaaaaatctcatatattaaataagacttcttaatatgaaaattaacaaagtactgataaaagaatatttttttacaaaattaccctttcgagaaagaggatattacaccttgtttaagtcagagaagtctatataggtttctcatgtcctatttggcatgggaacaagaaaaaaattacatatccatgagggataaaatacttctcttatgaagttactaattaacaatttttcaacctctccatttagagcattttatcgctcg

SEQ ID NO: 105988 - DNA, 1855 bp, Cannabis sativa
ataactcgttaaattgatcttgttcagtgagcctgcttttggcctattgaagttgtctatcaaagatgaccacatgatctgactcatcatgtaggcttttctctcaaatgtcgtcactaacaaccttttcctgagggtcttcttcctgcttatccgttggtatgtcctaagtgttaacttcagcgtcctcaaagctactttctccaatttttgcgtcatcgatgataagatcatcttgattctaatattcgtcctggtatacttttttatgtctagtcacctcttagggatcgttagagtctccagctatggcaccatgaccagtgaaacaaagacaagacttggttcgggtgaggccatgattacttgaaagtaatttgcaagtggtctcactagattctttagctcttaatgaatgtagaaaaatatttatcaagatttacggaaacagaatataaatgataagagctgaagaaacaaataatttaaatagaaagagtataagagacaaacagtttttacgtggttatggtgttagttaccattagtctacgactcaatattatttagtagttcttatagattgaaaaagccttcgaggatacaaagaatgtacgttctcaagttttcttgagcaaagtatgcaagagaattcaacccttaatttataggatttgatgggtatttatagtaatttaagagttacatcaattttttttttattctattagggtattgatagtaaataatacacttaggctatctcacgaggtcctgcccatgaaggagacaatctgctaacttggcggattgaatttggcatgatttggtcaacaccgtgtgctttgattatgggcaatcaatctatagattaatttcttaatattcattatagaaagtttctccattaatcctgataagatattctattgtgatctggcagctggaatatccttatttgtgtgaaggaataagaaggaaagctagaatggtcttctgagaacacagtgtcttgtccctctggtctcatggtaacgaacatgcttttggttacggcccaccgaaggcgaaaggctttataattgaagagctgggatacgttcttggaaggacttatccaaatgggcttggcccactatacctttgctgagggtcccactgatgggccttgaatgctgacctggattccacgtgtccaatgttgaaaacgtgaataacacctggaaagattatacatttgagcccatctgaaggaccatgaatgtcccaaagatattaataatatgttgaagaggtaataattcaattactctctataaaaaaaatagataagttatgttaacgaattaaactaataatacaatttttacaacaacgcatacaaaaagatcaaggtaacaatgagttactcgagccatctccaggaatagcaaaagcagtttgtctaaaacaaccaaaaaattaagaatgtagtttttatatcttgaaatacattaatgacatgtaaaatctacaaacgcttgcaaattcgtagaaagcaaaaaagtaattttttattaattctcttatttataatattaacaaactatataatatatatgtactaataaatatttaattattcttttaaaagtttaggacattgttgcaataagatgcaaaaaggacttgctaccgttacaacaagaatggttaataaagttgattagggtatttttaatgattagaacacttatataagaattttttttcatatttagataactcttaagcacttagaataattttaaaatacatttacttagaataatgtaaatattgctataaatatttatttaacttattaaattaattt

SEQ ID NO: 105989 - DNA, 527 bp, Cannabis sativa
agggcacaaaacccaacaacacattcatatcttatcatgaccattacatacataatctgggcctacattggccctataataacctgggcatatttagccccaccattattatggaataaggtatctctacattcaacagcactgtcgccgtatcataccttaccataacaatatcatacacgaatcagacaaatgcagggtaaggtatctctacattcaacgaccttaccccgtatcataccccaccatggcccctcatttgtacctgacatgttagcataccacatacaacatgcaacacatagatatacatacaacatgtacaaatcataacaaccatataacagctataatatacaccgattcacaaacacccataccttatattctcaataccacatacacattcagactaataaatcacaaaccatatttcaatacacataatttaaattatgcagttcaacacatacaaaactacttaatttccttaccttggaatccgaaagttagaatgacttcaacta

SEQ ID NO: 105990 - DNA, 637 bp, Cannabis sativa
atcatatgtttttctttagttgagagttttagaatttaatcatatgttttttttttagttgagagttttcaaactattcaattattaatgaaggttaatataggatcttaactacactattcgtattttccatagaaaatattccaaaagccacttttactatgggtaagaatactacataatttatatttttatattaatctattgttcatatttctggtcaaatatatatatatatttttattttcttcattttttatctatttattttaattcatttaaaatatttcttttttcttttttaattatcactaatctatataaatttttactctaatataactttaactcatcttttttatcaatatcatcaaagaatcttcattaattcgctctccatctctatctcactattagccatgtatgcatgacaagttggtttattaaatgctttattagtttgagaaacttagttatgtttttgttggataaaacactataacgaagccaataatactttttttaaatttatgaccaattttgaaaataaatatgttattgtgtataaccgatttatttatttaatttttattcaacttttcaaaataatcatctatttatctatctatatatatat

SEQ ID NO: 105991 - DNA, 684 bp, Cannabis sativa
agccacttccctctctatccaaggtgttctccatggtcgttcaacaagagcgacaacgctgtcttggcaatactggcgttgttgctactacttcggccaaaccaaatcctaaccaaccatctcggaacaagaaacctcggccaacttgttctaactgtcttaaacaaggtcaccttgttgacaaatgctacttcctccacggttttcctcccgaatatggtgacaagaagaagaccaccaccactgctcgggcaaatcaagcctcggtgactctcactccaaacccttcggtggctgacacttcccaactccatctcagtcaacaactgatctctctactcaatcaacaaatccaaggcgccccttccaccagtgaaaacctccctgtggtttctaaagtcttcggtaatgacaattttttcctcttttcttctggattgtagatagtggcgctactcatcacatatgtcactttcttcattgctttacatctttaaataaaaataatgttgctaacttggtcactttacctaatggtcatcagattcatatcaacaaaattgaaactgttaaaatttccgaccaacttgtcttaacgaatgtcttgtatattcctgaatttaaattcaattaattttcagttaatgcttatcttgaacattgattaatggtgaaaaatacaca

SEQ ID NO: 105992 - DNA, 736 bp, Cannabis sativa
attcatgagtgattttaatcactttgtcaaaaaaaaaaaaaaatgagaattttgaaagggaaaagttaaaaaaaataaaataaaataaatagaaaccatatataatgtaattacagtcagctacttattatttcttttttgtccataagaaagagaaaagacaaagtaacttcactaatgagataaaaaatacctatctatttttgggagaaaacaggaagaccaacaataaatacatagcaaatcacccaaatatgtcttttaacaaaaataacaataagttaagaacatcagaaataagttgacactatcttttccactttctaaagcaaagtaaagtgaactatatgtgaacttatatgatcatcatccaaataatataccaataataataaaggtacacaaaaagaagtagtcaattatggaccaatactacaccattattaatgaattattttcttctttttattcaaaaagattgtgtcttcctatattattagagagcgcactaatggggttttccaacttgttccccattcataaagactgcttctctaccctataatcaattggattatctatttctttcgtgcaaaacactataatatattgagggcatttttcattattatacaattaaatttactatattagcctttaaaagtactatattaggtgcaaacaaatttatttacataatctgattaacgatgaaaggaatatttgcaagaacttt

SEQ ID NO: 105993 - DNA, 580 bp, Cannabis sativa
  modified_base (133)..(149): a, c, t, g, unknown or other
caccggagtttactgacggcaccgaaaaagtcgtcggagtagccgccggtgccggaaaagtcaccagagttgttgtcggtgccaaaaaagtcgtcgaattagcattgccgctgaaaaaatcaccaagaaactnnnnnnnnnnnnnnnnnaccggtttcttggtgatttttcaagtaattttaccggtgacaatgccaagtccaacgactattctggagtttgatgtcgacgccaaaaaagtcgtcagaattagcattgtcgctggaaaaataccaagaaactggtttcttaatgaagaaactggtattaagaaaccagtttcttagtgatttttccagtaattttaccggtgacaatgccaagtctgacgactatttcggagtttgatgtcggtgccgaaaaagttgccggagtagttcctggtgttggaaaaattgccagagttattgccggcgtaaaaaagtcgtgagaattggcaatgtcgccaacaaaatcattagaaaaatcgccaagaaagtggttttttcatcaagaaactggtttcttcaccaagaaagtgatttcttcatcaatgaactaa

SEQ ID NO: 105994 - DNA, 1205 bp, Cannabis sativa
  modified_base (1084)..(1087): a, c, t, g, unknown or other
tcttcagttaccctgaaaccttagttgcctccgtcatgaacatgctgatgtatgctcgaagaggctcgcctggtctttgcttgacttcaaccaggtctcctaggtgcaacggaagttggcgagaggaggaaaattgtgcatggaactctgaggagaacgctttccatgaattgaactttctaggtgtcagcttgaaataccattgctaagcagcctccgagagggtggcaggaaaaattcttcaacatacgtctcctcgtattccctgcagatctatttgcatctcgaaatacttgaggtgggaaagaggatcttcttttccagtgtacatcttccaagttggcattttaaacttgtggggcagtgccaggagattaatctcgggggagaaaggggttccacgtgctcggtccaactcgagatcattatttctctggccggccatgccttggaatatattctttagttcgtccagctgtgcctgcacaactggactaacctgttcgacattttggccgatctgagtcacgtcagtatctttttgagcgggaatttgagcgcgggttccgggttgcacgatctgcgttcaagctggccatctgctcctcttctcctattcagatcgtttctgagatcatgagtcgtccccaacctatcgaatacgaaagcgccatgctgtctcagtgattggttggtttggtcaatgtgctgactggcaccgttaacctggttggaattgctgggtatgacttctcccgatgaattactagataaggtctgcccacctactacttggcccataggcggaacctatgatcggagatttggcggttgaccatttaaagtctgagaggtattcatcgttggatcttcgtctgtttcacccaaagggatgacattcgggggttgctgcacaacagattgataggcctttcgtatcagcacagtggcttgccgactacgattgtcaatctctgcatgatgagcccttaatgcttccatctctttttccctccattcaacaaacatgcacctctgctcttcgaatgcgagatttatcacagcgcggagttcctcctgatcnnnntgtagggtgttggtatgaccctgcatgagtccaagagcagcacggagtttctggatcgcggtgtcatctccaatggttgtttagacattggtggcggatggaatggctgtgctatgaa

SEQ ID NO: 105995 - DNA, 595 bp, Cannabis sativa
actacttttattaatcatgtaagatatagaaaaatataggaggagtgctcctaatttttttgtaagagagaaaacaagtgttaaaaaatatgagaaaaagtgtgaaagtaaaagaatattattttagtaaaaattaaaagaaactaattaagattcttttataaagtttgattaattaaaggaaaataatatgaagtagtttgagtgtgagtagaaagaaaacgtaaaagagagaaaaagatatagaataagtgttcatattttttttttttaaaaaaaataataaaacaaaatttcgtgagagagtaaaaaaatgttaaaaattttatataaattagtatatttattatatttatatatgtgtgtgtaaaaataaaaatagacatagggagggagagaaaaagggagaaagagagattgagatagagagagagagaggaggaaaaaaagagatgagagagaggaagaaaaaaaaaagagatagttagctgaaaataaatgaagaagaagacaaagagagaagaaagaaaaaagaaactttatagatgcttcaataaacaaaaaagagaactttacatttggcaccttatttttt

SEQ ID NO: 105996 - DNA, 910 bp, Cannabis sativa
  modified_base (29)..(57): a, c, t, g, unknown or other
aaaactcggtcaagaaaaaaagagtgcannnnnnnnnnnnnnnnnnnnnnnnnnnnnttcatggagatcttttaatcgacgtatctaacgaaatcagaatcagaatatcctacaacctccgaatgatctgacttcctgtatgtgagcatgtaatcttttgtcctctgacgatacctcataaccctcttggctgctatccaatggtcaatactagggttgcttaaatatctccctaacatcccaacaatgtacgcaatatctggacgtgtacatacctgaagatacattagacttccaatagttgatgcatagggaatcttttgcatttcctgaatttgtctcctttagcaacagggctatcacctggtctacaatcttgcatgccaaatattttgagtactttatcggtatagctcttttgtgataatccaagaataccctgagaacgatctcaatgtatttgaattcctacaacaaaagaggtgtcactaagatcttcatctcaaaatgattagattgaaatctcttgatttcgtgcaataagtctatatcattagtgacaagcaatatgtcatcgacatatagaaccataaatatgtgcttactctcactgaacttgtgatatacacaatcatcgataatattcatctcaaaaccacacgagacaattacttgatgaaacttgtgatactattgatgagaagcttacttgagtccatagatggattgtttttttaatttgcaaaccatattatttgggtcactagacaaaaagttttctagttgctccatataaattttctcttcaatgtcaccattgagaaatgttattttaacatccatctgatgtaactcaagatcaaagtgagcaacaagtgccattattatcctaaaagagtctttcgatgaa

SEQ ID NO: 105997 - DNA, 631 bp, Cannabis sativa
  modified_base (141)..(149): a, c, t, g, unknown or other
  modified_base (598)..(606): a, c, t, g, unknown or other
ttaatttaatatttataaaattatacttagatggatatgaaaataaaacaaattatttccatcttagtactaattttaaataaatatttctaaaattattcaatttaattgaaattattttacaactcaaatttaattttnnnnnnnnntatattgcatttcgaaaattaatgtatttaaaataaatgcaatttttgaaaatgctctaaaataaaataaaataaatcctgataaaattattttaactttatgttggtcaaaaattaattaaaaataaattttcaacacaaatataatcttcctatttaattaaatattaagaaaattatcaaatatttaagtatctagacttaaataatcaagtataaaataaacttaattattaattctaatttaatactaggtaaaatatttttaattaagttcatccaaaattaaataataaataattaatttttaacttaaaatattttcgtaattaaatgttagaaaatataactagtcattagaaattactatctaaactatatttcaattaactaaatgtttttctaaaattaactttaaaatattcaatgaaaaaataaatttcatatannnnnnnnntaattatgttgctaattcaaattta

SEQ ID NO: 105998 - DNA, 524 bp, Cannabis sativa
  modified_base (464)..(481): a, c, t, g, unknown or other
aaaggtcaaagattgagttctaaaactcaaaacttgactaagcaacatatcatgcatcaaaccctgattaaaaactcatattcaagcatataaaaactgcagaaaccaaaacctaacttatgcaacaactacagccaccaaaattccaattttctctttgaaaacttaagcgtttgcatagaaaaaccataactttaatcaacttaactatcaagcatcacaagaagcttaattcaactcaaataaacaagtgtaaatctctgcaaacaacaacagaaaatcacagcaagaacaacaacctaaactaagcatgcattacaccatttttcatcaaaattcaataaacttaaagaacagatgattagaagctaacctagcttgatttgaacaccaaagggagttgaaatcacaaggaaaatccaaagtttcttgctgcaccaagaggccgaaatggagaggaaaannnnnnnnnnnnnnnnnngagagagagagagagagttagagttttgagaaattttctaatt

SEQ ID NO: 105999 - DNA, 555 bp, Cannabis sativa
gctacctgcccgaccttctcaagtatctgaaatggcccaatgaaccaagtgcttaacttaccccacttcccaaagcgtctaatacccttcattggtgaaacccataggaaaacatgttcccctgcttgaaatgtgacatctttgcgcttcggattagcataacttttctgcctgctttgagaagcaagcatccgagccttgatcttgtctatagcttcattggtcctctgaactaattctggacccaagtacttcttttctccagtttcatcccaatgaataggggcgcgacatttcctaccatatagtatctcatagggagtcatccctattgtaccctgatagctattgttgtaggagaattcaattagagccaagtacttactccatgaaccctcaaagtccatgacacaggcttgcaacaaatcctttagtacctgaattgttctttctgattgaccatcagtctgagggtgaaaggttgtgctaaacttcagcttggtacccatagccttctgaagacttacccaaaaattcgatgtaaactttggatcc

SEQ ID NO: 106000 - DNA, 1255 bp, Cannabis sativa
ggggcaacacctgcacggtgtagttaagtttggattcaaggcatccaataacgaagtcgaatatgaagctttgatcgctagcctaaaattagcctgggagatgaatgtcgcacacatcaaaatctgtagtgattcacagctgctgctaaatcacgtatctagagaatatgaggctcggggagaaaagatgatgacatatctgagcaaaatacatgacctgctcgcacaattcaaaagctacggttttagacaaattccaagggaagaaaacacgactgcagacgcgttagctcgattggcaagcagtaatgtgagtgataaagcgaacttggttcctatccagttcctcgaagagcctagcattactggcatagaagagattgaaatgattgatacttccccaaactggatgacgccaatagcagcctaccttaacactggggaactcccagataatcgaaatgaagctcgaaagatgagaaggaaggttgcattgtatatcatagtagagggaattatgtacagacgagggttctccatgccattgctcagatgtgttactcaagaagaagctggacgactcttatctgaagtgcacgatggattttgtggaaatcatgccgtcgggctgagcctgtctaagaaaattctaaggcaaggttatttttggcccacaatgattgaagattcaaaggcttatgttaaaaaatatgacaaatgccagagatttttgaagatacctcgagctccgcccaacgagttaactcagatgcagagtccatggccttttgcaatttggggaattgacctgatcagacaattcccaaaggcaaaggaagagtgcagtatgcagtggttgcggtggattacttcactaagtggacggaagctgaaccacttgcaaccattacatctaaaaaagttcaagactttgttgtgaagaacataatctgctggttcagattgtcgtacaaaatagtttcggacaatggcaaacagtttgacagccagtccttcacttatttttgtgcgaaccatggtatcatcaaaagtttctccacagtggcgcatgcccaagcaaatggtcaagttgaagtagccaacaagaccctgaaggatacactaaagaaaagactcgaggattctaaaggaaactagccggaagagcttcctgaagttctatggtcgtaccgaacaattgagaaaatggcaatcgaacagactccatttgccatggcatatggatatgaagcta

SEQ ID NO: 106001 - DNA, 564 bp, Cannabis sativa
ctgccgaggttgttcctcccaagaaccaaaggaaaaccatcgctcataagaagaaattatcgactgaacctattgatctcgaggtttcggacaacgagatccaagagaaagttcctccttcaattgttctcgacgccaatgttcctcatcccgaggcaacccccgctgctgcttcttcgagttaggccatcgagactctttcggtcgcagctggggaagctgggtctgaatttcccctggcacatggggttgcctgttcgcgcaaacttcaaactctccttcccccagattgggattttctcaatctgaggagcccaaaggagattctttcaaggaacttggactgtcacttcatcctatgtcggctttattaatataaatatattatctttttatacctcttttatacttatttgtttacaattctctaggcctcttttgcttattttgcttctaattaactactctctgagcggctcaagtattaggagggcgagactcatagattattatcctaatgcaaggatgtgtgtcagcaacgagacaacgcccaacagaagatta

SEQ ID NO: 106002 - DNA, 1511 bp, Cannabis sativa
  modified_base (1450)..(1455): a, c, t, g, unknown or other
tccgtattattaataaaaaaacttgacaagaaattcttaaataatttgagatgaacgtgttattatgcaattatttcaaaaatctaattatagttactttagtaattttataattaaaaccatctctattcctctttttttttttttttttgaaagatctcttactatacttttaataccaaacaaaagaatgaaactttatattctcctctccttcctaacttagcaaacaacataaagaaatctcactcatctccatcattcctctcctccatccttcttcattaatctatccctcctccactccatcacttctaccaagcatagcctaaattatatcaaactttttgcataaaggctaattacaaaataaataaataaataatatatagtgaaaaatatgttaattcatgtgtttcggtgttatcataattttagagaaaaaatgattaaaaattgaaaattctaacaaaatatcataaataaaacttaacaagattttcaagaataattatgtctggaaaaattgtcagagtagttattgtcaaaaagtcactaaagctagtattgtcatcagaaaaattaccaaaaaattatcaaaaaagtcatcaaatgtcattattgttaaaaaagtgaatggagttgtcatcgtaaccgaaaaagtagctgaaaaagttgttagagctattattgtcacgagaaagttatcgaaaaagtcatttaaattttcatcatcgtcagagtcgtcactagagttgggcgttagaatttgacacacagaaatcaatttcatgtataaacgaatttaaaaatgtggcatagagaaactagttatgtgaaataaccaaattaaaattaaatcataaaaaccaattacgtttgttagctaattaaaaaggtaatacatagaaaccaattacgtaaagaacctaaattaaaaactaacacacagaaaaatcagttacatgaattaattaaatcaaaatcgattacctaaaataactgaattaaaatctaactgagaaataatacaaataaaatacaccaatattacccaaaaaaaaatagttgttatcatgtgttcataaatattgagaaaaactagttactagaagaaaaaaaaagatattactattatcccaaaattaccctaatgatgtggcacgaaaatgtcacatgacaagtataggaggggctggacaaatttaggaccatcgagaaaattgtccagaagacgttgggtggagtataagccggacaaagccatctagcatcagacatatgctggacgggacatgttgactagcattcctagcaaccaagaagacacctcactgatgaagcgtccaaccagtgaactcatggaggggaatgtccaaatttttcccaataacttaatcccttatgaataggtcaattaggctacatcattttgttgggttttgtgccnnnnnnaaaatccattttaatataatcagatttactagttaataaagattagaaataacatt

SEQ ID NO: 106003 - DNA, 575 bp, Cannabis sativa
  modified_base (506)..(517): a, c, t, g, unknown or other
ccgtttaaaaccatttatgataaaaataataaactaatttattgaaaataactaaagcataagatctcattattttaaaacaaaaacacttgattctttcataaatttttaaacattaacttttacaaaagtaatagagtcataatctttaacgaaatatttttaaattaaaacatcgtgacccctaacatgtaatccgcgcctcgagctcgccatcctcactgtttagctttgtctttacttgcacacagagtacccgtgagctaacacccagtaagaagagctatgtaggagataaccccccaactagataacatagtcataagtataacaatatcacaacattaaatcaaatcataccatgctagcatacatatatcaacatctcatatcacatactattctcacatacaatataacatcatatcacagtgtaatcttaatgcatgctatactcacacacataatacacaatatcttgtcgcagattgtcctcacatacgatnnnnnnnnnnnnctcatgttgatcagacatgaagtgtaacttgccctgccttgtgctgttctcacactcg

SEQ ID NO: 106004 - DNA, 579 bp, Cannabis sativa
aattgggaaattaatcaagtcatttttccaagattcattggaattctccatcttccccagaataagcaccccatttgataaataccaaggcattttagataaaattctgctttgaatggattcagatgcaaaagtaaaagtcaagaaaagacctgattcgtatttttccttaatcttgagattccattcagcctcctttaatcgccatatgcctcccagaattttcttcaagaaactccggctgtgctccgtcgttgtgcaaagtctgccccgtagattccattttgcaatcgtaatagataagctcttatcaatttcccattcctcttcgtcagtgacttgaaggttatgggtcttcgccagcagttcgtccatggaggaggttaagaaacaccaatcccagttaacgggaacccttcgagcgagggaggaagacagttcaaaagaaacagggcaagccctagcagagcagcagagcgcgggagaatctcaatcttttttaattgtacccagaacactgggttttactgatataacaatctacaacagagtttccttgcatttggagaaatgctatgt

SEQ ID NO: 106005 - DNA, 601 bp, Cannabis sativa
tgagtctactacttgaaacggtacgtacacttgcgtgtgcaaaatatcacaacatactgatttcgaacctaagtatttcttctcccctgtctcttcccagtgaatgggaagatctacattttctgctatataacagttcatagggagccatccctatcgtactttggtagctgttattgtacgaaaattctatcaacggtaggtacatactccgggagccctcgaaatccataacacatgctcgtaacatatcttccaatatctgaatcgtccttttggactgtccatctgtttgaggatggaaagctatactgaactttagtttggtacccatagccgttgtgaactctgccaaaatcttgatacatcttggtggtgccgggatgcagagaatatggagtggtatgagcctcttcgagaatttcatttctaagtttcgcactacaaggaacacaaaccctggtctcaaacaacagcatcccactatctgacactgtaaagtttttggcttgccaactgaaacctcttctctgatctttactagctctgaatcagttagctgagcaactttaatacgttttaacagatcagattgcagcgt

SEQ ID NO: 106006 - DNA, 546 bp, Cannabis sativa
agagagagagagagagaattcttgtacgactattttgagagattttgtaacgccctgaacctcaggaacgccacatgtgtgcttttacaatcttattatcactaatctattaatttagaaaaagtgtggtttaattaaaatctttaattaaattaaaaatagaaactttcattcaaagtactgtcgttatatgggaatcccatgctaataaaatttctataagacaaatttcaaaaccattattattaaaataaatttacattcccaaacataaaagagaagaagtcgatcctgcttctgaaagccaagacaccacgactgatatgtacactgctgggagacctcaagctcatggttgaacacatataccattcttctcacctgaatgaagaagcacccgtgagtcacaatgactcagcaagaaaagttaatagatttaaagcattgtaatacgtagatattcacatctcaatataacaaacatatatttataaatatatatatgtgactcacacatatccatcttgcgtaactatatagtattaa

SEQ ID NO: 106007 - DNA, 897 bp, Cannabis sativa
tctctctctctctctagaccttattgaaaagaggtcttcaaaagcccaaagtcaaaaatcaacctgaaagtcaacatgggatcaaaaatatgcaaatcaagctaggaggctcatctacatcaagactacccaaaatcaaatggtataaatttgattactttagtcttgttaaagtgatttgcatagcacactaagttttataaattcaaattttggcccactcactaacttgtgcaacaagttttctcacacgatagttaaattttttttttttttgagtggatttctaaatcacatttcgtttaactaagagaacaaaattggaagttctgaaattggataatcgagtagagagttatggtcgttttagtgcaaaaaaattggaccttttcccactgcttggatttaggttaaccgctttcaaagaggttaactggttctccaaaaactggtgaaccggttttcccagtggttgtctcatttttcgtgtccaacggctataaacggctattttttaccccaatactatataaactcgattttcactcaaaaaatcaagttggttgagcatttaagtcatacacctaacctatctaagtgagattaatgagcttccaagtttaaaatcccacaaatacttttcacacactttgagccaaaatttgtgtttattcatcttgagtgtgctttcttatcactctaggtttccattatattatcatatttctagagtaattttgcttgtaatttcaaacacattttcataatgtgattgaggtgaggttggcaccgatattgtaaaaaatccgattgtagtgagattggcacttcaacaatccgagaaagaggttaatagtcctcgggggtgcgaaactattgtaagaggtttggaaatac

SEQ ID NO: 106008 - DNA, 561 bp, Cannabis sativa
ctggatttgggacccaaccatggatccgaaccctgacaatgacccgaaccaacacccgaaccataaccgagtcccaaacacaaaactggacccgaagtcgttccctgtgacccaaaattggaaccaaaacaagaagtagcctgggactggaactaggacttggacttggaatcataactgaaatcggatgtagatccagaaccgtaaccggaccaggacccgaactccaaattagacctagactcgaattgtgaatcggacccagatcccaacccaaacctgtactcgggacccgaaccggaacatgaactaagacgcaaacatggaacgagactagggacatagaactagggtccggagcaagaactgcaccccagtctcgatcctgaacccaaactcaaaaatgggacctgggatctgaacatgaaccagaccgagacccgtgacagtgatctagatcttgtctcaggatccgggtaacggggcctagaacagaccagtggtcggtgtctagatatgggactcagactaggaccagaacccaggctaagaaccaaaccc

SEQ ID NO: 106009 - DNA, 525 bp, Cannabis sativa
aggcaatggcggcttcaagctgattggaggattgtagatctttggtcaggttggccaccttcttctcagcagtaagaagtttcttgttgacctctcccagttccattcggatagccccaagttgaaccaaggcttcatcggcatacttcctggccaagtccactttcgcccgcatagtgttagaaatggcagcattcttagaggtagccgacttagctcgggaataagcataagccatctttagagcagtctgcacagagaaagaatattaaaaggtgaattaagagaagaaggacaaaaggaaatgtgaatataaatgtgataagtcatagaaaatgttgagaccagctgtctctagagcattcactctcccacgaagcctctccacttcggctctctgctgcctggcctctgacttatacttcttgacttcaactttaagatccttttccttagtcttcttctcttcttccaacctgtggaagatggcccggagaaccaccctttcctcttgaaggttgttca

SEQ ID NO: 106010 - DNA, 597 bp, Cannabis sativa
ttccaaagacggctttccgtactaagtatggacattatgaattcctggttatgtcgttgggactaaccaatgctcccgcagctttcatagacatgatgaatttggtattcatggatttcctcgatatatgtgttattgtgtttatcgacgacatccttgtgtattctcgatcacaagaggagcatgagttacatctccacgtggttctgcaatgacttcgggaacacaagctttataccaaattcgagaaatgtgaattttggttatctcaggtgtcctttttagggcacatagttagcaaagatgggatcaaggtggatccgggaaagatagaatctgtcagggattggccaagaccgaaaacagtgacagaagtcagaagcttcttgggtctagccggttattatcgtcggtttgtagaaagggtttaaaaaatctcaacacccttaaccgagcttactaaaaagagtcatcgttttatattgtcaaacaagtgtgaagctatttttcaagagctgaagcagaggttgattacaactccagtgttagctttgccttccgaaaaagaaaggttcgtggtttattgtgatgcatcca

SEQ ID NO: 106011 - DNA, 741 bp, Cannabis sativa
tagaggttttctctggggattaaacggcaacaggaacgagatccacttagcttcctgggataaagtttgccttctgaagatttatggggggcttgggttcaaagacggtaacaggtggaaccaagcaattcttgtgaaaaatatttgggctatcactaccaaaaagatctggtatgggtaaagtgggttgataacatttacctgaagtctacttgcttttggtcttataatctaaagcatgattcaagctggtattggcgtaaactttgtcacttaagacaaaagtttaatcagaaagattgtgaaaggtggtgcctttggtggatttagaactaattggttgtataacaaaagtttgaatcaaagtccagtcaattatcacaaggcagtttggagctctctaaatgtgcctaaacatagattctttcgttggcaagtgatgaactctcaccttcttaccagagataaattatctcggtttcatacagtgcttaattcgaacctttgtccggtttgtgaggagaaggaggaatcccatgaacatcacttctttagatgtttgttgtctcaaaaagtcttggatgcaactttttcgtggttgggattcagggcttggccgacagataacaatggatggtatgattgggtaattttgacaggtcaagctaggctacataggcgaaaaatgtttgggttatcactaccaaaaagatctgctatgggtaaagtgggttgataaca

SEQ ID NO: 106012 - DNA, 1958 bp, Cannabis sativa
tccccaataggacttagaaaaaaaagaaagaaaaaaagagtatattaatggtgataccaataaattaagagaaaaaatgttaaaagacacttgtgcttcgtatgcgggcgtgcaagttgggcaatagtctaaaacaaggtttttacaaaaataataaattttggataaaagtttataaaagtttataattttttataaaaatactatttattttttataaaataacctaaaacaacaaaacaaaagaattaaaaacaacattaaaataattaaaaaataatcataaaacaatagtcaaaatttaacacagtatacagtatgaaacttacatagtgttattgaaaaacaaaatcccccatcagtaaaaacctcaaaaaagattaagggcctaatatatattttttaatacctttcaatttttttttttaatgaacttaaatttttcaaaggttaacaatttgtgattaatcacttttgtcccaattttcaaaaaaaaaaaaaatcaattatttttatttattacttttcaaagttttcatattctatttttctattattttttattgtattgtaattaatgacaattttaataaaataattagaattttttagtattttgtaaaatatataaccgtatggtaatattttaaaaaacatcattcataaatagtatttttttttttccagaggccaattttaaaaattagaacatagtctctaaaatgtttaagacgactctccttagtattctcgtgaaatgttaaaaggcacttgtgccaaatattctttttagtgtttatgtcgttattagtacaattaattatcagatctcatataactaaatgtaataatttttataaaatatctctaattaatttgagcacgccaactttaaaaattgttagacgtcactaatacttaataataatactcataaattaaggtacagggactatggatgtttacctatgcacacttgtgccaaaccatgtcatgtgggagtgaaacattgaaaatctaccgtacgcgtccaatgtcaataccatggcatgtaggagtaaaacaatgaaaatgggtatctagacaaattatttatttattgaaaaaggtatctagacaaattttcttatctaattttatttaagatattattttaattatttataaatttttagagaacttttaataagttaaaatgttagaaaattaggttcaaaaaaatgttttatatgtttctaaaaagatttacaactaaatttaaataattataacaaaggattatttaaaatatatatatatattaaattaataaactttttgtatggccaataaatagagaatctcgagaaatgtcccattttagaattatccaatcatttaataagaaaactaaataaacaaagatagattacaatttaataattttttatattatttattaaaaattaaaaatgggtagaatttattattaaaatacactttgtcaaaaaaaaaaattaaaaaacacaaataatgtaatttttttatggttttttggtcaaacattttaaaaatataaaaaacagcaatagaaaatttagaaacagcgaagaatgaaggatggagagtactcctgaattgatgttttgcccaatggtaatgaaggtgagaaaattaaaactactagacatttttagaagactaaaaagtgcttgtggagtacttaacaagaaaattattaaactactgaagactatattattactgagagcattattattaggtaccagtagtgtttattaccttttaaacgttttatttcgtgattagttagtagtactctctaaaaattattacatataattttaaaattatatgaaagctaataattaattggcactacaacattaaggaccaatagcggcgagcccctcggccgctattggtctagattctggccgctaaagggcaatagcggc

SEQ ID NO: 106013 - DNA, 538 bp, Cannabis sativa
tttccttatcagaatattaatattgtataattattttttaaaagagagatttaatttgggattaggattagaaaacaaatttgtatttttttttaaaaaaagagggatttaaatttttatttccttattagaataataataatattatatatgataattattattattttttttttcttttaacaattttttcttgttaaataattaaacaaattattattatttttaaatataatgaattttttatttacgagataccaatcctaattctaatagaatgatagttctctatatttaacgtgtaaaattgaaaagttgttatatttaaatgttaaattgtttttaattgtacaaatatattctatctttaaattttcgttgatttttttttttttttgacatttcgttgattctttttattattatctatctttaattttttttgcacgtgattaaatttattagcaaaaattaaaaatatatattataagaattctatcttttttcaaaaaaaatgtataattaggattaaaaaaat

SEQ ID NO: 106014 - DNA, 1151 bp, Cannabis sativa
atcaatatgagaaacatatttgaagagatagacttgtaattgagaaacttattaattacaatacaatacttagatttggatccaacaaatgatggttgcatgggaacaataaaaaaggggtcttcagatttaaaatctttagctctttggaaagcttcagcctttccttttctactcaactcctgatttcttataaattttttatgtacaagagattctccacacactttatcagactagttaactgaaggttcatctattattttctgtgcaattaggtcctctgaaatcatgttggctttatcataatcactagtaaaagatggttcaatttccgcacaaggggttatctttggcttggatggtgtagttgaacttctcttatttgcagctgaaaataacagtagtataagtcaactttgtagccatgtttgcattcaattatattgtctaagagcattataataattctcacctagattgttatatgtgatgtttagggtgaagtagggaatgatcaagacagtatattactacagaacagagttcttctttacctggaattgatagcatagccataggggagtttgctactccattgttatgaaaaataatcacttcgaataagattattccaatgttctttgtcataacaaaggcacaaacatcacctactttcaagtcattgtctggaacaattgtatctataccatgaagaaatttagaaattaacagtaaatcaaaaggccagccccttgaaactaattttttgaaacataaaatccaaaaaattgattaatttccattccatgtcaatattactctcaaatgcctactcgcaatcataatctgaactcattgtagttagattaacaagcaatataagctgcaataatagttcttgtaacacaatttcaataatatatatcatagacaaaaatagaaaaatagggacacaaataaccctgcctaacaacaggggatcccaagaagtaaaatggattttgaatcgttctgtgcggtaatggaatcgaaaaccaattccttccgttcaaaatcccagaatttatgggttcaatagtgatagattccttgtcatttgaactaagaaaagttgaaaaccgacaaaatgggaacttactcatgacata

SEQ ID NO: 106015 - DNA, 574 bp, Cannabis sativa
tcacaacaccatacaagaaaacaataatgaaatattattttgtgattatgaaaatggggtttgcaattcctaagattataaaacaaattaaccaaaaatacaaactagaaattaaagaaagaaaaagtttatggaacaaaaatgggttggaaatgtattactcccaaataaattaatggaagtttttaataatttcaattacccaaatagatcagacctaaaatagtatatacataaataaattcatggttcatagagaatatgaataaacactgtcgtacttgggaattaactagataaacacccaaatcatgtcagtagtgaagtttctattaacttatggtacctgggaactaatattattgctgaactcaacgaaaaagatgaactcggctaccgataatgaaggccggtgacaatctagcatggtggacctcaaaaacaacacttcgaatttgagaatgaatgaataattaaaaatttgagatatatatatatatatactagatgaaagttatgtggcgagccacgtaaatattagttttatttaagttttagtgatttttttaaaaaa

SEQ ID NO: 106016 - DNA, 941 bp, Cannabis sativa
aaccaacattacgttcttaagcctaggtagaccattaaaattaagagtttccatccctatgacttttccaacaagaccattaccaaaagtaacttccccacattgcattggtttaatgttgtcaagatagtctttttcacatgtcatatgcctggaacaaccactctcaaaataccacatttgaaaagcaataattttaaaacaagaagaaacaaccaaacatttatttttgataacccatttttatttttgagaaacatctttatttctaagaaaattagaattaaacatgttttgcattttaatgcatttaggtcgaatgtgaccttttattccacaaaaatgcacataggaatgaaccatttcctatttcctttggggttgccacacataccaaactacttcttttctgtaacagtagtacattttactgtagaatcagaatcctgcaaagtaatgtcagaacatccagaaaccaaaatttcagatttgagaaatttagtatttgacttagattgagccttaacacaacccaaaccaccatgactcgtttatcctgaattttgaaacactttaaaaatgttggaacctggatttaacattttaacatttcttttcaaattttcaagttccttagtcaaagaaacagatttagaatttcttaaaatcaattcagattcacaacatttattttctcttcaagatctttgatgttgtgagataactctttgttaaattttactaaggaacaattttcatcacaaactcgtaaacacttaccaaacattaccttgtaagattctgccaatgacttctcataaagttctgactcatctgaatttgaaaaaacttctttatcattgtcatcagtcaaagtgttgtttaaaaataaaacttttttcctgtaaaacacttgataaaacacttgttaaagcaacatt

SEQ ID NO: 106017 - DNA, 596 bp, Cannabis sativa
  modified_base (61)..(76): a, c, t, g, unknown or other
atttcaaatctaattatcagaattgaattaactagtaatttttaaattaatttaagatatnnnnnnnnnnnnnnnnttgaaaataggtaaaaatctaatttttggcttaattaattgtcttatttttttaaattttttttattttatcttttttttaaaaaaaaaaatttaaggttagatatttaatattttaattttttttaattaattgaccttatttgaaatttaaaataagattattttaatcatgaaattttaaatagaaataggatatttgtgctaacttttaaatttttttattttttatttaaattaaattgtaaaattagaaaaatgatattatattatcattttattttattgaaaatttaatttttaaaataacataaaatttgtaaagttgttagcaatttttttttgaaaaagatacttaggttagtcgaaacctaattttttaaatttataggtttattttttttaatttatttatttattttatgccaaaaaaatatattttttatttatttaattattttcgaaactattaaattaaattaaattaaattaaaaattaaaccctatatccaactatccaa

SEQ ID NO: 106018 - DNA, 565 bp, Cannabis sativa
ttttttatttttaataacataaaaaaaatatttccaaaatatattattatttgaataaattaaattagaattaaattatatatacatgtataataattgataaatttatagaaaaattatcattttattttgaaactactatcatcactatattatactttagcaggtactacattcaaattagtccatatcattattatatctcattctatcaataggtttgctttgtacataaaaataattaaacaataggttagctactcattttatacctaaatgaatgtgcaattattattattattttttttttgaatgaatgtgcaattattttttaaaacataagaaatatgccaaaattaagtaaaagagcttaacaatattacaaatctttggtagtgatagatatattatttttatttttgaaattatacatactaaaaaaatagttaggagaataaaaatagaaaaaaaaaaagagaaaataaatctatttaatacattataattttagacgattaatttttagcttataatattaattaaaagttcaaaaaaaataaatata

SEQ ID NO: 106019 - DNA, 1743 bp, Cannabis sativa
  modified_base (44)..(63): a, c, t, g, unknown or other
  modified_base (336)..(336): a, c, t, g, unknown or other
agtacataaacaattactcaaacagtaaaattgaatgaaattannnnnnnnnnnnnnnnnnnnacaatctcaatagttcagggggaatttttaacagctaaataagttcagtgggcacgatttactacatgtcaaagttcagggagaaaaattaccaattggctttatatttagtattggattaaaataataattttcttcaaaaatatgtataaaatattgaaaagtaaatcatgaaatttatataaaaaaaaataagagtaatttgcagggtaaatacttaaatttatctcataattgtaaataaataaataagtttaatttttgacagtaatnatacttaagttatatttctagaacctctgtaaatacctagctgttaaatgttaatttatgttcacattttatttttttattggtatatttaattttttttttttaaaaaaaatagaaatttaataacatgaactaagtagagattgtcacgtaataattaacttaaatatttatttacaattgaaattaaatttaaatatttatgccacaaattactcaaaaaaaaataattatttttaatttacataaatgaagtctatacacattaagatatttttgtatgaaaatggaacatatattatgggcagatctatatagaggtgagaaaatagttgtccagataaaaaaattaataaaatataagattagtctaaaattttatttactatcaaagttatttgtgattaattatttaattaaaaataatatttaaaaaatttcgacaacattaaatatagtcttcattagagatgtcctaatcccaaaatccttcataaatagtgagtttatttctactcaaatgaacaacattttctcaactcccataaaaaaaaaaaaaaaaaaagacaaaacattggatggattgaagagaatccctaaaattttggttcaagcttaccaaaataaaagtaggtaaactactatagtgtcacccaaacccacctccaattcctcccaaaatcataataaatgtaattaaaatataaaaaaacacgtgtcaaaattaaaattaagtggtggtccccattaaaggtaaaagaaaacctaaactatacgtaaactctttttaactctctttgcttttgtcttgggattataaatataaatgtttgttaggtttcatatatcatcacattttcatattttattacataaataaatataaatacatgtcttggagttggactgttggacacgtgcgaggcctgtggttcccacctctgtagttttgtccttttgaccgcattttcaggggacgcaaggtttcttctcacgtgcgtttccatgtgccccaagacataatcattgcacaatttttataaactgcacaaacaaaatcaaaataacttcataaaaatacaaactcaacaaatttgacgaaaatataacatgttgaatctttatatcaaatgggttaaaaatgatattgactcgctcaattatttaaactaatctgcccaatttaattaagaaattttttttatatatatttataaatttttactatatatttatatgattatataaaaaatataatgttaaaactaatatattttttttaagtatttttgattcaaatagagtgtctgccgtttttagtgctctgtgacagttagtgtacctatatggttttttccagttttttatccaccttcctttttttgggctcctttcttcattaacttc

SEQ ID NO: 106020 - DNA, 517 bp, Cannabis sativa
aatatttctcaatatacaaaaaaagataaaagtttgttcttcaatcatttataatataatcaaaaactctttaagagtctatcacaacgtataatttacgatttcaattgcatagacaatcatacgtatttttcaactaataatttacttacatgtttttcttttatacaaagatctttatcatatagtgcgcgcgactttgaatttatatcacttaagacatgtattaaattcttctacaatttttagataaagcatattttaaatttttaatatattaggagctccaaataaataaattctcataaaatatattttaggttataatcaaatcatgataatattttctcaaaatttaagccttattttaactaatcttgttgacctcaaaaagtgatcaaccaacagcggggtcgtatggatttgatgcttaccatgtgttacacaaacaaagaatgaaaattaataaatacagagatttgttatagaggttcgacccccttgtgatagcgggtaa

SEQ ID NO: 106021 - DNA, 589 bp, Cannabis sativa
ttacattttcttgacctttatactctatgttcattaaagaaccaagaagtgttgtcatttcaaccttatcgtttttagcaaaacgttcctcaatttgttcaatgaaattttttgtcatagtaaccccttcgaattctgtgccccaaaaggcttctggaatgccgtgtttcataatcattagactcatgcgatttgaacgatcccacctctcaaattcccttttatcatcatgggaacttttcttagtgagaggtgcaggttcttcattccttagtgcatggtctaaatccatacatcccagaactataagtaagtttcttttccaatccttaaaattggttccattaagcatagaaatatatttaatattagcagatattgaagcagtagaagatgaactagctgaatatagaacaaataaaataagctcacatcaatatgcataataaaacagtaaattcaacaaatggttaatcccatctcaagataccaaacacacattaatatcaagtctttggacaataatatatactgtaagcggtactcttggtgtaccaatcaaatattgacaataaaactgtgtcaaaca

SEQ ID NO: 106022 - DNA, 527 bp, Cannabis sativa
ctttgatttgaagtccaccccaagcaaggcaggtcagggtacttctacttctctcaaccaggcatcaagtggttgacgagcacagacgatacgaccattagcaagattgggcgttttgctgatgagtacttcatggtggatggcactggcatcactcgcactcggttccagtatattctgacctatcaccgccctcccctcactctcggtcttagtgatggatctcaaaaacttgcccggctttcgggggaagagaagaatattatccagttgacctccgagcataactttttgaggtacgggctctatccaaaggaatttactcctaagtctatgacggggaagaagaggaaatctggtgctggccgaaccgaatgagctcattaggagaatgaactcatttaacttaagcgcgaagctaagttgaatggagctgcaagggccaagcagtatgctcacgagctgttgaatcctaatgatgaggctgacgaagagcaggtgactccactgaaaaggaagaagaaact

SEQ ID NO: 106023 - DNA, 3186 bp, Cannabis sativa
  modified_base (1575)..(1582): a, c, t, g, unknown or other
  modified_base (1663)..(1675): a, c, t, g, unknown or other
cctttagcttccctttttataaatggagttgaaaaaactgcctctaaaggctaacattgtagtagtggaagatcaaaaatgaacccaggcgtgaagaacccaagcgcccgttcaacctttcctttattctgattttttttttttaaaaaatgaatccatgcaaagagagaaaaagggaagttagggttaatgttgatgatattagttgtcttttatatttgttttattttatttgttgttttaattcattcaattaaaaaaaatgtaaagagtattggttacattaaaatatgcacgtaatcttaaactaatataaacatgtcttgccacatcatttttttttttaaaataatactgttatgtcattcatcaaatgacaaaaccaaacagaagtgaacggaaggactatgtttcgaaatttgttatagtagtatatattaagggttaaaatttggtatggtaaagttgggggataaaaatattatttatttaagtgaaatgtgtaggacctgctaacgaactgcaccaataataatttgtcactttttgtggtgccttaagttgcacttaacatttcttataattataagcataaactttaagtatcaaacattatgttatattagtgtaatttaatattaaattttacatattttaatttaataaataatataaaaaattattagccctcataacgcatcacatcaataccacatcaataccgtattaaacactttattaagatacctaacaaagatataagcattgacttagtcttttttgatccacatatatatctacctcatgttgagaaacatgatgaaacaaaagccggttgttacaaagatcatcgatcatatataacttcacaagagcttaattattattaatattattattattagatcaattgaaattacttaattaaacttcatatgcagtgtatctggttctgatcatcatcgaaccgtgtgatagatagatataatacatgcacatatatatatataaataaaatattaattgtaaaatatgtacgtacgtgcatgatgcaaatatatagtataggacaaatatatatgatctcctaatgtaatactaattaattaataatgagattgaaaatgttatcgtatcttaaaaaatatctaaaaccaggctagttaagcacgtactcattgtttttttgcagagtaaataatcctggtcacgactgaagaacctcctcggaagaagtttgaactaccaaaattctgacaaagatatatattagctggctgatcatctctcaagaaataatagcataatttttcaactctaaacaaaatatatatgtcagtgaatcacccaaatctgatattgtgcacactagaactactcatttgacggtaggtaaggtataggatatatattgggcactggaaacctaataataattaataatgttcttctttgagtttggaaagaggtgtatcataatgagaatgtatactctgaagaataatttgcggcataaatacttaagtttaattattagttgtaaataaatacctaaatttaattttttacggtaannnnnnnnaagttatatttttgaaactttatagttacctacagttaaatatcatgtcattatccacatatcattttcttattggtatannnnnnnnnnnnntttttttaaaaaaatataattacttggaccaataaggaattaccacgtgacaatttatatactaacaattaaccgtcaggtacctacaaaagttctagaattataacttagttattattatcgtcaaaaattaaacttagatatttatttgcaactggtagttaaacttaagtatttatgccgcaaattactcttatactaaataattaataacactattcaattgtttctttaattttatgaacatattattatttttttttattaaaaaaattactaacaaattatatatctaaaaggtatatcaattcaatacaatcattttgtacaacatcaatatcgattaacaaatcacgaatatatatagaataattttatagtagtgactatgcttttgttcttatattatatataaatttttttaatcatttatttatataatttttaaaaattaacattgtgtaacatgtacttgtttgtagcttattaaattttttatttatttttttttaaaaaaaacaaaattaaaaaaaaaattaacaatcaattaaaattaactttaaattattttttttgaccaaataataactttcccacatgtttacaagtatatatattatttcatgtaaatttttcaatttttgttttttgagattttattacaaatcttcttttaagcatatatttctcccttttaaattattttctttgaccaaaacaattaagacaataattatttattttattaaaataattaattagtgaaaactcatcttatcctaaaataagaaaaaaaaaaaaaaagagaatgattagaagtgagactaagataccataactttttacaaataataaatcttgacttatattattaatatttttcatcaaacctcaccaattacatcttaattaattaatgaaatatctgtagacaaaaaaaaaatgtaaaaatgtaaatgaataaatatggttcccaagcaaaagaataggaaagaaatatggtatttttgaaggtttgagtttctgaatgaaagagagaaaaagaaaaaaaaaattaattggaagaggtaagaatagattagtaatttttttgaataattattatttaatttaagaaaattattaaaaaaaaattaattttatgaataacctagtacattccacatattaaccaattatatacactcatcaatttattatcattatattaaatatctatggctataaaaatatgcctactaatagaaacaaaactgaggtgtttaccattaccatagacatgcatatcttatatatattatttttttatatataaataagaaaattatattgctccaaccaattctttacaagctattagtacctatcaaaagggcctaactaaatcgattatacaatctgtacaattttcctcccaattttgagtttttttttacatgacattataatgcgagaaaccatgctttgctaggccaaatcaaatcgagtctctaaaccaaacttgctttaac

SEQ ID NO: 106024 - DNA, 680 bp, Cannabis sativa
  modified_base (233)..(247): a, c, t, g, unknown or other
aggttgtattcaacacaaactttctccaccattacataccctaatcacaaaatcattgatattgtgaaattcctctctatatgattactcctctagggatgctggattatttactttttgaaaactacttatgtgttagtcaggaagtaacactagtagttaataaattattggtactatgccaaaaactgtatagaactttccaaaagctgaataagtatctttcctgcaannnnnnnnnnnnnnntcactggtagagttagagactccagataggtttctacacactttttcaaaatcactgctccacccccagaataatcaccaactcatcagtaggttgtctagcattaatgcaagtctagaaacctgatttgttgtagtctaagagtattaaaataccacatttatcaactaatatatagttcatcttcttgatcatatgatttacttgattgtcttccaatggtcatttcttggattaatctgatacctactcattactcccacttagcaccaggagcctggtctaatgcattgcaaagcatatatgagacctctcactgttgatcctaaggaatgctttccttggcctttatcttttctggaagagttgaaacttttctttagataaataaaatctatttctaggagtcaaaaaacttcctatagagctagcc

SEQ ID NO: 106025 - DNA, 762 bp, Cannabis sativa
caaaccctgacctagacccgaactgggacccatacccagatcccaacccagacctagactcgagacccaaacctagacccaaactcagacccaaaaatggaaccacactcgtgacacagaattggggccgggacccaaaaccgcaccctagtctcggtctcgaacccaactcgaacctgggacacgagacgttaacactagactgagacacgtgaaagggatccaaatctgggactcaaaccaggatccaaacccagaccaggacccaaaccgagaccctgacccaaattcaggacccaaaacttgaaactgaacaagaactgcaagaccaggacccggacccaaacctagaaccgaactcggacctagccccagacccaaaccgaaacaaaaactcaggcccaaacacgttcgtatacccagaccgtgaccgagacctggacccgaacccggagaaggagctagatttgggacccgatcccaaacccagactcggacctagatagggattcggatacgaacttggagtcaaacttgacacctagattcagaccgagaccctaacccagacccagacctagacccgcaccgaggacctgaacttggaccgaacctgaacccaaacccagaccaggatctggaactagacccaaacccagacctagactcggaccacgattcagacccagacccaaacccgaacccaaaaactgaatcgaaatttaaactaggacaagtacccaaacctgaatggacccagat

SEQ ID NO: 106026 - DNA, 3954 bp, Cannabis sativa
tggggttttgaaaaaaaaaagcatagtttttttagggtttagatttttgatttaataataaatttttttaattttttaagtatataaaatcaaatttcccttctcaatttcaacatttgtaaaagtctataactaaattattttttttttttcttaaaaaaaagatacattataaagaagtgaacccttcaaatttccctataatttgtgtaatttctaaaaaaaaaaagaaaaaaaaccaaattgaaaatattggagcgaagtatatgattttgaatgaatggttagagaggtttggagcaaatacagaaatggtagggcgggtgcgaggagcagccaaagagtcgctggtagatatggaggatttgtttaccaaaacccaaatagaagagatgagagtgtctcttctggggtggtacggcctgaatcgcagagaccttccatggcgattggctgaggatgacattgagaagagagcttacagagtttgggtctctgaagttatgctacaacagaccagggttcaaaccgtcattgactatttcaatcgctggatcctcaaatggcccacattacaccacctttctcaggcttcgattgaggtctagtacacaccaaccactgtacaaaccttttaactattcatctcaactatcaactattgtttattttgtacaggaggttaacgagatgtgggcaggtctcggctactacagacgagcacgctttcttctagaggtattaatttgtttaaagtatctgtttttgatgttacactataaaccaagtcccatagaaatgtgtttgtttgtttgttatttattttaatgtctaaaacatgtatatgatacttatgttcaaggagtaagaaaaccttaacctttttattcctataaattcatatgatttgaaaactaacgatttagaaactcttaaagaaacccatttaaccttttgacatgcctttgtttttagggagcaaagatgattgttgaagaaggaggtgtgtttccaaaaacagtaacttcactgcgaaaagtacggggaattggagagtatacggctggagcaattgcttcaatagcatttaaagaggtgagtagcttcaatgagttttctttaagcaacaaggaaagtgcattgttcaattaaaacaatatcaggttgttccagttgtcgacggcaatgtagttagagtcatcgctaggctaaaggctatttctgctaaccccaaagactctctcactgtcaagagattttggtgagttttacattttgatgcttatcatggtcttattattatctgcgctgcaatgacatttttcatctgctttttttatttggtctctttgattattataacttgtaatattttgctttctttactggaagaactagtttaaggtatcttctttgttataatcctgatttatcagggaaagtacttttttaaaaaagaaacgaacaattgttttacaaaggagaaaaaaaatatattagaaattgatacggtacaatcataaatagattagtttggggaaagaagacaaaatcatgtaaatccttggtttaaaggtccaaaatgctacccattaattactaatttattcccctcaaatttgtaaacaatcataattctacaccctgaaaaatcctatttattagttttcagtcagtgccccagcaagtaccttgtagcagtattccagagtttatgtctccttctccacctcagtccaaaatatccaattgatagtaagatgtcttgccaatgataagacttaattaggcccattgtaccccaatcttgtaaaaaacaagaagccaaattttggttgagaaagaacaatgtagaaatagataatttcacggttctattgaatgtcttcaaagtacacaccaatatggggggactccatgaaaagtcatcaggttcttaggatcatttttgtgttcagatcttcactatagaagaggtcagcatgttctgtgggatcattttgtgtttagctagcccaatgaaagcggacagatgaagaccttgaccatagacgatatcccttccctgaccttataaatgaagggatgacggataattaatatctttgttgaaataaatcattgaatagttgatttacaagataatggatccgacacatttgatttcgaaatcctttgatctttatcgtaggtcagtgttagacgtttgaaaaaaaaaaaattgctgtattaagggaagtcgactctaaggcaatcaattttgattctgtcgttgagatttctatagaagccaattttctaaatgaacttccttaatgaaattctgcaaacttcacatggtagaaatgtttgcctcctgtggacaagaaacaaagactgtctttggtatagatattgactccatatggtttggagttctcgctgttaaatgttgtttattgtaagaaatattagtactaaattttcatgtggacttttgatagtccgtaacctcttattttatattttgtattaacatacatatacaatatatgttatgatgggcatatataattcattatttttgtgtcaatgtatgtggcggtggtatgggttattagggaactagctgctcaactagttgatcctttcgagcctggagacttcaatcagggtctaatggaacttggtgcaactgtatgcactccaacaaatccaagctgttcttcatgtcctgtctcagatcattgtcgtgcactttcaaactccagaagtgatagttcattgcatgttacagattatcctatgaaggggataaagatcaaacagagacatgatttttcagctgtatgtgttctggagattgtgcaagatgaggatatgtcggactcggacatacacctatcagacagtgaattcattcttgtaaagaggcctgatgaaggtttgcttgctggtctctgggagttcccatctgtcctgctgaagggagaagcaaacttggtgactaggagaaaaatgattaatcaatatttaagaaacaattttggacttgacatcagaaagagctgtaaagttgttctcagggaacatgttggagaatttgtccatattttctcacacattcgcctcaaaatatatgcagaattgttggtgatacatcttaaaggtttgtatatgtgctctttaccatcacattttcagattttccacaatctctatcttcttttttctgtcttgtatgcatcttttgaaagacaaatacatcattattaaagtatgcttgtatagctatatgtaaattacaaatatctttgatgttccaaatagaatgtcctgcatgtgtttgagttctgtgtgttaacagtttatctcttttatttatgataaatttaaaatgacaaaattctctagcaatttgatgagttattaaaacggtctaatttgacttagataggaaattctgttctttcatgcattgtgttgactggataacttacaaggcaagtctatcagatcatatctgataatcccaggttatttatttgatagcagtgtgacattgtattttggctttccagtattcaatgatatgcactttaggcatcagatctatatttataattattggacaagcaactattgtaggcagctcacttgaaatatcttttattgtttttgctcttgacatcttccaacttgaagcttataaaagttactggacatgtcacctagttgaattatgaactaatagattatagattgttgcatatggcagggactggggatttttagggtgctaatactttttcacattagagggaaatgcatttttttttagtagaaacaagctttggaccgatcattatgatgacataaaaagtaagagggatatgttagtctcatagagaagagaacatgagcctgaaaacagcctgtaggtctacaagaatacatgaaatgaaaaaaaaaaaa

SEQ ID NO: 106027 - DNA, 641 bp, Cannabis sativa
tgtgagttcggggtggtgagagttttgattcacataataatagaatccttctcttgctatatatatagacatgttaaaaaatggaaaaaaaataaaaaataaaaacaaaaaaataaatatatatatacatatgtacaatcatagtattaaataaaataagagagagaaaaaaaaaaagcaaatttaaggctaagtttggggtgtaccacccctaatcaaagaaaaaaatgttgttgcttttttctctctttatctagttggatttaaaaaaaatagatatgtatatacatattacatacatatagcaagagaattggtgagtgaatatagtgggattgagaatgaaattttgggtgagcatttgagaggaaatgaagagtgcttgagaaattgaggtaattaggtcatgagcctaagaaatgtcatctcttaccaaccccgaagctaagcctcacattacaagcctatggaagtccttttaatctaggatgtaaagctaagctacattagtggagaggattacgcaaattcacttatggaagcaaacttttttaaacttgaggatcaagggaagttgttatagaaattcaaggtgttggtgggaagcatttgcacactttatttgattgaattattcttga

SEQ ID NO: 106028 - DNA, 615 bp, Cannabis sativa
taaatatattattatattataaagtttaataattagtataaaagttttaatttgacacgtttttcaagaaaattttttgattagcaaagatcgcacagtaatcgaaaaaacactgtagcgtgccttagcattagggcgttacaggtattatggtcattctttgttttggagtttaggtggttttacctagttgtgacagcatgccatttactatttaatttaagttaatcatattattaatttaccaagttaatcaaaataagaaaaaagacaaattagaacaaaaattcaagtctctctccctccccattcgaaccctagagaagctaaaggggaatctggattttgagcttgatttttgtgatttcagcaaagattttgtgaagctcaagttgtggaaagaaccctagaatctggattttgatagttttctttggtttcaagtatgcaagtgttgaatttcaattctgtccgaacccaagaagttagggatgttttctaaagtgattttaggttggtttaagtttattatagctagaatcaggggctggttttgctgttgagcaagtttgagtttaagaactcaaactgttggaagttattttaccaggatct

SEQ ID NO: 106029 - DNA, 1272 bp, Cannabis sativa
ccatgagggcgctcggtgataatcacagggcttcgagagatatggttccaattctttgtcattttttcaatgaagttctttcggttaaaggacttgacaatgtgcactttggctacaaggaaaaggggggcttgttgtgtctcggtttcaggtgtagttgcaggagtgagttcatgaagtgtttgaatagtacactcggtttctgtgaggttgagagcaacagagagagaatttgttagatcatccataggataggaagctaaaatgtagtaagaaacctcaaacaataaaggacctggcagagtgtgaaagatagaaggtgattgaatggaagttaaaaggcacaaaggtttgtatgggaaaagggttatgacagcacggttgttcaagaaagtgaagttactgggaagggaaaaagtatgaaggggaaccacggcttcagggaaaacagtaagaataaaccaagaaacacttccaaaaataacacacacacagaaaaagagactgcccgatatggtactctgataatatagcaacttatgaagagaaaataaaattaaacttgaagtaggagtccacgggtggggaggataactagaagacacaagaggatttagcaatggggacaatcggttggtactcttattagaacataacctaaagaacaatgagctttgcagagagggtaagctagaaatgactaattcgcacacaacaaaccacctcctaggcttaactataaatagacaaacactcacggtagaggagtgatacgaggcagtatcagtcaaatcgaaagtatttaatactgggtagatctgctgcacaaagtattggaatatggcaatagacagaacacatttgcagaccacattaaatggggggttcaaactcaaaatagcaaaggggattaagtaccttctgtcgacagattttggagagttcccattaccccaaatcctttgtaaagtacaaatttcagggtagaatttaataggcaaaccaaacatatatttgtattgttaaataaaaaaccatttcctctgaaacaatttgacagtgaatagggagaaatgtaagaggaaatcaatacctgtaagaggctcattaaacacggtacgattcgaaggaaatgggagaagggcggagttaatggttacgcgactggagtagttgggtacctgcagaggaagacggcttgcttggctcggacgagtcgagctgtgttgtgtctcagtagaggaagagtcggagccaccatgatcgagcgat

SEQ ID NO: 106030 - DNA, 518 bp, Cannabis sativa
atttacaattaattatcgaatttttaaataaaaactactagaacttaaataaaactaatatttacgtggctcaccacgtaacttttatctagtatatatatatatatacaaagatataaaaaataaaaaataaatgagggagagaattgaaaaaaaaaagagagagagaaatagagagagaagagaaagaaaaaaaaatcaacaattaacttataaaaaaagtcaactaaaggtgattaaaaaaacttttttgaagttttattaagtaaaaaacaataaaaaagaaaaaaaaagtcttattaaagtaaaaatgtaaagtttggaaaaaaaattagtatttggtgtaaaaaaaatttaaattgtaaaggtaaaatatatatatttactaatggatttagtaaaaaagaaagtgtggaaaaagaaattttaaaaattattatgagtttatttaataatgaatgtgggggatcaaaagcacaactaaattcttacgcctcaacctctctctctctctctct

SEQ ID NO: 106031 - DNA, 3491 bp, Cannabis sativa
  modified_base (100)..(101): a, c, t, g, unknown or other
  modified_base (2733)..(2733): a, c, t, g, unknown or other
tgactaaaattaaattagtaataacttataactaaatactatgttttagtcacaagtaactttttgttttgactaaaagttatatttagtcacaaaaaanntatgttgtgactaaaaggttatcagtaaaagtagcaattttttgtagcgaatagtagagattttaacttaaaataaaagaaatagtaattaaaaccactaagatacctaaattaataaactaaaataaaatttaaaaaatatttgattgataattaatataattttgacagctttctaataattaataaattactacctaacaaaaagaatatacatataaaaggaaaatagaagataagtttcttaccttgagactataattaattacataaaattaaatataatctatcaaataaaaaaataaaattacaaaactttcctaataaatctaaattttgaaacaatacaaataaacattccaaataattatttattaagaataaaaaccttttaaaaagtaataaaactaccgaaacaaaataaatggctaattaataaaagcataatttactaaaatcaatcacaataaaagcattcaaacacaaaaaatgttagaaaataaatatggtcaaaacaaactattaaagtttatataaaaatatggtgtgattttacatctaccttctcatatttttcaaaaatatttatataaaaattaataaagttaaagtttgataaaattttattacttagtactctaaaatttctctaattagtattatttgttctctccttaattctctcaattttttaattttttatgaacttcataaataataattccaaaatctatatttaaaaataagtatttaattgttgagtatataatttttttattatttttgtttaatatcatgtttttagcttttatgttttgattttttttgttaaaaaaactcattccttttttgctttttttttattgtatttaattttttattatttttatttaatatcatgcttttaacttttgatttttgatttttttttgaaaaaaattctcatattcattgtcttaaacatgacacaaataaggtccaaattctaaatcgtaaggtcaattggtttgtttttacatctaacttctcctattttcaaaaatatttatattaaaaattaagaaagttaaagtttgatacagttttattacttagttatcatcaaataaaataaataatttatttcatgtataatttaaatttttttaaatatccgttgcaaagcgcgggttatttactattttatgtattaatgattaactaatttataatatatagatatcgaaaaattttatattcttgcatgatgatatgatctagtaacggtactagagaattaaaatcttatgccgtgaataaaataaagtacaaaaactttaatcaaatgttgctagaatggtttactaatgtctgtcattcgatgcaagaaattttgatatggattgctgatgtagtttgacatcatagtaaaagtatcatataaaatagagattgtatataatatgaccgatatgtaactatactgtcttcttgttcgtttatcataaaaacattcatatcacaaatgatgatcaattagttaatcaacctaaatctcgagatgccataaattcctatttatgttacccattaaaatatcttagatatgagatttacaacttctgttttgggagtctaataatgttgatggttgggaacatgatttgtaatatgtaatcctgactttttgaatggatcaaatattagtttcctttaggtgttaactttagtacaaaaatattgcacacaaattttgatgtgtgttatcaaaaatattatccacctgacgtggcatgtccatgtaagccaagactaaggacacgtgtatacagtctcgctaatagaaagacaaagtctccttacaaggtatggaaaaaccatcaagtagcaagagaaaggagttaagcgattcgtcaaggggttgcaccacaatatttggcctgccaactggagtacataggtcggctaggttgagcttgtatgcccggctagggtttgatcacaagctagccgaccaaaggtatttttaggccaaggaagggcccattcgaccaaggaagcctgacctctgcaagaaaaaggtgtacaaaggctggtatgacctacagaggttggccattgttacgaaaaatatgaataatacgcaagtgcacataatcaagtagtactcacacaggtgaggtcgatcccacagggaattgaactgaataccactaaattatacttatgtttctatttggcaaaccaataattttatgattgaaataaaaataaagattaacaagaaaataaaattcagaaataaaaagatttaatcaaagatgacaaattagggaaaagaatcctgttaatttaattacccaattattaatgctaattactactttctttcttaatgtgaatgacagattataaaaattaacctaactcttttcaaatcttttaggtcataaatcacatgttatctaatcatctctgaattagactatcatgtaatcaacattacgcaataatctaaatgttacaaaggtgatgcaaatacttttatttcacatcgaaaccttgtttaacaaattttagaattcccaattttcacttttcagattttgaattggaatcataaggcatgcaaaaggtgatcaatcttaaacangtaattaaacacaaatatggataaattttacaatcaaaaaaggagaaatagcaattatcattaactaaagataatgtcaatcaacattcatcatctgcccaaataggagtttagttcataacatccataatcaaatacataattaaaattgacacaaaaaatagcatagaaaaattaaagagagaagaaagatttggttggagagatcgatccggatcgccgcaagacgctcttgaagtctcctcctttgtttctagggttccaattctgattcacattcactttcacgaactcccatctaattaaatcaagccttctctttaaaattcatgaaattacaaaattgcccaaaaatcctgtcattaagtcttcgttcgggcgaaagaatttcccgtcgcggtgaaagattttccacaaatttgcaaaactttctgccaactcctattgtggcgaagctttttcctcgtcgcggtaggattaagcagaaaagttctttgtttgtcttctcctcaattctttcatctcttgtcctcaattcttgtaaatactttcttgtaacatccggggacttgaaacaaaagaatcaagcgtaaaatagtcctaaaactagaaatgaagagcgaaaactacccaaaaatacaacccaaaacttagaataaaattagcctaacaaattcccccaaactagatctttactcatcctcgagtaaaactaaaaactaagacaaagaaataacgacacgacagataactgagcc

SEQ ID NO: 106032 - DNA, 613 bp, Cannabis sativa
  modified_base (184)..(187): a, c, t, g, unknown or other
ttaaatttaaggtcagatttttcatattttatattatttaaatttttttatttaaatgaccttatttgaaatttaaaatgagattattttaatcatgaaatttgaaattgaaataggatagtttcgctaacttttaaattttgttatttttatttaaattaaattgtaaaattagaaaaataannnntatttatcattttattttattgaacatttaattttattttaaataacattaaatttaaaaagttgttagtatttttttttttgaaatagttatttaggttagttgaaacttaatttttcaaatttataggtttaattttaaatttttttattttatttagaaaaaaaaatatttttatttatttatttttttttcgaaatgaaaaaaattaattaattaatttaaatttaaataaatcttatgtttaactatccaacttgttacatcactactacaatatagcattttagtgacactatttagtaacacgcacaaaagtgtgggtcactaaagagttgagagtaatttttagtgacatgcacaatcagactctaaatatttgggttagtctcttataatgtaagtcactaaaaatatggagtgtca

SEQ ID NO: 106033 - DNA, 745 bp, Cannabis sativa
  modified_base (715)..(719): a, c, t, g, unknown or other
caaaaagcaaaaatggcatggataaatgatggagataacaacacagatttgtttcatgctagcataaaacaaagattgaggcaaaataggatcttctccattgagcaacaaaatggagaaagagttaatgacccgattctggtgcaggaggcttttctagattattacaaaagtcttttaggaactaaaatggaaaataggaaatcagtggtcaaaggcattttgaggagggatcctatggtatcttaggaacactcagagctgcttatgaggaaaatcacaataaaggaggtgaagaaagctgtttttgacatccctggatcaaaatctcctggccctaatggttactctagttattttttccaagataactaggaaaccattggggacaccattttccaagatggctcttctttccttgagaatggaaagattcttaaggaaattaactcaactatgattacattggtgcctaaggtaaaatttcctaatactgttaaagattttagacctattgcctgttgcaatgtcatttataaaattgcaactaagcttttgagttctagaatcaaattagttttacctgatattatttctcattcacaagggcttcattgaaggcaaatttattgggcgcaatattatgatcggccaagatttgatcaggcattatggtaggaaatccaacaaaccaggatgtgtgattaagttggannnnnaaaaggcatatgatacagtggagtgg

SEQ ID NO: 106034 - DNA, 842 bp, Cannabis sativa
ctttgtaacttaagacatgagtcatgtctaaatcatatttccttagcatttatatataaaatacattatgaacaaccaataatgctggtggtaaggctagccaatacactaccttcccgaccttctcaggtatctcaaatggccctataaacttagggcttaacttgcccctctttccaaagcgcctgataccttttattggcaaaaccgtcaggaaaagatcttttcctgcctaaaatacaatgtctttacacttgggatcagcataacttttcttcctgctttgcaagcaagcatctaagccttgatcttgtctatcacctcattggtcctttgaatttactcacgacctaaatacttcatttcccctattttgtcccaatgtattggagaacgacacgtcctaccatacaacatctcatagggagccattcctatcgtactctggtagatgttgttgttgaaaaattctatcaaaggaaaatatttattccatcaacactaaaagttcataacataagctcgtagcaaatattctaatatttgtatcgtcctcttcgactgcccatcagtctggggatgacaagttgtactgaacttcagctttgtacacatagctctctgaagactttcctaaaacttagatgtgaatttcgtatctctgtccaaaacaatggatttcaaagccatgaagacaaactatctcttttacttatagcaccgcataatgatccactaaataggttatctttatcggcaaaagtgtactgattttgtaaagcagtccactatgacccatattgaatcttacgttctcgtggttctaggtaactcaaccacaa

SEQ ID NO: 106035 - DNA, 590 bp, Cannabis sativa
  modified_base (29)..(39): a, c, t, g, unknown or other
  modified_base (462)..(476): a, c, t, g, unknown or other
cctaatttgtatgctccggagtcgagaannnnnnnnnnntgatatggtccttcccagttaggacctagtacacctgccgtactatctttggtattaaggaatacccttctcaggaccatatctctcatgaagaatttctgagctttcacttgtttgttgaaataccgagttacattttgttgatgggccatcaactttaagtttgcagctgctcgtctttcttcaatttcatcaagtgattctggaaggagtatgtgattggtaccttgatcgtacgtcaatcttctgtgggaaggtggctcgagttggaagggcagcatagcttcataaccgtacgccattgcaaattgtgtctcaccggtcgctgttttttccgttgtacggtatgaccatagaacttcaggaagttcttctggctagtttcctttggaatcttcgagtttcttctttagtgtatccttnnnnnnnnnnnnnnntgcttcaacttgaccatttgcttaaggatgcggcactgtcgcgaaacttttgatgataccatggttcgcacagaaatcagtgaaggattgactgtcgaactgcttgccattgtc

SEQ ID NO: 106036 - DNA, 841 bp, Cannabis sativa
aaaaccaagctttaatcccagaaaagagattcaccattgaaggttcaagattgagttcaaaaactcaaaacttgactaacccttcaaacaacccctaactcatgcattaaaccacaaaaaaaatcatatctaaactgcagaacacaacaacaataaccacagcagctacagcaagctaaaacaacaaatcacccataaaaaccaagttttagctcaaaactccatacttgcttaaaatcaactaatgcatcaaaacctgctctattctactcaattaaacatgtttaaacttcagagaataacaacaaacacaatcaacagctgtagcaactagaaagccaaagcatgcaaaaatcatcttttcctaaaaattcaagaaacttaagaaaaggctacaagagtcataccaacaaattgagatcaaaatcttgctaaaaccagcttgaattaccaagggaaacaccacttccttgctgctcaaagagaggtcgaaagagagagagagggctagagagaaaataaaattttgcttttctttgtttatacaaattttgtaaaaatgataaaaatgcataatcttttctttattttcagctaacataacattacaaaatcagattactaacatattcaaaaatccataaaagacaaatctcataaaggcaaaatgactattttgcccttccaacactaaaaggggttaaagagaacttaagggtatttttgggaaaactctaaattcccgactaatcccgacattcccaatgtctaaataaactgtcccaccatactaaaatacaaaattgtgattctactgagccatacaccgacttccatgttg

SEQ ID NO: 106037 - DNA, 787 bp, Cannabis sativa
aattaaatgataataaataatacccgatattttacatgatcttatagttaaaatctacatactacacgagtccttattattagggatattttttgggatacagaatatacattttaatatttgaaaataataggatttctatctattttttgccatcccttttcccatggattctgcctctatttataggaatataggttggcagttattctttttgagactgatttatctataattgctaaagaaacgtggatattcctcacgtttcatttattcacacatgggataatatctaataactatctaataactacccaaccgctccttaaaccgctccttatttttattctttagacggttatgctgactagaaagattacatctcgttaatcgtggattctccttcttatccatcttaataggggaaacatgctaagtgttagaagcacttcatctcgttgtatccctatatttgtaatagtgatgcgagatgatctttatgttatgaataacgcaatgtggttgagtgtcataagtttctcttttcttgtgagagttaataattcacgaggtccttgaatatattatcttgaacattttattaatctgtctatcctgaggtaaatatatgtctcgtcaactcttagtttaatagttattattcttgtcttgcataagattaaatagtcatcgagtttgaacatctctattaaatatattgttaacgtaaattttcgttaaccaaatttgagcctcacaatgataattcaacacagaaataataaaa

SEQ ID NO: 106038 - DNA, 589 bp, Cannabis sativa
cttgacttcaaccaggtctcccaaatgcaatggaagttggcgagaggaggagaattgtgcacggaattctgaagagaaggctttccatgaattgaactttgtaggggccaacctgaaataccattgttgggcggcttccgacagggtagcaagaaaaattctgcaacacgcatcccctcgtatcccttgcaaatctatttgcatctcgaaatagttgaggtgggaaagaggatcttctcttcctgtgtacattttccatgttggcattttaaacttgtggggcaacgccagaagattgatctcgggagagaaaggagttccacatgctcggtccagctcgagatcattgtttctttgtccagccatgccttggaacatatttttcagttcgtctagctgtgcctatacggctgggctaacctgctcggcattctagtcgatttgaatcacatcagtatctttctgagagggaatttgagcatgggctccaagctgtatgatcgtcatgacaatctgatcgtctactcctctccttctgttcagatcactccttaggtcacgagtcgtccccaacctatcgaatacagaa

SEQ ID NO: 106039 - DNA, 638 bp, Cannabis sativa
aacaggcaataacacatgtacgctaaacatataataacatatgcatgatattatactaatcttaccttaattctgaattcaggtgtgccggtcaacatgcataatccacgttctttaaaatcaagaaactagaagagagttgcttgagatcttacctagagcttggattcacaaaaatttgctttacttggttgaaaaaataaaaaagaaatgaattcctagctggttcctagggttcacgagagagagagagaagttggagagaatgagagcttcttttcaaatttcttatttttggaaaatggataaaatgagataaaagaatggttttattgaatcaattcagctaaataaactttaaaaatcagattactcatcaacataaagtccactaaaggacaaaaatacaaatgggcaaaaagaccattttgcccttccacactaaaagtcataaaatgacacttaggggtattttgaaaaattctaaagttctgactattttcgacatttccaatgtctaaactatttttgcgatatactaaaaatactaagatgtgattctaatagccatacagcacgttccaatgttgccgggcacaaaatatgcaaaattgtgaaatttctatatgtgacataaa

SEQ ID NO: 106040 - DNA, 1065 bp, Cannabis sativa
aatggggaattaattatttcaagaaagtggattagatcagtgttaattagaattgaggacagataattgagcgctgatcttgtggagttaccattggccgagttcgatattatactcggaatggactttttgtccaaataactgtaaacgaaaaatggtaactttccaaccagagaatgaggaaccatttgtctttgttggttcagttcaaggttctcgtgttccaagaatttcagcgttgaaagctagggatttattacgcagtgggtgtgtaggattcctagcggttgtagttgattccggtaaacctgtgttacttggaccttaagaggttaaaatggttaaggaattcctggacgtatttcctgaggaattaccagggttgccaactcaatgtgagatagattttattattgacttaatacctggggcagaacctgtttcaaagcaccttaccgaatggcacctgcagaattaaaagaactaaagatacaactccaagggatgttggatctagggttcacccggcctagtgtgtcaccttcgggagctccggttctgttcctaaagaagaaggatgggactcttcagatgtgtatcgactatcgagagctgaataagttaaccattaaaaataaataccctttgccgagaattgacgatttgttcgatcaacttcaaagcaagacagtattttctaagattgacttgagatctgggtatcatcaattgagaatcccggaggaagatatttcgaagacagcctttcgtaccaggtacggtcattatgaattccttgttatgtcattcggattgacaaatgctccgacagcctttatggatctcatgaatagagtattcacgaattttcttaatagttttgtaattttatttatcgatgatattcttgtgtactctcggtcagaagcagaacacgaacaacatcttcgaatggtactacaatgacttagagatcataaactctatgcgaagttcaaaaagtgtgagttttggctgtcacaagtatccttcctggggcatattgtcagaaaagacgagattatg

SEQ ID NO: 106041 - DNA, 634 bp, Cannabis sativa
  modified_base (28)..(28): a, c, t, g, unknown or other
tgggactgtgacatagaattgggatagngacctaggaaccggaacaaggaccgggaccaagtacccgacccccaactcagacttgaacctaggacccagctcgtgactcggcacccgaaatgcaaccaaactgggacccaagatcgtgattcggatctagacccatgcttggaccgaacccatagccgttgtctacatctggtgaccaacccaagacctgaacccagaccaggacacgaacccagacccagacctgaacccagtccagacccaaacctagacccgaactcgtaccttgtgagccaaaattagaaccgaaactggaagtagaccgcgacccgagaatgggaccgaaactaggacatggacctggaaccgtaaccggacctagacctagactcaaaaccgtagccagaccaggaaccagactccaactcaaacctaaacacgaactgggacacagacctggatcccaatccaaacctaaactcaggacctaaacctgcaaccaaactcctacccaaacatggaacatgactcgggacacaaaacaggggccgggacctagaaccgcaccccagtctcaatcctgaacccaaactcggacctgggacctaagacctgaaccagaacc

SEQ ID NO: 106042 - DNA, 780 bp, Cannabis sativa
aaataaaggtaaagtaaaaataaaatagggcgatggagagagagagagagatgaaaaaacatacaccaagctcttatgatgaaaggaggggaaaaaaagaaagaaaaaggtgagaatgtaaaaggtcaaataaatagtagtgggagttggagagagagagagtactacagaggggaaaattaacgaatgtaggaatagaaaaaaggaaaaaaggaaaagggtgtgaaagaatttaataaagaaatgaaatggttttggttttggagttaagataggggctatagctatttgactgatgtcgtcaagtcaaagggcatgacccacctgatggttgacacgtgtagggggcgatggtaaagtgagtgtaggagaatagccggcaagcaagtcttcctatttaaccgaaactaagctaattaagtgggacggggtctcccagtactcagcttgtcggttctaaaggtcagcttctgaaatcattggaatatattaacctataattaagcaattccactatgtatccaaattcatcctcaacattttaaacatataccagcattatcaaatatttgttgatttttttcatatacttattaaattaaaatatgtaaacttaatattaataataatttaattataacgtgttaagtatctttaattataattgtaatttatattatttttattgataatcaaatactattaggtcatttcattgtaacatgtaagttttgttatagggagagagacaaattatgtttaagatattggtcaattgta

SEQ ID NO: 106043 - DNA, 1056 bp, Cannabis sativa
gtattctatttatctcaaatggccatccatcgcattttctgtcgtcgctgatcaaaattcataaaaataacataattcacatgtaacacaaataatacatatagagtttgataaaatctccgaaattgagaaattataactcaaatgcccatttctaataatgggacccataattaaataaattcatgaataattattgaaatgtcaatcattaatgctaattacctttactaaactatattataaaatgcggtcattacacatctgctagctgcctagagatctgtttcattgtattcgtttggttctgacctttcctacttagggcatcaactacaacacaacattgattggccttcgccttcccttcccaggatggtaaaggatctcacaatcataacctttaccagctcaagccaacccctttgtctcatgtttaggtctttctgggtgaagaagtatatcagacttttatgattagtgtatatctcacatttctcgccatataggtaatgctgccaaatcttcatcataaaaactactgctgcgagttctagatcatgagtagggtacctctgctcgtactcttttaactgccaagaagcataagctattacctttccagtttgcatcagaacacagcccagcccttgtctcgaggcatcacaataaataacaaaattttccttatcagaagaaagagttagtactggagtagtaattaagcgctgctttaaattttgaaaaaatttctcccaccaatcagtctaaacaaacttcaaattctttcgggttagttttgttaggggtgttgcaagttttgaaaaaaccttaacagaccgacgataataaccagctaaccccaaaaagcttctaacttcagtagccgattatggtgcaggccaatcccgaacaacttcaatttttgctagatcaaccatgatcccatctttatctgctatgtgccctaagaaagcgacacgtgataaccagaactcacactttttgaacttgcgtaaagcttatgatctcgcaatctctgaagtactgatctaa

SEQ ID NO: 106044 - DNA, 600 bp, Cannabis sativa
  modified_base (122)..(127): a, c, t, g, unknown or other
gttataatttctcaattccggagatattattaaactctaggagtattatttgaatcatatgtgaattatggaatttctataatttttgctcggcaacaacagaaaatgcaatggatggctannnnnntcacatgggtaagtctagaacattattttttagtgggatatatattgtagaaaataaaataccgaggttgagcgggattatgggttgaaaatgcttaagttatgagaatgagggcattttagtaatttggtttatgggtagttgggtggctgtcctagattttgacacctaccaaaatattacttcagccaaggttaatgtattaacctttattttcatttgaggaaattaaagaaaaataagaaaaaaagaccaaaatacgaagaacctctccctttccctgctctctcttcgaaccagccaaaagcctaggaatttgttgctgttctttgggttttcagcaaggatatgaggagattttaatcaaggtaaaccctagacacactttggttatgtgtttctcaaggttgtaactagttttaacttgtgattttgagctttaggggattttagggtttggttcttgcataatt

SEQ ID NO: 106045 - DNA, 511 bp, Cannabis sativa
  modified_base (445)..(449): a, c, t, g, unknown or other
ctgcacttttgtggtggtggattgtccgactgcgtggtggtggattgtccgactgcttacaactggattgtccgactgcttacaacgtgtccgactgcttacaacgcgatcctcggccgaccggccttggtagattttggggtagttacgtccattcggcacctgtgcctaaagttccccacccaggaagctgggatcgggacggtgagaggaaaccatggggaagcaaggcaatgttacaatgttgcgacccacctgcccgtactgatggtccgggaaaccattgagccagaaatggctgaggaagatgagttggacccccgggtggggttcgaaaaaattgtggaaccaatggaggatgtcgaggaattatcagtgtgcgacctcgactccaccaacgtactccggctggaaagagcttagatccggaggaaaaagaaaaaannnnnaaaacactgaagggcgccatcgacatttttgcatggccccaagaggacatgactggcataag

SEQ ID NO: 106046 - DNA, 634 bp, Cannabis sativa
  modified_base (209)..(236): a, c, t, g, unknown or other
agaaaaaagatcaccagggctattccccatgtgcatgcacctagctagctaccgttattgagagtttttgttctgattgtagtttatataaattgtacttcaactaatagtacatacagttgagtcttctgtatactttccagtgatttttgtaaaaattatagtggcgtttagtaatatttttatttttaaattttttaatcataaannnnnnnnnnnnnnnnnnnnnnnnnnnnaataaaaatgtgttctataactacggttgtttttcaattttaaaaacaaaacaaaagtgtgttctgtaaattttattttttattttcatttattgattttatttaattagggtccgaggccaagactcagggcggagtctaaaatattgattagaaaaaattgtttaaaaaaattttgaaagtgatttttttttttaaatttaaattcttaattaaaaaattggaatgtaagaacagttttataaaacatgattttggaaaatagttttacttttttgattttaaaaacaaaaaattgattaaaaaaatgttaccaaacacaccttctattagcataattgtcattaatgtttgtggaactgatttttgttagaacttggtcactatagtttttagtt

SEQ ID NO: 106047 - DNA, 1436 bp, Cannabis sativa
gttccgtgggaactaaggcagaggaggacgccagggttactcttaccctgagtgcccacgttgtaagaaacatcatccgggagagtgcaactggaagacatgctttcatcgcggcatggtggggtatttcaagaaagattgccctcagataaagaaggaagaacagaagtcagaggcaaaacctgtacgtgctcaggtgtttgccatcacccaagctgatgttgcaaccagtcattctgtggcgacaggtctgcttctagtcaacaactccttatatactgtgttatttgatttgggagctacacgctcatatgtggctacatgggtgattgaacttttaggtaggccttgtgatattctctaaagagggtttggaaccctaattccttacggggagttggttatctctagtaggcgcattaggtctatgccaattatgatcgaggatagggagttgagtgctgaccttatagaacttgaattatcagagtttgatatcatactagtgatggatcttctgtctaagtattcggccagtatagattgtaagcggaaaattgtgacttttcagccagaaggtgaagatcaatttgtttatgttggatcggttcagggatctcagatcctgattatttctgtgctaagggctagggatctactacacagtggatgtgtaggatttttagcgattgtaattgactctaccagacctgaaaaatttgggcctgaggtagtcagggttgttaaagattttctcgatgtatttcccaaggaattgccaggcttgtcgccgcgtcgagaaatagactttgtgattgagttggcacctggagccgaacctatttctaaagcttcgtataggatggctccagcataactaaaggatcttaagttacaacttcaggggatgcttgatattgggtttacctgacccagtgtatcgccctgagaagctccagttctgtttgtgaaaaagaaagatggttccctcagaatgtgcattgattatcgagaactgaacaagttgacgatcaagaacaagtatccgttacccaaaattgacgatttgttcgatcagctttagggaaagacggtattttcgaagattgacctgcgatccggttatcatcaactaagaataccggaggaagatataccaaagactgggtttcgaacaagatatgggcactatgagtttctggtaatatcattcggattgactaatgttcctgcggcctttatggatctcatgaatagggtattcaaggatttcctcgataactgcatcatagtttttatcgatgatgtccttgtatactctcattggtattgcagcgacttagggatcacaagttgtattcaaagttcaaaaagtgtgaattctggttgtcagaggtaacttttctagggcatatcattggaaagaatggaattat

SEQ ID NO: 106048 - DNA, 1229 bp, Cannabis sativa
tccacagcaacttcaattaacagaagggactcaacactcactccacaactctctctctctctctccagtctccacagcaacttcaagtaacaagaacggactctgtctctccctccacgagaagaaacaaaaaaaaaaaacacactttcctgagcaaaaaaattaataatagaagagttataaaggcaaaacctccagtaattttacttcgctagcaattaactcccaaacttaaattttgacagttaaaccgaaaaactcgtgttctgttagcacttttctatttccatccattttcgagtgttaagtgacatgttcgacttcccaggtaaacaaagtgtacacgtgacataattttaaaaaaataaatcataaaaagaaatttttcatctttctccaatgtttcttctctcttccatttttttttttttcatcatcatcagtttaaaagataaatcataaaaccatcatcaccaccatccaccatagatgcccaccattaaatctgtcacagtactaagctatatttgcactgtgacagaagaaaaataaactgacagagaggcagattttggaagggttctgacggaagagtgtgtcaaaaactcagcctcttcttcttcttcaatggttaaagatgggagggaagaagggtttcactgaattggaggctgagcttaaaaagatggcaccacctaacggtagagctattttgatattcaggacaaggtgtggatgttctgttgatagagaaaaaaggtgcctttttttctcttttgaatcttctcttagaaaaatctttattgaaaattctgatttttactctttagtttgattcttctttatatatcttattcaaaaataaaaaatctcaaatcaaacaattgaatctgtcaaaagagtaagtagaatggagaaagaagctcactgatttcaggtgcaaaacaaccctcgccggcgttcgtgcaaaactcaaccccacatccgagaagaccagacaacggaattggggttagggttttttggggcgtggtatttgattccggggtcggtggggttggtcggagaaccgccagatgtggctgggcgatgatgaatagagggagaaagtgttgctgagagagagaagaaaagggatttagggttccaaaataagggtttttcatttaactttttaatttaatttcttttatttattaattaaaattttaattttcaagtattttttt

SEQ ID NO: 106049 - DNA, 810 bp, Cannabis sativa
atctatagttgtattaaactttcctaagaaaaacataatttgcagcataaaaaatagattctgacgcagcaaatcagaccagaaaagaaaacttgtcataaacgagtctgatcttgtattaggtcttgatacctgccataaacagtgtttataatctgaatgtatcaagacataatcaaatttattaaggaaaataacaatagtcaaagttttctttaaaaaccaactttccataagagaatttcttctcttacaagaagtttccatacaagagaagttcggctgaaaaatcaatctttcgcaagaaataaaagagcaataaaaccgaatattaaaggtgagaaaatcagttacgaatgcaaataaatctcaccataaaataaaaaatattttggcatctaaattgctagaaaaggactttacaatagagaaacaatcaagcaacgtttttccacatccgacttattaaaaaccagcatgcaccagtccagaaaaccagtttccgaagccatattgctaccaatacccactctgttccaacacaactgaacatactaacaagtaaccaagctatgaagaatagtttcattctcagccttacaaatgggacataatgcgctcacattaaacaactcttagttaacaattgtgtcatagtggagagacaattcttcactccagcggccatcaagttgttgtagtagattataagcactccttaccgtaaataaaccagaggaatcaaagtgccaaatgtaatggtcttggaaacctacaaaccgtagaggtatctgtaggatcaggctgctg

SEQ ID NO: 106050 - DNA, 939 bp, Cannabis sativa
caccccctttatagcaaaatccatatatcaattgtatgagattgaattgctaacctagttattgaagagttactatcaaagttgttgcaagagttgctataatgattgttatatgagattgagttgttataaaaattgataacatagttgttgtaagtgttactaacttggttgtggtataagattgaattgctaatatggtcgtgatatgagattgggttgataatatgattgttgtaaggattgttaaattagttgttttatgcgattgatgtaagggttgttgcatgagattgattgttataagggttgtaagagttgctaacatatttgtcgtgtaagcttgagtagctaacattattgttataaggatttctaatatcaagtaataatggcctttagaggaatacacattaattttatacatgtttccacattagatagtgtagtgattatgagcacatgcaaccttacttatcaaatactttcattaatataatcgatcttaatgattattcaatataaaaatatgtgtttatatatgataatataaagtcatactgatttataaagaatatcaacactaaaaaccaaaccatatcactagcataataaaatagcaagagatcaaaagttcttatatttatgtcccaacaatctcaaatatggctagctagttatcttgagcaaccggttatcttgagcaagtacactacaagcactaatatctccatactcatcaagtaatttgttctatgcaaagtttaaatgtatctttgataaaaaaaaatttaaacgtatcttataatccttgacacaaacaatcttcaattctaaatgaatattattgaacacatatgattaaggttcactaaggcaatttaacaaacctatagtgattcataatataaaatacattcattattgcaattttaataa

SEQ ID NO: 106051 - DNA, 626 bp, Cannabis sativa
  modified_base (356)..(356): a, c, t, g, unknown or other
aatatctaaaatatacgtgatatacgaagatgagaacggtttaaaaatttaaataagttaaaatatctaaaatttaaatttaaataaaatataaaaaaaaaaaaaacaaagttaagaaaaacataattcgggaaaaattatcctattaattattttaattgttacattttttgtattatttttctcattttatattataattattatttacacattaagagtctatgctccttatactaaaaaaacaagtctatgctcaaattaagagaaatagttcataaataatctaataattgtaaggccatttcgagagcatagttataaaattaattaagtaaattattattattattatnattattattattattatattgtgattgagataaaaatgttaaatgttactcaaataatttttatataaataattaaaatatttataaaccgcacgcaaagcgtggtttgtttcctattatattaataaaaaataattaatatttttgaacccaacttgttataaatacgaaatacaacatttgcagttatactattaaattttattgtcaaaaagctaatatgtttctttattgtttttttttttgtcaataaaaaccctaaaaatttat

SEQ ID NO: 106052 - DNA, 842 bp, Cannabis sativa
actaaaataattggaagtaataattggaagtattagatggaagtattagaattagtattagaattaaaaaaagaattaaaaaaatagtaaatttgttgtggcttacgacacgaatcacataacaaatgattcttttaacatttgttacatgagactccatgggatttccttggtacctggcacacagaccaacactataactgaagtcaggcctactagcagtaagataaagaagactacaaatcatgctcctatacaatgtaggatctactttgacaccgttctcatctttggacaacttcacagttgttcccattggagttttggcaatctttgaactttcaagtccaaactttttcaccaaattcatagcatattttctttgagaaacaaatataccatcatctaactgcctgacttgtaaaccaaaaaattagttcaactctcaccacatactcatctcaaattcctctttcatctgcttcacaaacacctacacctcattgttagatgtagaaccaaaaacaagatcatctacatagatctgagcaatgattatgttagatttattattttttataaataaatttttatctactcgtcccctcttgtaactgtgagaaactagaaactgaattagtctctcataagaagcccgtggggcttgtttcaaaccataaagagttttctccaagtaaacatgatcaggtgcatgaggatcctcaaatcccttcagttgttcaacatagactttttcattctagattccattgagaaatgttgatttgacatccatttggaataacctgaaactaatcaaacaagcaatagacaataataat

SEQ ID NO: 106053 - DNA, 631 bp, Cannabis sativa
aaagaaccaactgctgtcagattaacactagtatccaaccgttgccaacatgccttggcaaaggagcaatccaccaagctatggtagattgtttcatcaatttctttgcatacggggcatatggcatcaaccggcacatgtctagagcagagtcttatttttgtaagcaaacaagtagtagcagcctgtcataacaagtctttcacttttgggggaacacttagcttccaaagagtattccaaaacatggagttatcatcctgtgcccctaattctttgctcacttgcaagaacttataaactgatttgactgaaaaatagctcgagctttcccaactccaataccaagcatcgcataaacgacttgaagacaagaaaatgctaagaatcaatactattttagattatgtattttgtaaaaattattgaagagattttttgttttattaaatgacaaaataaatcttatatttttcaaaactgttcaaaatggtagtctgaacccaatttttaaaaaaatttctttaatataactaactttttttttttgatttaagcgtttatatattacaacatgttttatctgggactcgaacccaggacctccaacactcacacacccatctatggc

SEQ ID NO: 106054 - DNA, 1106 bp, Cannabis sativa
ggtaaaataaattccaacacccttttgcacctcgcatgtttcataggtcttggctcgtcaaaaatgacttcttgtacgtgtgcgaggtagatcttttcccgagttttattgagcttagtgtattcaatataaagagggatatacttgttgggtttcttgtcattaggcagccctttggaatcatcttttttcatttatcttgagtcttccgaatcaagttttccaacagtatcgtgccccagttgtctcctgggtttcgtgatttgatttactcaagacttattctccaacccgctcattcgcaaatggaatgaatccttttgtcttcaattgagtcattgatggaggtcaggctttttaaggtttagatgctctcgtagatcactctcatcatgattgtggctggaccctgcccttcctctcaaggtttgactcacttttttcttcctacaatggtttgcacgagtttcattcttatgagactgaatagtgggttggcgatttttgtctgatgttccacatatcccaagctatacccctagtcttccctctgtttcctcaggttgcatcccatgagagctctaagcatatccttgggtcatttcctacttcttgacttgtgagccacgaggtttgcctcgtaaatatctttcttcaaggtcacgttgtttttgggtacaatctcccaacgttgcttttacggtagctatttcatgctctaactcggcattacctccaatcgacgcctaagatggcaattttctgattccatgatcggtatgtatctggttgggtcgtaagcaccatcctcatcaacctgattagggagtgatcgattgttgctcttccaaagtccaccgagccaagggccccaatactgggtcttcctggggcttgcattctgttcatgtgatgattctgcagatccctgaggacttaatggttcttttccgggatgatgattgattccctcttgaggactattaccggtggggtcatccatcacttttgtgtcagcaggcttttttctgagcttcttcacagaggctctcaatgaaagcaccaaactgttaaggcagattttcattagccaaatttgagcctca

SEQ ID NO: 106055 - DNA, 1102 bp, Cannabis sativa
ttacttctaattacacagttacagtgtaattacatggtcagacaaacatgtcaaatagtgtaattacctccaattacacacaaatccaattacatcatggctttccaaacgtacccaaattttttaaagcttctctattttagagaagctgttgtgaatgctcttataatgtctaatcatgagcatccctcttctttaatctagcaaggttcagacccaagactctagctttaatggttaacttaatagaaacactcacaactttaacagaattacaagaaaacttgaagacatacttgttacaattacaccatatagagtaatagaccacaaatatagtggcattacaaatggattccttcaagtttgagtgaggattcatactccactgcctctactcattgaagttcgaaggcaattgaatttgacccaaccaagcatttatctcagagatgactttctttataaagagacaatcaaagaagaggtgttggtgagtctctatgataggttcacaaacaagacatatgcaagaagggagctccaagaacttactcttgatctcaaaaaatggctagccgatagcggggtcgtattaatttgatgtttgccacatgttacataacaagaacgataaagtaaataagacaaggatttttataaaggtttggcccccttagttagcaggtaatgacctactccccttttagttgtattgatatcaagagataatactattcatatcactataggtgggatctaatatagctctatataaggttacaaagcatggatcaagtaggcaaatctctaatgagggagagatatgaccttaaaggcgtgtacaagagagagagaagagagactagggtttcagactttgaggctaggattagacttaggttttctaggttagagttaaggcctttatataggagagcctaaaccctaatttacaactgaaatccttagatattttcatattaaaatgattaaatacaaaaaactatattgccccttgaaagtagatattttccatccagtttgttgggctattaagggcccaattcgtaggtagcttgtaatccacgtatcaggctat

SEQ ID NO: 106056 - DNA, 702 bp, Cannabis sativa
aaaattacttaatttaagttggttcaaaattaattatataattaatttttttactcaaatttaatttttttataaattcatactaattgaaatcaaaatttaatgtattaaaaaatacattttcaaaattctcattaaaataaaactagaaaaattatttatgttggtctaaaattaaataaattaattttcaacatacatgtaatttttctatttaattaaatatcataagaaaaatatcaaatatttaagtgtctagaataaaatgaatttaaatattaattttcttatataattaaatatatatatatgttatacccaaattcacttgcacatcagaaagcgacactagtcaatctcagagaatatgaaccaacagatttaatgataattttgtcactaaatacaaaataaaataactcattaaatatataataactagagtatgtccgtaacttgctgacttaatattattaagcgagagagggatatacaaactttcaattcatatattgacgagaaaccatcttgtctcgcaaggtataatcccaagggacctataaacgacgcatagcgaggcatctacctcactgtacgtaaagaagtactgacaaggtgaatttattggaacacttatcatataacccacattataacaactaagtataataacttgaaagacatgattgtccagtctgcaag

SEQ ID NO: 106057 - DNA, 580 bp, Cannabis sativa
tttattcaatttttctaccaattgtctcccaactaaaggtaggggaggcatttcaaattcttgcttaccgtcaaatgccttctaaataagattaaaacaataatcataacattgaacatagaagaatataagcaatttgatatataatagaaactagaaattaacattcaataatgaaattaagaattcatgtctcgggttttgaaataatccttaactaaaaggaaactactcagaactagactttatagtgataatcataataaatagtaagattttaaggcgaagaaaagaactatgatgaagaacacttcgaagtccgtctcttttttgctctctctatctttctaggtttctatctcaatttggtagctctaaagttctaaaattcgaagcctaaaaggttctatttatagtacttaaaaagatagatgaatccacttataattaagattttgtttcttaaaaaaaaaaagataagtcagtgctataatatgttgaaagaaagacaatgggtggatactttgatcgattttgatggctatgtggatcgaattgtcaaggagttttatgctaatat

SEQ ID NO: 106058 - DNA, 1756 bp, Cannabis sativa
ctctctctctctctctctcaataccaacaggtacatacactagtagccaaacctccacactctacgcacaccatgatagcttgatccaaagtcggcatcttcaagctaaaaacttttcttgctaccacacctcctactgcctctatcaaagagcccatgcctgtcgccattgaacaagccttagcctttccaaaatggaattcagccatgacaactgagttcttttccctcaccaaaaattgcgtttgaattcttgtcaagaggcttccccacatgcacattgttgacaacaaatgggttatcgtattaagtataatgttgatagcacaatcaatcactatgaagcttgtttggttgctaaaggcttccaacaacaatccaaaattaacttctttgagacacttagcccagttgtaaaaccctcaacaatttacattattctctctttggctattattcataactggaatatccaacaagtagacattgacagtgcttttcttactcttcaagaagaagtcttcatggaacaacctgctggttttgtcaatcctgacttccctactgctgtatgtaaactcaacaaagctatctacggattgaagcaagctcctcgtgcatggtttgacaaacttaaagactctctcatcaatcttggtttcactcattctgctgcatacacttctctcttcttttataacgaaggtgatgctcttctctttgtcttagtttatgttaacgatattcttcttagtgagaataatgttgcccaagttactaccatcatcactcaaatgccatgtttgctctaaaatctcttggttcggtcacctactttcttggatttgagataactagggggcgtgacggactacatttatctcaaactaagtaccattgatctcttgaaaaaaaatcaatatgctcaaattgagtattatcaaaagacaatattcaattatcgattttctagagtattattatgtattattaatcacattatcacattcgtatacacatatttataataaatatccatatatatgcaattggtagctatacttcagacgtaaaacttctcaaacatatattttttatctattatatataatttttcattataagtttgagtgttaatttggcccttcttcaagcatttattgatgtcatattgacaagtaccgatattaattaataaaaataaatttatagaaattgttcttgattgtattttttatgaggttgtgtatgttgttgggactcacagttgtctgacatattatagtagtttacgtcccaaccaattaagttggttaatgagttttcaaaaagatattccaaccagattatcagatacaaatatctgacaagtgagatgtcaaaagaatatttagcagaatatattttatggttgcattataagtaatgctataggaacacagtaattgagatgctattatttaatattttaactttgatattggtattgatacaaaaactaatttttaacaccaaaactatcaaattttacaaattacaataacaaaagtccctaataactatttgagaaatgctaattacaacttgctattacaacctcttagtcaactttcacgtctgaaattatatgtcgaaatattttttttaattttttttaatagcggtattcgttataattacagtatcatccctataaatttttgaaaaattccaaatagatcacagtaccgatatattctagtttaccacacgcgtt

SEQ ID NO: 106059 - DNA, 1801 bp, Cannabis sativa
tactttgtaatagtaattaaaaacttatcttcggaattaatgaaaatgttcatctagttaaactatcaaaacattcaaatttaatttaaaataatatttaaaatttaacaaattttaaatattaaaatttgatgaaaataattttttaataaaaaaaataaataatatgaacaaatttattattaattacaatattttaggtggattaatatatttacatttaactaactacatgttgaccctttacgtggcaacatctaataatttgttatttttttattttaaaaaaagtcatccaataatttttcataaactaaaaattctgttatataaccacattttacaaaaataattaattctttttaattagttagatattaaaattatgtatataaactcaattttctttctatcaatatatatccaaacaaataaatatatatagtaaatataacccttaatgcatatatcttaaataattctatatatatatatatatcttgtttttatatgtatatatagaattctatctttgtttgtttcgtgagtattatgttttgtatatataatatgtagctatactagattaatagtgccatgccaattttataagtaattaattaattgacatgaatattattttttagggaatacatgcatgcacataaattttttgaaaaaattacaaaaataactcatttgtgtttttgactttagtaatgctattaaaattaaccatttttgtaaacattgtaaatttattttgaaaataattaagtaatgaaaaggagaatattaaaatatctcacatcaatcatattacatttagacatgtgataatatatgcaccttaacaaatattgcattaaacacatgtgagcgacaggttccttttttgttttaagaaaataaataaataataaatacaagaagatcgtacataatatttaagaataaatttagagatttaaaaaaaaaatgcacacacaataatttatatctaaaacgattttatatcaattgatttattttaatatgcattattattttattttatgttcatatctaatattatttatttattttttatatataattatttataaaaaaatgaagtcatttgtaatattttaagtattattttatattatatatgggaattgtattttttttaattatgtaatcaagattagttatacattattgtatagttaatgtgtgaaatttaattgtgtcacataaatataattattattgtatatatttatatgtatagtaattagttttagaactgtatcaattatcatttatgcctaatttcttttttgtgtccattagttggtttgtgatcgaactttttaaatggagtacaattaatttgaccacttttggttttgttgattgaacacgtgtgaattgtgatgatggaccagaccactccatacataaagttactttattatgccattttggtaatgatttttgcatttacattatgcatatatagataaattaagataattagaatcaatgaaacttcaatataactataaaaggttatatatatattatttataaatttttaaaaaattataaataatttcagtatcgaagttaaaattcgaataataacttagcatgtgtataaaaaaaacaatctacgtgtagtaaaatatttaaattaactttatttttaaaacgtgtactatagacttaaggtttttctatttctaatcgagtagtgatgttcacattgatatattttagggttattatatattaggattattggctgctggcc

SEQ ID NO: 106060 - DNA, 520 bp, Cannabis sativa
  modified_base (26)..(29): a, c, t, g, unknown or other
ttatcatatctagttcaagttcaatnnnngtccctttcgatgcatactccatgtatcaaacccaaggttactttaaccaataccttggaaaggacataacacttatccaaggtgcgagtaaactacattgtagattatcatatcaattaaacccagtgtactcataaattataggaatatatttaatcacataatcttgattactttccactgtgctaacgacattataaacaagaatatcaatgtgataaggatttggatgaatttataatcaaataaacatataaatgatcacatgaactaaaaaaatatactaaataagtaatgagaataaatatgtttctttattgataattgaatagaaaagattatatgattcttaggtataaacagtccatcctatcagttgattttgtcgctctctttggagtgtgttgattttgtctcttgctgtcctttttgttctgttttttggattacctgcatcatggcttctagtagcaatagtgggggtgcttta

SEQ ID NO: 106061 - DNA, 526 bp, Cannabis sativa
atccataacacaggctcgtaacatatcctccaatatctgaatcgtcctttcggactgtccatctgtctgaggatggaatgttgtactgaattttaattccgtacccatacctcgctacaaactttgccaaaacttggaggtgaacttcggatccctatccgaaactatggactttggcaccccatgaagccttactatttctttaacatacaactctgctaactgatccactgaataggttgttttaactggtagaaaatgagcagacttcatgaatcgatctaccaaaacccaaatagaatcgaacaatcctgtggttctaggtaacccaaccacaaagtccatcatgatgtcctcccatttccattcaggtagggctaaaggttgtaacaaccctgccggtctctgatattcagccttgatcttctgacaagttaagcatttcgatacaaattttaccacattcttcttcattccgctccatcagaagtaaggtttaagatcctgatacatcttagtggtgtcg

SEQ ID NO: 106062 - DNA, 1420 bp, Cannabis sativa
ctcaatatagacacatggaacacattatgaacatgtcccaactgtcctggtaagtttaatcgataagcgtcgtccccaatcctctcgataacctcaaaaggtccaatatacgtcggggctagcttacccttcactccaaatctcgttacgccacgcataggagtaactttcaagaagacataatcaccaacatcaaactcaatttccgtcgatggagatcggcatagcttttctaacgaatctgaataaccttaagtgtttcttggattcccttaatcttttcagtggtactagagataatttgggatctaatagtgacatgctcatttggttctgcccaacacaatggcgatctgcatggtctcccatataaggcctcataaggagccatacctatactagcttagtagctattgttgtatgtgaattccaccagtgacaaatgctctcccccactacctccaaaatccaaaacataagagcgaagcatgtcttccaaagtctgtatggtcctctcagactgtccatctttctatggatgattggcagtactcaagtgaagttcggttcctaaggcttgttgcaaggccttccaaaaccttgatgtaaattgaggatctctatcagaaacaatgcttgaaggtattccatgtagtcgaactatattgtctacataaagtcgagctagcctggtaagcttgtaatcctttctgattggaataaaaatgagaagagttagtccaacgatcaacaatcacccaaacagcatcatgcttcaaaggtgtcaacgacaatgcggtaacaaagtccattataatcttgtcccacttccattctggtataggcaaaggttgaagtaaacctgaaggtctctgatgctttgccttaacttgcagacaaactatacacttagctacaaagctagccacatctcctttcataccttcccaccaatattgtctcttcaaatcttggtacatctttgtactttcgggatgtacaacaaacttggatttataggcctcaattaaaatggactccttaagatcagggatatttgcaacaactagtcttcccgtatggtataggtacccttcaccattaactgtccacccatctagttgctcaccatcctggattcggttccaaataaatcttagctttttatctcgccactgacgttgcttaacttgttgaagtagcactggtgtagccactatgttagagatataagctacttcttccccttcatagtattgcaagttataatcacccattatgattgtccttttccagtcctaatttagagccaaacatgccaaagtaccacgaggctttctacttagtgcatcagctactacattagctttctcgaggtggtactgcaaggtgaaatcatagtcttccatatactcaaccc

SEQ ID NO: 106063 - DNA, 728 bp, Cannabis sativa
  modified_base (662)..(689): a, c, t, g, unknown or other
aaaggagtacgaattttagagaccgagttcaatactggaggcattcgtcagagggttttcaacactctcttcttctctttacttaagttaatatgtgtgattttgcttcaataaacatgagtagctaaacacttaattagggtccagatggatattgttttacattatggttctaatatgattttatttttcctctatttctatgtattctatttcattcgtacttaattacttttaattgcttgatcaccaattaattgtctatgattttgaagcgatttctgagatagtgagtgtcaattatgctatagtgaatagaactgaattttgatataggacgagagtatctgtatagtttacataacttatagggtttatatgtttaatgcctgttgcatgtttaatatatcacgagagtagaaaatttgcatgtaattgaggtttatatatctgagaagactataaattaccatagtaaacctgttattgcatagaaattggttataggaagataatcatattaggccataatcagcagatacaattgaagtcgaaaccctaactttaatcatcgttaatttcttgttgatttatatgcttcttaatttcaccgtttatttagtgtttctaattttacttttctcttaattttgacataaccnnnnnnnnnnnnnnnnnnnnnnnnnnnntacttaactacaatccttgtgggatcgacatcactcttt

SEQ ID NO: 106064 - DNA, 1308 bp, Cannabis sativa
ggtatcagtagtgtttagtactttcaaaaggtagcgtcctacgattggttagtgatatttcctaaaagttattttcttaagttatatagttatatgagacatgatacttaattacactaatagcaatataatatttaaaaataagttaaacaccaattaatgtgccttttagtatttctcaaaatattatctttgttgtcaggcagaacatgcacatgcaggataataaaaccctagagacctttgctagtttgattaattaagttggaaaataaagttatatatataatattatatcgagcattgttattaaatattttatagtactcaacacactatattgatgtggtctcttgtaagtggttagaggtttttatattatttattaaattaaaatgtatgagattcaatattaatttacatattgccaccggtacttggcataagaggcccctttacatttctatattgagaaatgttaaagggcacccatagtgtcaaacacccttgtaaggtataattaggagtgtaaacggatcacgtcggatctaattcgactatgatttgacctgatctaaatctgtaaggatccgtccctccccatcccgttagatcagatcagatttgacccgacttattcagatcgaatctgatctgacctgacttttttttaatatctaagcttatacttttatatctattttaattttgtattagtattatttaatacaatactatatttggtattgatttctattaatagattatataaaattataatatatttttaataaacacgaccccaacaccaactataggtgaggtccgggttcgggtcccagtctaggttcgggtttgggactcaagtctcgagtccgggtctagatccgaattcggatccgggtcccgggtctggatttgggcccaagtctgagtcccgggtccgggtctcaggtctgggtactcgggtcccgggtctgaagtctaggtctgggtacccaagtcttgagtttgagtcccaagtcccaattggggtcttgagtcctggtccgggtccgggttcaggtctcgagtccaagtccaggtgtggatctaggttcgggttcgggtccgggtagtcttgggtctcgggtccggtcctgggtctcggttcgagccctaatccggatccgtgtctgggtctcgagttcgattccgtgtccgtgtccgtgtcggagtctggagtctcaggtttgagttcgagtccaagtctaggttcgggtctcggcttctgattccagtttgtaacccgcatcgaggtctgggtct

SEQ ID NO: 106065 - DNA, 855 bp, Cannabis sativa
  modified_base (34)..(41): a, c, t, g, unknown or other
  modified_base (70)..(77): a, c, t, g, unknown or other
tgattagacatggtgtgcatagtttatttaattnnnnnnnngtgtgcatagtttatttaattaaaaaaannnnnnnntgaaaggcatgtaaaactatttatatttttaaaactacagcactgcagtatatttcattcgttgggcagcagtacacgaaaatattttttccacaatatctgcgaacatgacagcaaatatgtaaaatacataataagattgttagtatctttttttatcttaacttaatttcaataacatcatatattttttgtaatataccgtggtgcaggaaatctttcctggtcgcatgttgacttgtcacatataattttttcattgcgattgtataaaaatagattgaaatagaatggaataaattcatgattcaaagttcatgacagtaataaaaaatatatatatttgttatttttgtttgttaaatttaagacatttttttacattgtagatgttctttaaaaatatttatatatatacatattacacttacatattttagattattttataggtgtccatgttcaatgaatctaaacaaaataagaaagccacagttcacactcatcgtatgtaatattaatttacaattatacaacaatcatctcacttctcaattctcagcctaagaattggtaatagaaaggtcttaccaaccaacctccacgttaatctacagcagcaatgggaacggagtttgacctggcatccattcaagcaccagagcacaggcccaagcccacaatcctcgaagtccaaggaataccattgatcgacctttccaccgggcccatcgatgacctcgccagggagatcggcagcgcctgcagaaagtggggg

SEQ ID NO: 106066 - DNA, 507 bp, Cannabis sativa
attgatggtagtccatggacttttaatagaagtctagtgatttttcatcgtcggggggaggatccaaagtcggttagtttgcatcatctcgacctttgggttcagattcatgatctgaaaatagggtacatgcttgaaagagtggttcgtagggcaggggattatgttggaaaacttgtcaaggctgatacaaaaaatttcaatggaatttggagagaatatcttcgggttcgggccactattgacattgaaaaacctttgaagcatcggatgaagttgtgcgaagacaatggtgattggatctgggaaaattttaaatatgaacatgttccaactttctattttgtatgtgagttaattggccactccgaacgcttttgtcctcgaaggtttgatgaatcttatgattaacttgtcaagtcttatgggatcggtatgcgagctcaaatgaaaaagaataactatttgataggggcttaatggctacggtcaggtactgaacaaccc

SEQ ID NO: 106067 - DNA, 537 bp, Cannabis sativa
ataggaggtgagattagaagaggagtgtgtactagatttctaagattgggcctcaaagaactaaaccctaattttttaaagaggggcagaaaagaaacgatttttttttactacaaatgctctgataccatgtagtaatttgggaatgatacttctaatttgatattattgatgaaaatgtggcctttatataggctgattacatagtagaattaggcaacaatcaaggaaattaggaaaaaaatacaacctagactaagctgtcaaaaaacaccctaaatataactatacaaataactctagctatttacaaagatatttatacactataaaatacaaaagtattgttatagctaaatttcgaccaacaataaaaaactaacatgtgtatcaaggctagaatatgaaccagttcaaaccacatattattaaatgcacattagattactcgcctcgggaaatacagttaataaaaatatttgaactcgccaccatataggcaatagcgagatgatgagcaataattattaactaaag

SEQ ID NO: 106068 - DNA, 562 bp, Cannabis sativa
ttgatcgctggcttaaagatagccgaggccttgaaagttaaaaacatcatttgtcatagtgattcgcagttgatcgtgaactaggtcctcgaggaatactaggccaaaggcttaaaaatggaaaagtatttagagaaagttttgaagaacttggaaagattcgattactttaaaatcgaacaaattctgagagaacaaatctccaatgttgacgccttagcaaagctggcctcgcagaatgacttggatgaattaaatccggttcctgtagaaatgctaagcgagccaagtatatgtgaaactgaagacgtcgagatgatagatagttctctagcatggatgacgcctattattaactatttactcaacgaacaacttccaaatgacaaaaatgaggcacgaaaacttttgtatacagtgcctcgctacacaatgatcgaaagcaaactatatagaagagggtattcaatgcccctacttcggtgtgttcctcctgcagaagcaaacaaaatcattagagaaattcataagccttctgtggggatcatgcatgttggcaaag

SEQ ID NO: 106069 - DNA, 529 bp, Cannabis sativa
atctgcattactagagaaggatctccatgcaagtgacaatgtccgttcataagcacgcaattcagcgtcaagcttgtctatgtcggacgagttccaattgtttatcacaaattggttaactcaggtgataagctattgagaataaaatgaactctttgctttctagataaaacgattcccagcatagctgatttctggaatttcatgttcatcatgagctactctgaccaagagtcatcttcacactttgaagttcattcctaaaagtatattctagatgaggattggagtgtgggttgtacattttgacactacaaatattaataaacagaaataaattattggttcaataaattcatacacaagttcaaaaaataacaagtaaagcaaatatgtttgtaaaaataccaaaacaaaacattttaattattttcaaaggtttaaaacaaatgaaatacagtgtcccggtaggcgagagtcaaagataacatcagttcaatagagtagtcagctcatctaaaatggacac

SEQ ID NO: 106070 - DNA, 848 bp, Cannabis sativa
agttgtcactaaaagtagcattttatttatactggtagtataagtttacttaccttgcacaatagttgagtactcaagctacgcagttaaatgaacatgttgcaacagtttccactcccgtgtcttctgagtggtagatgaaactaaatatatgtgttcttaaagttaactgtgatgctgcaatctttttcatcttattttatttttaggttatttctcaaacagtttaagaattaaggggcagattatttgactcaattttctaattctaatcttagtcatgtctccgacggggagatatcctgcttgcattgcaggctattatttttaactgattactattaataaaatgtattatttatttaaaaaaaaaaacaaattaaaatttccaagtgggaaataaaaaaatgacaggacaaagaaagcagtgtttgatttcagagatgactaaataattgatagaaatcagctgagttccctaaatttctatagttaattgtaagcagcgatagatgcatatataagataagttaaactaattatttgttgttctttatctttcgactacagatctttgggaaaatcgttattaatttgtattataataatggaaataatgcatccaaaacctagagattattatgcaacttcaattaccgttgtccaagggttggagatataattaataataatgcattagtcctttagtttattatattattttatttttgtatatttcaaccttaattattattatataattcatctttgatctgttgaggtatcaaatatgttataataaacaatttgttgattagaacaatacattattactaaaataaagtaaa

SEQ ID NO: 106071 - DNA, 949 bp, Cannabis sativa
ataggaatatttcatttaccttgcataacttataaaattaatgtttgaatagtgttttacttgctggtttgatataggaatatattgagctaagcggtagacttaaattattgagtgttgggaaattctcacaagcctagaggaatttttgttatctctgtgcagaatgctggagtaatgctgaaccaatgttttaacacctggaagaaaacctgactagaaggaattagctattcaagccatttttgccatattacatttttcatcttgcaaataatttttctagcagcagtagtattaattttagcaagtttaattcatgtcatttttaattttgaatcattacttaaccatttgcatgttatttcctcttgctttaagttgtaattagttggttttacatcaaactttgtttgcaatccctgtggagacaatcttacttatcactttcttacttgtttgactgtgtatacttgcgtatataattttcgcaacaagtttttgacgctgttgtcagggattgaaactaaaaattgtgtattatcaactattttacaatttattttctagtttgagattttaatcccattttgttgcgctgaatttttctttttcaggtgctatctagtgcatgaacgaggaagaagaggaccttgaacttgctcctattgaccccgaaattgaacgcactttcagacaaagaaggaaggaacaaaaggctaaaaaacgctgcaatatggccgatgggtttgaagttggggtgctcataatgatgtcaatcctattgctttggctgatgatagagcccgaacaataagagagtatgcagcccctatgttcaatgagcttaattcgggtattgtgagacccaaaatccaagcacctcactttgagctcaagcccatcatgtttccaatgatccaaacggttggtcaatttggtgggtcgc

SEQ ID NO: 106072 - DNA, 524 bp, Cannabis sativa
cagcattaacttgatgcctttgtctgtttttaaaagattgcagttgggagaagcaaagccaaccacggtaactctacaattggcagatcgattagtagctcatcctagggggtcattgaggatgtgttagtcaaggttgacaagttcatatttccagctaattttattgttctagatatggaagaagataacaacgtcccaatcattcttgggagagcattcttggcaactggccaagctttgatcgatgttcggaagggtgaattaaagctgcgagtacaaggagaagaagtggttttcaatgtgttaaaggcgatgacatacccaaaggcaagtgataactgtttatttgttgatctgattgataccattgtgaatgagaaaaagttgatagatgatcctctagtactgagcttaattgaagattaattgacggagcaagagagaaaagaggtaatggagtatgttaaatggcttgattcctatgggccattgaacataaagtattatgaagagctgggagt

SEQ ID NO: 106073 - DNA, 1087 bp, Cannabis sativa
  modified_base (293)..(296): a, c, t, g, unknown or other
actgtcaaatgagacagtatacccttggtcacaaatttgactaatgctaagtaaattagcccttagcccttcaactaacatcacatttttcaatttgggtgacccttccccacactgcataggccaaatgttaatcaaaaagtccttgtcacctgtcatatgtctagagcaaccactatcaaaatatcacatttgagatgcagcacttttctcagaaaaatcaactagacactttttcttcatccatttttgcttcaaacctttatgtttcttttgagatttttcgaaattannnnaataatttgttttaaacatatttttcaaagtgaaacatttaggtctgatatgtccttttctaccataaaaattacaagttggaacaaatctttttacctcagatgttactctttttgcaaatccaggagatcttgcgtcagcagaaacagcttcttcaacaacaagttttgaatctgttgtagcagacttcaaatttgcagcatcaggaagattcgttggaacactagattttacatatttcatgattccagaactttccataccatttgatctgatgccagctaaacctttttgacttgcattctgagcgttttcaaaaataaaagatccgggattaagcattttaacattttcttaaaattttcaagttccttctttaaaagagtgatttttcatctttaatacgaaaatccgtctcatattcttttatttttaactcaaaaattttaatttgatgaaataattttttattcattttaatcaacactattttcagaagtaacatgaatccacttttcatacatgactttgtatgattcagcaagagactcttcatagatttcagaataattagaatcagattcttcttgttcagtggtgttattcaaacatacaagtctggcttttacctgtgaatcacacaacacattagtcctaacagaagttaaggaaacattttcagaatttttttcatcactccacgtgacattgaaacttttcttattctttttcaaagtgtttgcacactcagattgaatatgcccaaatccttcacattccctgcactgaa

SEQ ID NO: 106074 - DNA, 742 bp, Cannabis sativa
  modified_base (127)..(127): a, c, t, g, unknown or other
  modified_base (212)..(213): a, c, t, g, unknown or other
tactgaccgacaaagattagatattcaactgtgatctgataggatattatttttgaatatctaattagatcagatcgaatgttagatggggtgttcaaaaattcaatacatccaacatccaatcganctaattagtattttcatttagtttggatgagtaattagattttataatattatacgtaaaacatatatgtatatataaaaattannattaaaattttactcttttttttagattgtatggatctagtccaatccaatacatactggacctaaaatatttgatggatccgatccgatctaaaaaattctaggtctaaaatattaaataaacccaaattaaaccaataaatatatatgaaatacatccaacggatagaactgatccaatccaacatctaatgaatgttgctgaaattaattaaataggatcggatggtaaaatttaacatccaatatataatttgatcaaatctggacatacctaaaaagatttgacgtggtctaatgagcacccctactaacaactatggggtgtatgatgtgaattacagagtgtttaaatgttatcaataggtacttaaagttctcttgtttaacacaattttttttttcaactaatcacaaaaagagttaataattcccaaaactacttttatttatttcttcttttaatgtttttaggaagagaaaataaggtttttggacaaaagggttaaaccttgttaaattttggtga

SEQ ID NO: 106075 - DNA, 1244 bp, Cannabis sativa
tgggaaaataatattttttagtaaataatgtttaatatggaaattacattcaattctcatgggagcaatgagaattagagagtaattagaagcactcaattacttccaattacacagttacagtgtaattaaatagtcagacaaacatgttaaattgtgtaattacctttaattacacacaaatctaattacattgtggctttccaaacgcaccctaaagagaaaactagaatggaaggcttagatgagaaaagaggtccaggagtcgttacggaaggccgagaagtacgaaattggacggttgaatgtgctgttctggatgtatcgaagccatctaagcttcctaaccactgtgatgatgttgaccaggtaccttacttgcatcaaccatttctctcagtctcactcgtcaacttccatattatttttcatattaagaacctatgtatccattgtacgtatggattaaaaaaaaaagagaaagtcaaacataattaatattctcttttattagggagatatatagtagtatacatagagaaacttggctattgcagtcaaatgacaaagtccagaatgtaatactgtaaggttgagctgctaatttgcttaaacttttttcctctatatccttatccaaaaataatataagtgatcagaatttaataatttgcacaaaccatatgaggtgcaaccttatattttaataattttccatattatttattaaattaaaaatatatgtgacccaatattcaaatgcaccaatgacaatttgtcatctcatatggtacgcttcacacgttaatgtatcctttttttttttctaagaaaagcgtttatatataaataatatcagtttgaccacatggtcattacaaaatagttgttcacggatagaggaaagtggaatacaaccaaatctctagtgagaaaacgctcatctaaccacattataggctgcaaaattataatttctactaatgttcgaagatacaacaaacaaaaaacggagaggatctaacacaaaatgagacatagttctcaagctcctaacgggactcctttccattaagagcgttgatcactaccctcgaatcactctcaatcacaataaactttgagcctcgatccttagccatctcctgggccaaacagcaagtcactgcttcctcacaaagtgcatcagaaaactccagtttagatgtaataacccagatcaccttgccaaaatgatcccttgc

SEQ ID NO: 106076 - DNA, 578 bp, Cannabis sativa
aaagctcctttcccattctgtaaaatcagttcagtaataataatacataagctctgattttcctctgtttttctctattctttctcatatggtatcagaagaactcacgccctcaacttccatgcctcggccaaccactcgatcccaagatggcactgcaccatcaacgatcgacaacaacatagcagaacttaattccgactccatgcatgctcccccttcctcagcaattcctcgtcgtaaccctcctgttcgagttcaatctcaatatgcagatcaaggtcttcatgacaattccaccattgctgaaggaactcaactcaaactctccaatcacgatcggttgctgatgatcattccagcccgttcttcctcagcaccggcgacaacccaggtttggttcttgtgaccacagtcctcaacggaaccaactaccaaccgtggaaacgaggtatcacaatggcattgacgaccaagaataagatcgcgttcatcaacggatctcttcctcgtcccgaacctggtaacacaaatctaaactcttggttaaggtgcaataatatggtaatgtcttggtt

SEQ ID NO: 106077 - DNA, 688 bp, Cannabis sativa
tgagcctgatccctggccggccccccatgccactggttgccaaaatgtggtagtttttgccatttgaaatttgaggaaaggtctgtcctccctctggcaaggtaagttctgtcctagttcctgaagaactgggttgataagcatatcgatagaccctccctgatatatcaataactcttccttgaaatggatatttgatgagatcctcacctcttctattggttctctaggtgaaccgccttattagatcaccgacctctctattacgacgatctaaatctgcctggtgataccaaaggatgcgctcttggtcatccatcaatcttaggaattcacgtctctactgagtgagtacatcgtaatcagcagcgcatggttcttcaagggatttgcgtctctactgagcgaatatatcgtagtcagcagtgcatggttcctcaagggactcacgtctctactaagcaaatatatcgcagtcatcagtgagtggttctttaattaggcctgcatggcctactacttccacgagtctggccaactcaaggtcttgtcccaagccttggtgaggctcgccaattcatggtctcgtctctcctgcataatactgggggtgaaactcgattgttgttcttggggggtgcccccaaggactcttccttcagtcggaggcgccaatggtgggcctact

SEQ ID NO: 106078 - DNA, 1111 bp, Cannabis sativa
gccaaaagggatgtataataaaatttaaaataaatgattataaatgaaaatattgtggagaattttgttagatcttgttagaatgtggaagtgtatggttaaggcagtaaaataagtgagtgtatagtaaggtgcatgaggtttcatctcaaaattaactggcaataagaagaatagtctatacattttatatatggtattaaataatgacatagaaaccaaaattaaggccaaaatggatgtataataaaataaaaaaaaaatgattataagtgaaaaaactgtggagtattttattagatctagtagtgggagtgatcattataaatacatatttttttgaaagagcattataaatacatattaaatcagtaactaatagcattgtctctgaatgcacgaatggaagaggtaaatattatgctaaatttaatacaaaaaataagtaaatattatatttactataatatttttaattgtactctaatacacaataacaatttatgttataaattagagatattggcacttaaattacatgaattatacgtgttgtaatacttaactcacaaattgacttttttatggtaaaactctccaaacccaacttatgttttgctatttacaattctgttaaaatattattgttaaatgccaatataaaatgtctatgtatacacaaacgtatacgtgtcatatttttattggtccctataaaataattattccaaaattagaaaattaaaaatcttttcttttctcttttccttcttttttttcctctttattcttttcttcttcttcttccccatggccacaaccgccacatcaccaccattatcactaccctcgttacaccaccattcccctttctattgtcgctcataactcatcaatagaaaattacaatttcggcaaaaaaaaaattaaaaaaattaaagcttcaaatatcaaataccaaatcccgattccctaactcttatcatcttccactattgttgaagaaaaaaaaaacaagctcttctcatctttattttcttcttctccttcttcttcaccgaattcttcaatttctgcttcaataatcagaagaagcaattcgaatcgtatt

SEQ ID NO: 106079 - DNA, 679 bp, Cannabis sativa
tggatactaaaacagatagagatgtatccgtgtatcattttaagggggtgaattatagaatttccctaaaattatgtattccttttacattattagaaaatttatatcaatattttagaaaattaatatttattttaaattagtgattaagttattatttagcataaataattttatgttattcaagtattattattttaatattttaattattaattgaataaaaatatgataaattattttattatatatttatgatatatatttaattatatatgatatattattttattttactttataatttaattatttttattagccatttttatttttttgttgggaattatttatttttatttatttatttattattatatatttattttaatttaagttttttaaagaaaaataaataataaaacagtctagtatattcttaaaccaaatacagaattactttcagcataatacaatcttgtccagtccaatctaatccaattcaatcatttccagtccaatcttgagttactaacagccccccttaaacgataaaaataagagaaaatttgcgaccaaatctccctatgtttcaattgttatacacttaatcttgcgaatccaatacttctatcaaatttggatgttaaatgcgagcatgaatttgttaaataattat

SEQ ID NO: 106080 - DNA, 593 bp, Cannabis sativa
aatattgttattaaactaaaacattgagccactaaaaaagaacaaacctatattaatagatgagaaacttaaattcttttacaaaagaagagcaggaagctatatataatatatttacgagaataaattttttatgcatgatcgtctacaaaatgagaagttgtgcaaagttttcaatgtgtggttgcttttatattgactcatatattatttgcaagttaagacaccaaaaaagaaaaaaaagaaaacttagaaaaaaaaaaaaaaagaaattaatgcattgacacatgaacataggtggaggctctactatggttacacgtgacacttacccacaatattttttaacctgacattttttgtgtatgtaaataacaacaaataaagtagtacacgtggccttttaacattaactttttgttggaatgatgattcaaatttactaacaagtatatttttaacattctaaatatgaatatctaaaacgaggaaaataaagacataaaaggtatgagaaaccttatattggttgcagcggaattaaatgatcgttccgctcagttaacccttatatcctttctgtcgtagagtat

SEQ ID NO: 106081 - DNA, 560 bp, Cannabis sativa
  modified_base (520)..(534): a, c, t, g, unknown or other
tggcaatgtacttaagtgaataaaccctaaaccttatatttattcaggtcctctaaatttttttcaaaagttaagatgcgcataaatatgagaaaataaccgacagactcagtaagaaaagcttataacataacatatacccaaccagtgatcaggtggccatacacccatcatcaagtcataatctaatcaaacgcatataagtcttgaacgttcttcacagtatgattcaccataatattagcccaacactctagttatatctcagtgatagcatcaatccataccataagtacaattgaccataatatcaacccgacactatagttgtgccgctatgataacatcaactcgtactacccgaaggtataaccaattataataccaacctatactcaacactctagtcatattgatgtggtagcactagttcatacttcttgaattaccaaacacatataatcacgatgtgtaaatgcatgcttttgtacatcaactatctgttggaattattttaccnnnnnnnnnnnnnnntaacaagtatgtttcattaatatcct

SEQ ID NO: 106082 - DNA, 1710 bp, Cannabis sativa
  modified_base (669)..(671): a, c, t, g, unknown or other
attaaataaaaataaataataattaacttataacctaaaagtcacttaataatttagtttcttataaaactttaatgaagattacttatattttaaaattaaattaattataattattaattaatttttcgtaatttattagtaaataaggatcttttagaaattttttttgcccttaaattattaaaatttttatagcaaaactctttataatttaaaattatacagatataattttataattaaaattttattatacttataactttaatttaaaattattacacttaattatttaggttttttcatttaaatatttaaaaagtaaaaaatgaaataggttgaatgtattttctaaaaaaaatgactaaactcctccatctttttttataaggaattatttactcaaaaaactaaactagagtcaaaatgcaatgtcaagcacctccagaaaacgaagaaacctcaaaatatacatgcatgacatataaaatatactataaatgcatgtctcatattatttttttgaaaataaatatagaacttttattaatttaccaaatcaaccaaaagataaggttgtacctcaacaggaacatcactcctattgaacactcgatttgggaaagaataagatcctctagcaagactatgagcaaccatgttagnnnatcgtttaataaaaaataaaaaaatattgtttaaaattgtaagaagtttacgacaatcttctataataaccccaaaagaagaaagcgtaggtaatgaatttcgaatagcttggactgctaccaagcaatctgactccaactccactttctgccatggttgagttttaatagagcttagcgcttcttttataccaattgttgtctatactagcaaaactgcccgacttagccatcactaattccccttaagagtctcgagtgactatgccataaccaaacgcagctcgatcacgaaaaatggtagcatcaacagttaccttgattgtatactcctgcggctcaacttgaaattcaactccatcaccagctttaaaaactgaaaatgaagcctatgtacctctattttgggttgatttttattgtacaagacaactcgtagatgagataagaatatcatccgccgtagcatacttttggttccaaaccaactcgttttgagcctcccccaacacaacataacagtttccccacacttttccttattgcatctttgcaaaatttgataaaactaactgtaaaaatcagcagcaacaatcagcctaaccccaaccaaaagcctccaccagcattgagaagtgaatgaacaggaaataagcgcatggaaaatagtttcctcatctctttgacaaatcagacacatgatttgaactaggatcctcttaccacttaattgagttaaggtgggcaaacaatttgaagcagcttgctataccaagttgagagctttcagtggtagaattccagagcttgcgccataacacaaaagaattagtagcaattttctttctgaggcttgtatcaacttgtatgcactacgcaccgagtagcaaccatgaatttttattatttaacataaataattttatattatttaagtatttttatttagtatttcaattatttattaaataaaaatataataaattattttattacgaatttagttatatttaatatatatttaattatatatgatata

SEQ ID NO: 106083 - DNA, 563 bp, Cannabis sativa
  modified_base (27)..(27): a, c, t, g, unknown or other
cggtctcggcattcctgctgaaccgcncatggaagcatcatccgaattttttatggggaggtcaaggagcaagttcaagtggagcacaagcacaaggaaaacgatttccactgggattttctcaaccacccagacctcaaaaaccacactaacctcaaagctctcaaacaagttccttggagagcttaatgagagactatatggctaagaatgatgttgtgattcagagccaagtaacctctcttcggaatcttgaaattcaattggggaaattggctaatgatttgaagaatagaccacaaggcactttgcctagtgacaccgaaaacccaagaagagatggcaaagagcattgcaaagcggtaaccttgagaagtggaaaatttttggagtcaaatgtggcagtaacaaagggcagcaaggatccctcttcaatccaaaaagagagggaacgaaaaaaaccagcaattttagttgctgaaattcccccagtagttacaacatccgatcagcattctgctgcagaaaagcctttgcaaaagccacctccaccatttcctcaa

SEQ ID NO: 106084 - DNA, 715 bp, Cannabis sativa
  modified_base (216)..(220): a, c, t, g, unknown or other
  modified_base (289)..(300): a, c, t, g, unknown or other
  modified_base (396)..(403): a, c, t, g, unknown or other
ccctagaaggacttaggaaactgctagtaactaaacataaaccttatactatcatcaatatgcaaattaaatttctagggaggtaagtttgaatacaatgcaaaaaacacttaatgatctttgaactgcatatccaaatatttctccacccctatcacttcgcaagatctttaaccacttaccttaatgtgtttcaacattgctagaaattcatgnnnnntttcaaacatttcaaatttatttgcacaaggtaaaaacctagagtgatcgtcttaagaatataacgaannnnnnnnnnnncccctgaatgtacatctatattcgaatatagatgaaattactttgaaatggatataggcatatttaactctttgcaaagaatgatcttgtcaaaannnnnnnnaacaagatgcaaatgccatagatactaaatgtggttgtaatcttttgatgacttagctctagttacaattaagagttcttagaatagtccaagtggatcctaatcacaggatcctgccaacctccaagaagccttgccttccctagatgctgacctatggcaagaggtcgttgatgatgaaatggactcacttattaagaacaaaacctgacattatacaaacttactacctggctgcaaaactataggttgtaagtggattttgaaaaagaaattgaaacccgatggaactgttgacaaatacaaagcttg

SEQ ID NO: 106085 - DNA, 1304 bp, Cannabis sativa
ttttttaaaatctaattatttgaatagtagaaactaacaataataattataaaaaaaaagtgaagaacgggttaacctgaccaaactgacaaatttattgggcgggttgaacttttcttaatttttaattaggcgtgttacaattgaatatttacaacccgatatttatattgggttgataaaaatatgctataacccgactaaaccgaccgacgtacacctttgtgacgtgtcacttattcaatcaagataaggacaattcaacaatacaagcattcaaacttaagtatgtgaagaaatcacataagcccgcacaagtaaagtgacttaaaacgcatgttttttttcacttgagaatttcatcaaacacttgggggaccaaaattccactatccaaatttatgcctaaagtttgtaactcttgcccaaatttaaaaattttactttcaattattcaaatttcaatcccaatatcaaaaacaattcaaaatgatttcaaaatctatccgaatttctttcacacatcacataaccaaacacattcaagaaaaaaatattcaaacccaatttctatatctaaaaaaattctatccatgcaatttgtacaaaaactaattacaaattaccaagaaagtaaaaaagagttagaaattaattcaagaatatttccaactcctaaaaaccttgaagaatgcttgaaaattctctttctcctcaccaacaaagggccacggctaaatgaggagatttttagggttttgtgattttcaagtgtacttggaggataagatagaatgagaaaaaaaaaattaccttgattgtgtctgtagagatttgttgccgagatgaaaaaattggtgctttttgagagtttggttggaaagagaatggtgctagaattgctgtttgaagagggaatgaaactttatataaactgtaaaaggggccttgtggccgtgacttacaaattgaccaagggtttcaaaaaatacttttagcacaattagcacatgcttttcacttaaaatgaaaaaggcacttctctccatttgcaacttgtcaattgtatggataaaaagatgtaatttacacatttaattatgtgagagaatgaaaattggtcatccttagaaaaattaaatttcttttcacatagttaaatttaaatttcacaaattctgagagaagtcactagaagacgtaattgactcgtggcgacaaaagtctcaatgggtgctccaagagatgatgaaataagcaaaaggcgaaaagcttattattttcaagacaaaaagggtacaata

SEQ ID NO: 106086 - DNA, 1137 bp, Cannabis sativa
tccactctcaaatgaagaattaatctctaatgcttcaacttcccatcctaatccaactccacttgtgactcttcctgaaaagaaacacaaagttacaactcacgatgaaaagaataaatatgaagctactaacgaagataaaaacaaccacaaggcttctaatgaagatcagatgcagtagaaagcttgggtgtgcatctcttctaaataggcttgctcttttgttgctcttttgaaaattattttgaaagttccatgatggaatacatatgtaaataggccacttgttggaacactatatcataggcttccagttttgaaagctccatcactactagatgcagggaaaaagccacaaccaagagaagggtgataaatatatataaatatttataaaataaagtatatacataaataaaaaaaattaatgataaataaacatatacaatatatatagaagttgataactttcatcactaaagtagaagttgagatttcagatctccttctcctctagttaagtgttaaattatgttgaaattattttattcatataaattttttataaataaaaaatttaccacatttaaaatttaatgtgtgccttaagtagaattgtagtaatatttctattttgataatatagagaagaaatttgaataatagaatactttttattttattttagcattttattatagataattttcgacaaaagaaaaaaattattttaaattttagcattgaatataaatatgtactacaaaaattttatttgatactaaattaaaatttggcctctttagcattcaagtcctggctccgcccctgactagatggaatgaatatgtaaataaataggccacaccttgggaacacttaaacaatcttttgagttccattacaacttgaaatgaacgtaaaccacaacattaaaagctactattatattgcaacattaaaaagttttatcaccgtaaattactatgaagtaaattattatattaatgtcaatattttacgtcttatatgctatccacgtggtaaagcctcactagtatagtatataaaacagcattgctattaggcaccagtggtgcctagcacctccttgacatgtcacgttgcaattggcta

SEQ ID NO: 106087 - DNA, 2512 bp, Cannabis sativa
  modified_base (2452)..(2465): a, c, t, g, unknown or other
agtcaaatcaaattggtgacattgttttacttcgaaagccaaaccaacagggccaatagttgacttacttccaacggtttttccctccaacaaagacattttcacctgactcctgaagctcgttccctacttttacctcctaaagtcatgttgattataaatgccaagagaatatatccagaaatgagtcaaaattgatgtaaaaacaacagatgttatatcgaattctaaaagagttagccgtccaatgcagtgaacctcatccttgtacaaaatcaaaattcataacagacacaggatgctatcgttcattgtagctcactgttgtaggatagtatctaaaagaaagaacaaacttttctggaagattgagaaacaaaccagggcctcgttgtcgaatacaaatctgactctcgtcgtctgcaagaagaatggaatacaagacttatttttgggaaaatgaatgaatatgttagaatattagctctatattagttataaaaattagagtaaattgtattttctaatttcttatttgtattagttataaaaattaaggtaaattgtatttgtatataaatatatagtattctatagaatacaatatagaattaattcaccattttttatatggtatcaaagcctacttaagattgtgctcatttaaaaaattaaaaagaaataaggtttgtttagggttcttttttcggaaatcctatttggagtgcatcttagttcttaccacccacacagggaggaagcccaagaagaccagcgagtgggccccacgtgccgcctcttttggctgccattatcctacgcaccggcgcgtggcactgttctaggtcgtcatttttcttcatgttgttctcctcgacctccctggtggttccgttgtccatttcagttagtatgtgttatatgcttcgttgatttgtacatgtgaaggtatgggttctcttattttggttgtgagatttttcgattgctagctcaatatctcattttgttcccagcttgtctcaatttgtttgctcctttatcggattgttggttggtttgttgtttgagttagtttggtgggacgaatatatttgtaatggcttttggtagaccagttcttgtttctgcggatgaatatgtcaaattcttacagtatcaagagtctcttaagtattcatcttcttttatcactactattgttgattcaggtaaaccaaatttgtttcttccaaatgggttattgattctggtgctacaaactatatgacacgtaattctagcttcttttctaatcttcaacctcacgtttccacttctactagtagatgggtcaccatcttgtgttcttggatctagtacaattattcctactctaatgcttcctttgtcatccatcttacatttacctaatatttctattaatttgatctatgtcagtcaacttactcgcgatcttaattgttatattttttttttcttctaatcattgcttatttcaggattttatggcgaagcaaattattggtaaaagacacgaatctggaagtctctacattcttgatacaccaatatctaaatcagttaccttttgtggtgtacaatcccccttcgaggcacattgtaggttgggccacccatctcttcctctgcttaaaaagctttatccacaatatagcaagttgtattcgttagattgtgaatcatgtcagtttgttaaatatcatttccttagttcaagtcctagagtcaataaacgtgctagtgttccttttgaattagtcaaaaaaatctagttttcgctattttgttacttttatggatgattattctcgtgtcacttggttgtttttgatgaataatcgttttgaattgttctctatattttgtgctttttatgctgaaattcaaaatcaatttaatgtgtccattcgtactttgagaaatgataatgcaaaagagtacgaatctggtgtatgtcaatcttatatgactcaaaacggcatgcttcatgaaacttcttgtgttgatactccatctcaaaatggtgtagcagaacacaaaaatagacatctcctcaaaacagccaaagctcccttatttcatacgaatgtttctaaaccattttgggccgatgtaatttctactgcatgttttttaattaaccgcttgctattttctgtttttaatggtgaaatcccttacaaaattatttttctcaataagccaatatttcctattgagctgagaatttttggtagcacttgctttgttcgtgatgtccacaggtaactaaattagatcccaattcatcgaagtgtgtagttcttggttattcttgttttcagaaagaatataggtattattgtctcgatattaacaaatatcttgtttcttttgtttcttataatcttctctcctctccttgctcttttattgcttctcttgattnnnnnnnnnnnnnnaaaactgttcgtgaagcaatgtctcatcctggttggcttgctgcaat

SEQ ID NO: 106088 - DNA, 612 bp, Cannabis sativa
tttgacaagtaatttggttagcattaccaatctcactatggttaacaaacaaaacatgttgctggggacaaaagtactgttgagtaatctccattttgtatctgttttaatttagtaaagacgataaataattgcaatatgtttgatgtgagaatacactaaaatcaaaacaatttaaccaaataattgatcgactcaccaataaatcagataattcccacgcaaccaagtaaaataatacaaattaatagtactatataacgtactatatggttttcttatgccttatgaagctatggtatatatgtagttttgaagcaaaagacaaaaagaaaaagtgaataaattctctgcttattcataatcattaaagtttcaaacttgtctgagtatattttcataatcattaaagtttcttgcataactgaagcataaaattggaaaaggaaattcgagtcaaaatcatgaattctttttttttttctttttcttttcatgaaacatttggttataaatacgtatagatactttaatttattatgaaagcaagacatgtatttgatcaatattggaatctatagttttctgttacaataagtggttttgtatagt

SEQ ID NO: 106089 - DNA, 666 bp, Cannabis sativa
aaaaatgcatagaagagtggcaaacttaaaaatgccatatttttctaactttgttatgaaatctcatatttcatgtaattttcacatttataaatatattttcagaaagtgtggacaacatttataccttttatctgattttaattaccaaaataccacttacactatcacttacagaatcagacgatggttgctgcgtggttgcatcagacgaaagtttcaatcagacgatggttgcagagtggttgctgggtggttggtcgaaggttgcattagacgaaggtttcaatcagatgaagtttctaggtggttgttgggtggttggccgaaggttgcatcaaacgaaggtttcaatcagacaaaataactgttagcaaaatgtttatgcaactgttgtgaaacattaaaaatcagaatagtgtttttatgtacgtaacactatctacatgtctctttatgatttaatatgaacaaatttactattagaaattcgaaaaataacgaaaatacaccaggataaacattttactatagtattgatgtaatttttttttattatacttgagttgattgtttgggaactatagttcaactttttgagatttgtctttcatggatctgaaaaattgaagtcaggacataagttttatgcaaattaaactggat

SEQ ID NO: 106090 - DNA, 635 bp, Cannabis sativa
gatcgatattcaaaacatgtgaaatgatagaagggtcgattcgaccatatccgcatgtgaccaggaaaaaacatctagattttatcaattctgaagttaattcgagcaacaaaccttttccgatcttaagctttctggtcgggatatctggatcgattttgatctcttctaattcttctacaggtccaacattgctgcttgggtccccaagtcgaggatcgacatcttcatccccgccttgggaagttccctacttgggaatgtttttttcccttgtttgtgctctggctggaggatacttccttcttcaccttggccactacaaggttataacattcctgtgcagactgctagtttcctctcagacaccctaccccatactttgttgcgaacttcaggcacgagtgaaatattgatgtgacatcctttaagtcatacaagggcggccggccaagcattacgttaaaagctgaaggaacatccaatattaggaactgtgccatgatagtcatgctcgtcggagattgttcaacagtgaggggtagactaatttttcctagaggtgcaactccttgaccagagaaaccatagacaggctggaggcatggggctagatccttgagttggagtcccat

SEQ ID NO: 106091 - DNA, 582 bp, Cannabis sativa
  modified_base (132)..(135): a, c, t, g, unknown or other
ccatccctatttctaaatcttaatcaatcaatttgagctaaattattttttggagtgagtttttttttatttttacattttaaactagtttttatttgcatttttatgaaattctacatagaaactcctatnnnnactagcgctgcaatctaaattgcaacaaaaaatcgtataatagaaacccctattgcaactagcactgcaaccactttagaaaccaaaaccgtaaatttgaaaaaaaaaaagttaaaaaaaatagtatatggagtacttccccaattattttagaccacactaaataaattcagtgtgaatgatttagtctagccagactatttaaaactcttcgattcgatcacgtacgattttagaaatttcagtagcgattcaatcaaattaatctgtataattattttatatatacttaatgggagctaatacattatgtattatattttttacctattatatgaacaaaatgttgacatttgagaacaacttgatagaattttgatattgacctaatattgttatgatgataattttttatttttattcatgtattataaacttattaaaagt

SEQ ID NO: 106092 - DNA, 674 bp, Cannabis sativa
aggtctcctaccccattttggaccgagataagaaaaatgtatggagcaaaatttgcatttgaagagcggaacatgcgaaccaggttgtacatcaaactgggcagcgtgggtgttggggccatgtttggccctcaaatgatcttatttgcttcccgagaacacttgtatcttcgttatttatgaaaacataaaaatgttcaggacacttctcgaaaaagtacttaaaacagacctaggttgacaaaacgtcaacctgggcggaccaggcaccaggtcaacatgggcgctgagtcctagttttgaccaccagatgactcagtttgacccccgaaaatgctcacatcaattgttggtgaaaacagagaatatgctcggaagactttgtcagagttgtcattggaaatggcctaggttgataatatgtcaacctgggcactcagacctagcaccaagtcaacttgggcaatggatcccagttttggcctctaggtcgatccgtttctttcccgaaagcacttggttcctgattttggataaaaatgaagaaaatacttgggaatagggctgagcaaaaaatctagaaaaccgttcaaactgttcaaaccgacctaccgaacaccgttaaaaccgaaaccgtttaaaccaaaaaccgaaaaaaccgttaacggttaaaa

SEQ ID NO: 106093 - DNA, 1837 bp, Cannabis sativa
acacacaaatccacattctcaagttgaaatgttccttcactttctcagcatggtatgcaagtttcgccaatgttgtcttccctataccccccattccaacaatatgaagggtattattggtcatattttttttatcatctctgctaccaatgccaccttcatgatcaccaaccaacttatctactaaaacttgctcttcccgatctctaccatacacttcagacacatcaatgaatgaagttgtcatcaatcgcggttcccctacttgttggctacatgaagcagttgagttgctcatgttgaaagaaaacttatccttctcagtgcaaatagcatcaactctaccattcaattctttaaccttttcagagaacttgatatgtaattttactttgcttgttacatttctgggaggtgtgtcacattgaaagcacatgtaagataataacttaggaaccttattagtttgattgttgttattatctcttatctccatcatctcaattcttgtgttccagtcatctatcacatcatctatgtcatatgacacatctttcaacttctctaaccaatctttcacattagtattagattgctttccctcagcatcacccaacaccaccataattcttttcagattttcttttaaatgctcaactgcattatggatttctgacatttctttaatatatttaaatccatcgattaatctactacttagtgctccaaccaatctgtctacaacagcactgattatgatctcgagcatgatatagttcagttttgtccttcttacctataaatcaaataaaacatatattatgactcaattggtagagctcaccaaaaaatagtaaatcttttaagattattatgtgaaacactttaatttcttttatggattaaaatagatattcaattttatgttcttctattattcaattacatttaattttatttaattgtgcaattattgattgattatctttaattgttatctatgaattcgaatcaaaattctaaaaagtaagatttgaatatattttgattgttttgaatgcaaattgatttagaatgaaagtatctagattatttgagttgctttgtttaatgttttctctgtgattaaactttaccgtaaatatatagagaatttttacatagattgggtttgtaagtcttaaccagattattaactacttaattcaacttgtcaattaaataagaagaagagaaattgggtaatcgctttaagaagtaaagaaatgatagttgagaatcataataattcttattttttttttctcattgttatttctctaaattttttattgtctttctgttattatttttcttgcttaaaaatcctaaatatttatttaatcaaatagaaaaacatagattaattatttgctaattgataatcagtccttgtgggacgatatttgatcttttaagattattacaaattgcgactgtgtgtacttgcatatcataaattgtgcaacaagttttgggcgtctgttgccaggaactgagttttattaatatcaaaataattaatttttattctaatttagttgttctctcttaacattatctaattgttgtgtttgagaatcttaattttaggtaccaactggtatatgcgatgtaataccttaagattaagaaaatgaattagcgaatcctaactagttaaatgtgtatttatgtggaattatattatgatataatttaatatatgtgaattatattgattaacgacatgttaagaccctgttggtgaatcagggacatttttgtaatttttacctgagaagggtaaaactgtaat

SEQ ID NO: 106094 - DNA, 674 bp, Cannabis sativa
tgcaagaatttatatgcacttctaaccgaataattcccacaagtctcaagtcgccaactccaaccatcattagcagccgaatcactaagcggaatggataaaataaggtcctgatcgcggccaacaaaaaggtccctcacaacatcctcatcccacacgcgagtaccgatttggaagagacacctgaccgacttattcacaagaggagggtgccgtgagacaacatagttgttcaaattatgtggaagccaaggatcattaagaatggatacattttccccattagcaattgttctttgagcacaggcgtggataagatcttttgcttcaaggatactacgccaaatgaaactagcaaaatatcctgtcagaaggaaataattcctaaaagaattaaacatcagaggacatctggcaagaaaccgatggatcaaatagaagcaagacatggaaaggaaacacactctacccctgctataacaagacacgtggcagacataattaagaaaaaaataaaggacacgcgtcaggcaaataccaaaaagaagtacatgtcacacatgcaaacaaaagaacatagaacataaataagagattttttacataaaatggggtgaattaacaactgaaaaaaaaaaaaaaaaaaaaaaaaaaaaaatcccacacaaaaaaaa

SEQ ID NO: 106095 - DNA, 623 bp, Cannabis sativa
tcagcaaaggcattactcccatatgtattaactgcattatctcatacttttaccaataacaatatgatttcaactctttcttataatatttctattctctttctttgaaaattcatgtagattcttgttcgccattttaacaaacgttgatcaatcttgatgagttttgtaaatgtgccgattaccacagcattgtgactcattttctccaatctgaatcgcaaactctttttgcctcatcaaatggcgcaaagactggtgccaatgctggagccttttacctttttatcatcaaagttagattttctgcccatatctttccaaatatacatttatgtatcgatatgttttatcgtcttgtcattacttctatacaagaacgatttcttagactaaaaatattagtagaactttatattttcgtgctcatgagtgtttatgataatctctttttctttggaaagaaaaaaaaattcctctttgtttgtggataaaacctgtggtttccattgtgtgttggttttccccttttatcatattataattagtcattagagtaggtttgaaaaaatttgggtccctgctatgttgattaaggaaaaattaaagtggatcattatgat

SEQ ID NO: 106096 - DNA, 1596 bp, Cannabis sativa
cttttcagattttgaattgagattgtagaacatgcacaaggtgatcaagcttacacatggaattaaatacaaataaagataatttcacaatcaagaatggaggaatgacaattatacattaactaggcaaaaaacattaaacaacaatcatcatcctccctgtatgggaaatttagttcataattaaatccataaccattcctataacaatattcagcataaataaattaaaaaggataaagaaagaaactgttagtggaatgactctggatcttcactttgatttcctctgctcttcctgccgctttttgctgtgttttagggtttccaaatcatctcctctgatttccaatcagagttttctatttatatattttaggttcgtcggacgaaaataccccttaccgtacggacgctcgccgtggccacaggatatctcgccgcggccagaagtgcatcaaaaacccacgtttctgttttcgagttatgaccgcggccatggtgatctcgccgcggccactggacccaatttttctgctttgatctctttcagtaaaatgggcataattttctcatacgaactccaaatgggatgattcaagatgcgttggaaagataaaaaagagatctaaaacttttatgctttgaattcttccaaaatattaccagagtatagttgaatttaggctttaagtttcaactttattttctttcaaaatttactctattttatagatcactgttttccgaaatttgtccaatttatgcattccaagtgtcgaaacctgaaattaaagaaaacaagcgtaattctattccaaaaataataaaaaaaaagaaaaataactataaaatgtgacccaaaacttaagctaaaaatagcctaacaataatcattcctccaaaattgtagaaaggacattctattataataatattctaatagttaaaaatacaactagacaaaggaataaaatgaatttttttttcattctatttacgctaccttagtgttattagtttacaatattgattgaaatttttttttggaagttaaaaatgtgaaaaaagtagcattttagaagctagtagttaagttacggcttgactatattgggtttggtcacagcttgccttggaggctgaaactttctttggtttggtaacgaagcaaaagtaaaaatttttaatgaagcaatatatattgcaaaaatcatcaatgtatatatatatatggactgacagtgtaacaaacatgtacatgttatacataattatataacgtatataaatatatatatttagatatatatgtggtatatatagacatgcatgtactatatatattcttcgttaatatttaataaaataatttattaaacatgtacgtgattacatatataagagatagtcaccacacgtttaaagcaaaccattttaaaaatattatacctttagcccagcaattttctattagttaagataattaagtttatttaattatatttttactctcaataattatatgcatatatatatactagcaaaaagaagtacgtgcgaggcacgtatattaaattttatgttagttttttt

SEQ ID NO: 106097 - DNA, 925 bp, Cannabis sativa
  modified_base (709)..(711): a, c, t, g, unknown or other
agtgggagctatgagtaggtatcagattgatctagaaaaataacattggaagataatcatgtaaatttaagataaaaaatgaggaactatatgttagtcgataagggtagtattttaatactcttagactacaccaaatcaggtttctagacttgcgttgaaactagaaagtctactgataagatggtgattactctaggggtggagcggtgattttggagaagtgtaaaaaccaatctgaagtctctaactctactagttagactgaatgttaaagttacaggaaagatacttattcaacctatgaaaagttctatataattttttgcattgtaccaataatgaattaactactagtgttacttcctgaataagacagatgtagttgccaaaaagtaaagaatctagtatccctaagtagacatataaagagaaatttcacaatatcaaggattttgttgctaaggatatgtaatggtggagaaaggttatattgaatacaacttgtcagatcctattacagagagaatactacatactatacttgatctggatatcaaggtgtttagattatttgaaatgcactttttgttttctattagtgcaaatgggagtttattgggttttgtgtcctaaataaaactcatttcaatataaccagatttactaattaataaaagatcggaaatcattttatgttgcatggttnnnatgatttatttcatgattatatacttagtgtataaattttattaagtccaatacatatatttattcatgattatagtatcgttagcatagtggaatataataatgattgtatgttaaaaattttaagtcccatgatttgtcagtacaatagatttagattgacatgataatcagcaataaggtattggataagtgtcatgtcctttctaggaca

SEQ ID NO: 106098 - DNA, 718 bp, Cannabis sativa
gtggttcgtgaatttctagatgtttttcctgataaactttcgggtttaccacctcagagaaaaattgattttgttattgatttggcacctggagcaaaacctaagacacttttacaaaatggctctagaagaacttaaagaattgaaaatttaactccatgggttgcttgacatagggttttcgcggcctagtgtgtcaccctggggagctctggtactgtttgttaagaagaaagatgcgtctttgcgaatgtgcatttactatcaggaattgaataagttaaaaatctagaataaatatcctttacctaggattgacgatctttttgatcaacttcaaaggaagacggtcttttcgaagattgatctccgatcgagctatcattagttaagaatccgagaggaggacatcccaaagacgactttccgcactaggtattgacattacgaatttgtagttatgtcttatggactgaccaatgctccctcagctttcatggatgtgatgaataggatattcaaggatttcctcgatatttttgttattgtatttatcgacgacatccttatgtactcttaatcagaagaggagcatgagcaccttcttcagatggtttcaacaatgacatcgagagcataagttatatgccaaattcaagaagtgtgaattttggctatcttaggtgtccttccttgggcacattgttagcaaagatgg

SEQ ID NO: 106099 - DNA, 523 bp, Cannabis sativa
  modified_base (41)..(52): a, c, t, g, unknown or other
attttatttagaaatttcaaactaattacaaacacatacannnnnnnnnnnnaaaatttatcaaaagtaaatacaaaacacatacttgaaaataagaaatgggcggtttgggctgactatgatgcgacggtgacggtgcgaggacgttgacggcgacggtgcaaccgagagccaaaactgcaatcttcatccaaatatacaaaacaatatggaacaaaaaaaaaaattagtttgtgaaaatgtgaaaagtggaaatgtgaagggaaaatgtgaaggggttacttgaagcaaagagaacccgttggtggagcagcgccggtggttgggtggttgaatgggagaaaatagggaaagggttggggaaatggggaaatatggctgcaaaccgagagaggaatagagggagatgaaaattttgagaagtggggaaatggaaagactgggttgggtttcttttttatagaaaaattattaccggcggggcccgccgggattaattaacccgccgggattggtataatta

SEQ ID NO: 106100 - DNA, 563 bp, Cannabis sativa
  modified_base (537)..(538): a, c, t, g, unknown or other
tttcacttctatgtcaatataaaacctatagattctgtatctatgattagcactcccactcaattatactaccatgttctcaagatgtaagtattgggccaatccaattcgtcaactttaacgaacaggtcaaagaacataaatagcacagttaagctagaacctaacactactacaatgtacgcctttagcttcccttttttcaacctattttataaaaagggaagctaaagggtgtgaaaatatctgcattgacatttagaggcagttttttaataaaaaccgtaggtatagaatatatatatatctatgtcgtcggttgggggttggggaaaatcagggtttttttaataaccctatggcgtcggttattgtgtattaactgacgccataggtgctgcctttattcgacacgttgcaccgatggcgtcagttaatacaaaataaccgatgctatagggttatatatcagacccttgggtatcgtcttcctcatttcacaccttgctgaacacgaagaacagccacccacagcanncccaaacccacgaaaaaaccctcgc

SEQ ID NO: 106101 - DNA, 789 bp, Cannabis sativa
ccgtaaccgaatttttggttccacgtcatcaccgaatttggcggtcggtttcggtttcggcttttttaacatggcggtcggtttcggtttttgaaagaaaaaaatagtttaactaaaaaaattgtcaaaaccgccaaaaactgcctaaaactgccaaaccgaaaaccgccaaaaactgtacggtcggttttatacagttataatttctaaacggtcggttacggttttcgtaaaataaaaaccgtaaccggccggtcggttataaaattttaaaaaccgaccataaccgaccgatttttacccctaaaatagggcatgcattacctacgtaataggcagcgttgatgttaggtgagttagccttcatccttccttgattgatgtgattcttcatgatggagccgccactagccccttagattatcgtgcaatcgccctaaattaggtttacgatgtttgacacatcctcttatgggtgttcccagacgttttctccatgttgcattaaatgctaagcgattgttcaagtcaagcctttctggcccggaggcgccttcttatgtcttgactcccggaggggaaggtagatcttatgctcatgttcgggagctaacaacatgaaccatacttgctgctattttactctgacttcccactcatctccaggtgacgtgtctattttgtccacatgtcacacacagcgacaaccacgtatattaggaaataaccgggtccataaatgacatagcgaacaaaaataaataacatagtaataaaatatatagaaat

SEQ ID NO: 106102 - DNA, 1773 bp, Cannabis sativa
  modified_base (32)..(52): a, c, t, g, unknown or other
  modified_base (416)..(417): a, c, t, g, unknown or other
  modified_base (1693)..(1726): a, c, t, g, unknown or other
attgaaggttagaacggtaaatttgtccctannnnnnnnnnnnnnnnnnnnnaggatctttgactatttggattgaaaaaatagataattcatagtgtgtctatatttggtatatagagtgttctatgtaatcacgagtgcaattctgaatttatagtagagtcaggaagaattaatgagttaggaaatttacttggtaaatttcagatctacttatcaagagcttggttacataggcccatggtccccgcactaactgggataatattattttgtagtctcaattaattgattttaattaatcaattagaattttgaataagactatgtcttgtttgtgaattttcactaagcaagggtttatttgagaagaaaagagattttagggtttgattattaattaagagactttgtanngtctaattaataaataagttaattaaataaaaattttatttgataattaatcataattattaaatagataaaattgatatttgtagagttagaattaaaatatggtatttgagaaaagaaagataaattttaaataaaatgaaaaaattaaaatccaataggcccactaagggattcggccataagggtttaaataaagcctattttatcctttattttattttatttaaaatctaaacctaaccttaaataatgattatcctataaatagaaagagatggctcttattttctaacctaattgactctttttagacaaaattagaaaataaagagagcctcttctattttttgaatcccttattcttcttcttctcaatcatttcgaagcctatagtgattgagaatgtgtcctcacatgtcaaagcaatacctagcatagtgaggaagattgtgtagaaaaattgttaactaaaggagatccaagttcagatcttgatcatactcttctacaaaaaggatcaagggttagagatctgaacggaatgagtcatattattctggtgtcatcaatgtaaagttttaataactttatatgagtttaattcattgttttagggaattcataattaggatgttagattatacttttataatcaacatgcatgttagtaaatctatatcttggtaaaataagttgcaacaactagtctcagagccatggtaattatttattttcatgaaatatgaatttaaaatgatgtttggatgatttggatgtgttcatgtagattacttgatgattgaatgtgaattatgattttgtttttgaaaaataatatatttttggtatgaaattattttatttggaaagttggtgaaagttaagaaaattagctttttacggaacgtaatttggattaaaattaaaaaagatataattttttgaagctttgaaaattttggttaaggttaaaccctaagcatgagaaagaaaaaaaaggcaatttttgccatttttttttttaaatttttctaatttttaaaattattttttaatgaaataaaatccaaattttagtagatttttgtggagaatcttattttttaaatataaatttaattatcagattaaaattaattttcattaattttattattaattaaaattaattttagatattagtaggctttaaatttaaaaaattaatttttctacaaatttgctattatgggttttttaaaacttgattatttatattagtttactgaaatannnnnnnnnnnnnnnnnnnnnnnnnnnnnnnnnnatacattgaagggtagaacggtgaatttgtccctactcgatgtaaat

SEQ ID NO: 106103 - DNA, 927 bp, Cannabis sativa
gacgacgcaaagtcaaaagtagcagatgtaaatgagatttaactcataaaaacaacattaagctacatgcaagggtgaatacctaacgacttgcattgtctaggcatgtattatgaacgaggcaccaaggtaccttgaaagaataatatttaacctaaagtatgaatagaaggcctaactattcatataggcaatcaaaaaatatacaaagtagttcgtaaaataaattattcaaagtatgtaggtttgcctattaagttataagtaacagattataactgctcccgtaaagtagaactaataaaaactgctcgtgaatataaggcatagcagaatataactacttgcacacatacatagtagattaatagctacttaagcaaagggaaaacgagatcaatggaaatacttacttaaagtattttaagtttgaacaaaatataattgtttaagttgtgaataaaaacgcaaataagaaaatatattatgttcaaatgtactgaggcaataaataaaaagataaaagaaaagttggtcatccaactatgcaaatttgtctttacaataaaaatgccacaatgggcaaaccattgtctcagccatacggccattttcttaaataaaaaatatagttaaaaaccaagcctacacagtagaagacttggatggatcttcttcttctccctctgcctcggcctcttcttctgctttcttggcttgttcgtagtaggcaaggacttcctccatgccctctcccaagaaacttaaatccatttctggattcgccatccaagctcgatagatggaatgcttggcaacagcattgcatcgctccttggcatttgcgttagcacccttgagcttcacggtggctgcattaagttcttctcggagttttagacacatctcagacttgtccttaggctc

SEQ ID NO: 106104 - DNA, 684 bp, Cannabis sativa
taagatcatttaaattttaataataaaataattaatatctcatcttataattaaaataaataaaataataaaaatttcaaaaattagccataatgctatttttgtggaaaagcaaattttcaaattcaaagcctactaatatctaaaattaattttaattaattaaaaattaataaaaattaattttattatgataattagaaattataaatttagattctacacaaagttctaccaaaatttgaattttgttccaatgaaaaatgattttgaatcaaaagatataatgaaaacaagtttggtgcacaggggtatgcattgccatacccctgtacgcgcggatccaaggtgatggccgagacaaaaggctgcttgcagcctctatggccgagaaacctcggcgtgagggggggaaatttcggacatgcccctatctgaaggggttttgtccgagggagccgcacgttgtcccccatgtgtgcgcgtatgtgcaaactaatttcaaatattttcatccaaattcaaaaattcataactaattcataaaaaatttaaattgagttctgtaaaagcctaaattcattaaatatttttctagtttccagtaaaaatattttcagaataaaacaaaaaatattttacaacatacattgcgatttccacacaatcatcaaatatgcacat

SEQ ID NO: 106105 - DNA, 1140 bp, Cannabis sativa
aatatatatttatatatatatacggtggattttagagatggaggaaagttaaccgatcccgttaatttttattaaaaaaaaaaaagaaaacgttttaaaaaataatcctttaaccaaaaatttgtaccacattttatataagaaaatataaagaagatattatatatataaattatacattagcaaaaaataatatatgattataaagaaatgtttaaatgattttttttttattttttattaaaaatatttaataaaaaaaagagagaaaatatataaatcgtagaataggtgtttttatgtttttttctttttttaattaatttaattaggtagatatttgttttttttttcttcattaatttaattaaaatataagaccaaaaatatgatcttaattaactcatcggttacaaccaaaatttataaaacacgttcatttcccaataattattaaaaaaaaaattctaataaaatttgaatgagatatttaatactgtaactgaatgaaagaatatctcaaccttaacctataatgataatttttaaattttattcttacctataaataaataaactctgttcattttgggttgcagtttaatttcctctcatggcttcgttcaagatgttatctattttcatttatgtattgctcataaatattagtggtctccatgcttcacacaagatattcccagaataccagtcactcgacatagaacatgtggatccaacttttaaaacggcttaccattttcagcctcaaaaacattggattaatggtcagttcctgttttcattaataccgtgcatgcattgatgcacatttatataataataattttacgtttgatttttctttttagtttttgtttaataaaattagtgttgtatacatatatatatatatatatatttatttgtgtacaatacacaattatatatatactgcatttgttttacctggtgaatgttgatgaaacaacataattataatatgtggtttatatttatatatagtgctgcctttatgtagtggtgaaatgtttaattttttttttattaaagagagaaaatatatcatatgaaaatgtatatatcgatctaccaagtctcactgtatttatgagtttagtt

SEQ ID NO: 106106 - DNA, 1316 bp, Cannabis sativa
  modified_base (291)..(294): a, c, t, g, unknown or other
cactataaatatttaaccatcgttctgatcccaataatcaaagatcctctatagatgatttacaccgagtagggacaaatttaccattttacccctcaatgtaatatggtaaaagtggattgaatagctaattccttctagtcaggtttttttttcaggtgttacagcatcggttcagcattactccagcattttgcacagagataacagaaattcttctaggcttgtgagaatgttccaaaactcacaaattaaggtctaccacttagcttaatatattcctatatcaannnngcaagcagaacactattcaaacatcaattcttaagttatgcaaggtaaataaaatattcatattccacttacaaagaaaaacttaaatctatgatttctcttgctccattcaagttgaactactagatctagcccttgcggaacaagatctagcttagcaaattgttattcatggccaagaaacaacaatcaaataaaatgaaacttactttaatgaacaaaggcaaaaatgctaaagtaagcttaaaaattaatcataccaacatagaagttcatagtcattcaagcctcaaaagtctagctcatattcaaatcaaaaactaaaatccaagctaaaaaactatcttccatggctgctacccaattttacagttcaacaaagtttttaataactaagtacaaacaacaagaaaagagaaagagaaagaaaaatattaagagagagtaaaagaaaaatcaaacactaaagcttggtccccctttcttcctcctctactgtactttccttctgcatttacttctccttccaaaaaaatgcagttgctcacgttagattctagatggtggtgtacttggcttttttcttctttttgttgttgagtccctagggtaaaaaaatcacaccctaaattagaagcccaatccttttgcaccttggcccactaggtttagtcctcctcttacacaacattcagatggtctgattttaaataacaaacatgctcctgcagacgtggaaagctaaatctcgtgtttccatgtcactgccagaatgctgaattcgttttagcattgcttcagcaatttgccccaatttcagcttttgtccccacttcatccttgcttccttttctttttttctatcaattcaattcttccttttcaacaacaaacatgcacatttaattagaaaaaacacacctgacaatattaatttttacaagacttaaaagttagctcactaaatagaaaatgaaactaaaactaactaaaattaagcaaacaaacacattttcactact

SEQ ID NO: 106107 - DNA, 1130 bp, Cannabis sativa
gaagaagatgagttagatccccgtgtgggatccaaaaacactgtagagcctatggagaacatcaaggaagtacgagtgtgcgacctcgaccctaccaagatcctccgtctgggaaaaagcctagagccgaaggaaagaaacaaaattattgaagcactaagggcgaccataaatgttttcgcgtggtgccaaggagacatgaccgacataagccctcatgtgattatccatgtcctgaatgttaacctagacaggccgccagtacagcagaagcgacgtccccttgatccggtaaaagcggacgccctggaaaaggaggtagacaagctgctgaccaacgacctgatccgggatgtgtgctacccggaatggctggctaatccggtactggtgccaaagccaatggcgagtatgtatagactttaccgatctcaacaaggcctgtccgaaagattgcttctgtaataccctggaattaagaaatggattagcaaaaacctaattagataattatgaataattgaagaattatattattatatagttcaatttatgtgaattaatatgatttataatatggtaagaccccgttggtaagtcaggggcattttagtaattatgacacacgaatggtcaaatgatgaaatcaacttaatcatgtgcttaatggaactatattattatatagtatgcctgtgttttcttctcaagtgtgttctgacaggttggcgcggtatagtcacaaccgggtatgtcgagccgaaccggattcgggctcgaaatgcaatttgggattaaatattggcattttatttggtattgagaaatctgaattttatttgaaatttaattatgtatgaatgctattattgcccttgaatgtttatgtgggaattggccctagggggcattttggtcttttaacccttttatttctcatttagtaagattgatttttgggaaattaaattagaaaattctggtgttattcccctctcacccgacccctctccctctccaaatcttctttgatttctcttgaattgtttggtgaaattgcttgggtttggattgaattgaagcttggttttgggagaaatcattgttcttgcctttggtgtgattttgag

SEQ ID NO: 106108 - DNA, 608 bp, Cannabis sativa
ggcaaagatgaggcatatgatatgccttatatgcatctcattatatatatgagaagcaggcatggcttgaattgaaggagaggacaggcggatactccaagagctccaggaacgcctacatcaagaaaacaaaataagaaaatgaagaaaagaagaaaaagaaaaagagagttttatttgagcattatttaagattttaatttagcatgtttgatattattttctgttttttgttttcaaaaaattttttttgaaatgaaaacaaaaaatagtttttgaaatttttaaaacacgagtcatgtttggttagtgttttttaaaattcttgttttttgtaacttcgttttttgaaatttttgaaaactgttttcaaaaaataaagctaaacaagccaaattgttttcaaaaaataattttttatttttaagaacaaaaaacaattttttagttatgatgccaaacatgcacttagagtcttgtgacaagctctaaatgggtttttatttctacatgtcgtttcttttgaattttgtaatttttgcacaatctattatgaattaatttttattttgctagaattattttgttgacttaaattgtgatttgat

SEQ ID NO: 106109 - DNA, 3564 bp, Cannabis sativa
  modified_base (213)..(224): a, c, t, g, unknown or other
  modified_base (315)..(324): a, c, t, g, unknown or other
  modified_base (3445)..(3473): a, c, t, g, unknown or other
gtggtgtggtttttaaccattttttcaaactaacccgcatatgcaatttttttaatttctcaaactgcacccgcaccgcaaaactaaaaactgcacaaaccgcaccgcagaaaatggtgaggtgcggtgtgatttttgcggtttagactatcacaaaataattaaactatcacaaatacaacaaaatttgagcaacacttgtcaaaaataccnnnnnnnnnnnnaataaatatgaaaaaaaaatttaagttttaacaatacaataatactgggctttgagttgaacatttacatattagacctaaataaatatannnnnnnnnntttttataatgtgcggtgcggtttgaactgcatattaacaattcaaatcgcaaaccgcatcgcaccgggcggtttaggaaaaattcaaaccgcaaccgcactgtaaagaatttcaaaccgtattttttcgacggtgcggacagttttagcggtttgatgaacacccctattgtcaatcgtgaattgggtctttcaatattttaatttattttaaaattttaaaattttataaaatatcttaaataattaaaacacatacaacaataaaaaaaataagcttaaaatttatcttggatgttgaaataataaaagtgctattgcgaacaagattaaagagcaaaaatgatttcagtgatgtgaattttcttaatgaattacaaataagtgtagagcactatatatataatcaattaggggagaagaaggaggttagttaaacaactaaccctactttccttaagacaagggacaaaaaagactaactaaagtcatgaaaagaaatcaactcaactaatgcctaagctaacaaactaacaactaaaaaagcaaaataattgaaaacaaaaataaattaataaaactaaataactaagttcaaataccccctcctcaaggtggagcgtatatgtcatatacgaacatcttagcaatatgagagttgagaataggtgaggaaagtagtttggtaaaggcatcgactaaatgaagggtgctggaaatagggattaatctaattgttgagttgttgattatttcatgaataaaatggtgatctagctcgatatgtttagttttttcatggaaggtggggttattggaaatgtgtattgcagactgattgtcacagtatatgaatgcatgagtgttttgaggaatttggaggttatgaagtaaatactgcagccatgttatctcatttgttgtggttgccaaggcacgatactcaactttggctaaactcattgaaatggtaggttatttttttttgttctctaagagatgagagagtccccgaggaagatgcaaaaccagtagtggatcgaggagtaatagggcaagatactcagcagagtctgagaatccccgtaagtgtaaagaagacttggaagagtataaaagtccttggcctgggtgccctttaatgtaatgaagaaggtgatgtggcctaaagatgagtggtgcgaggggctaacataaattagttgagacaattgactacatatgtaagatcaggtctagataatgttaagtatagattcaaccaatcaattgttgataggtagatggattgtcaagtggctctccttgttcattatcaagcttgatgcgtggatccatgggtgttttgcttggtttactaccaatgcaacccatgtcttgaagaagttcgagggtatacattctctgagagataaaaaggccatctttcgctcttacaatttcaaagtcaagaaatatttgagaggtctgagtgccttaagtttaaactagttgttgagagattcttgcaactaatgaagcagatgaagactgggtcctgtaattattatgtcattgacatagacaagtaaatcgatgaatgtgtcatttgttccttttgtgaataaagtgtaatctgcctggactgctagaaacctttagagatgagaacatccaggatcttcttgtaacattgcttagacgattgtttaagtccataggtttctttatgcagcttgcataccaggtttgtatctgcacaaaaagaggaaggcaaagtgagtcctttaggtagggccatgtagactttctcattggggttgccatttaagagagcgttattagtataaaattgtaatgtatgctaatatttaatggcagagatagctagtaaaagtttaaaggtataccatcgtagcagctggagaaaaggtatcaaagaaatcaaacccttcttgttgtgtgtaaccttgtgcaacaagcttagtcttgtaccattctatagtgtcatcgctattgtattaattttgtataccagtgacacccaattgctctttttttaggtggtagtggcacgacattccaagttttgtttgcaataagtgcttgtaattcatattgcatagcacgaagccatacttggaagagaattgcttgattataattttgtggttccttttgagatgttactgcaaaaatgaatgcccgatatgagtctgaaagttgataaaaatttttgaagtttgtggggtgtagaggaaagatcctatatagtagagtaacactcaaagtcttttaaatagcttggaggatttgaaggtcctattagattttctaagaattgatgctacattattaatatcttgtggagttgaggtattagtcaatgaattatcatgggtaggagaattagtattagtatttaggacttcagggacagtagaattgttgtttgtacctatgtggtagtatctgcagtgacatgatcatctaaatgataatctttaataagtgtatcagaaaatatagtataaaggtaaaactgattgagaaaaagcatctatacatttagcattattattcattttttggaaaggaaaaatggtaccataaaacaagaagaatgcttctcaatgaacattctaaagtgcgtgcaaaaatatgaacacataaaaggttgagacaagttcatataactcatacattcttacgttaaacagatgataatagaaagacttggcaaaaagttcatactcactcattacaaaagccgacaacctgtaagagggagacctgactcaaagagcctatactcgctcattgaaaaagtgacaaaccattggcttaccccacaagaggcaagagtcgtaggttaacatgatacatgcacaccataataagggtcaacgtagctcatgaggccaagagtctcccactaagggtgccacatacaataaaaggcctcaaggcataaaagccaaaagaggcaaataccttgtaaaaaaagtgccttggtagcaagagcacaaaaggcaatgtgaacattgaagagatccaaagctctctatgaacatcacatatgtaacaagaaggaacaagagcaacccaggaggtccaagaactgttgggaatattttaccannnnnnnnnnnnnnnnnnnnnnnnnnnnnattaacatcctaaatatgagttctctaaaataatgaaattaaacacataaggttttaagaaaaccttacattgattgcagcagaatataat

SEQ ID NO: 106110 - DNA, 656 bp, Cannabis sativa
  modified_base (619)..(625): a, c, t, g, unknown or other
tgcaatctctcaatcacaaattcaatgtttgccctagacatctctgaggctaattgaggagaaatcattaccatattgaaagtatgatcaggtcctttgcgactgaaggcatctgccacaacaattgcctttccaggatgatacaagatttcacagtcatagtctttcactagttctaaccacctcctttgtctcatgttcagatccttctgagtgaaaaagtacttgagacttttgtggtcagtataaatctcacaccgctcaccgtataagtagtgtcgccaaattttcagggcaaacactactgcagcaagctccaggtcatgagttgggtaacgttgctcataatctttcaattgtcgtgaagcataagctatgactttatctgcttgcattagcacacaacccaaaccctaccttgacgcatcgcaatacaccacaaacttctcttgatcagatggcaaggctaaaacatgagctataatcagtcgttgtttcaactcttgaaagcttattcacacttatctgaccatatgaaccgctggttctttctagttaactcagataacggcattgcaatcctggaaaaaccttccacaaaactgttgggttttatgcnnnnnnnaaaactctatttcaatgtaatccagattatt

SEQ ID NO: 106111 - DNA, 517 bp, Cannabis sativa
agttaataaaaactaaggcttcgacttcaattatttctattgattatggcctaatatgattatctccttattatcaatttttatgcaatagcgggtttactaagataatttatagccttctcagatatataaatctcaatcacatgcaaactttctactctcgttataaatttaacatgcaacaggcattaaacacagaaaccctataagctttctaaaccccacaggtactctcgtcctatatcgaaattcaattctatttcactatagcatagttgacactcacttctcatcaacattatagacagttaattggtaatcaagcaattaaaagtaattaagcacgaatgaaatagaatacataaaaactgagggaaaataaatcatatcaaaaccataaaacaatgtcaaacaatctctatctagaccctaaataagagtttagctactcatgtttatgaaagaaaaatcacacatattaacttaagaaaatagaagaaaatagagaaaaaaagaa

SEQ ID NO: 106112 - DNA, 630 bp, Cannabis sativa
atttagggcataagacccaacacaaagttgatcccaatgctcaaacaacaataaggatcaatggagatcctacggaggctactagtcgtcatgtgaataaagattaacatgatgtgtaacgtgtttatgatgatcctatcgatgaagtaaatgaaactgaggatagtgatcctattgatccagaagacaacaaaactagtaaagaaggtgaacatgatgagttgaattctgcaatctctaagatggctaaaaaattagttatagctaaatcgaaaatggcggcccaagaagatttctctcacaaaatgcaagaaactctgatgcgattggaaggaagaatcgaattaggaatcttaactcttgatgaagaaaatcctagcgatcctgtaggagaataataccaccaaaataacgaatcctcaagaccctggtacttctgatccaaatagggataaaggaaaaggagtcatgggagatttgtttggattttatgccctaaataaaccccatttcaatataatcttatttgttattaatagaagattatttatgtcaacatgtattattcatgtttaaggtttaatataaaatttttgttaaatccaggacatatagttattcacaattaca

SEQ ID NO: 106113 - DNA, 4610 bp, Cannabis sativa
  modified_base (3865)..(3869): a, c, t, g, unknown or other
  modified_base (4134)..(4139): a, c, t, g, unknown or other
  modified_base (4301)..(4305): a, c, t, g, unknown or other
tataaattaaagtttaacctagtactatataaaaatataatatataaattaatttaatataatacaatacaattatacaacctaatacgacgttccaaacgagcacttaagttattataaaatatggctagccatttgtaagacacatcaagtacctaatatatatagcaatgctcatctatatattatcgggtttgaacatgactttatagctcaatagtttccatgccctatccagaaccttattgactaattaacccttttctaaggaacaatcatttatttatttatttaaaatgaaaagaaactttattacttaactaaccttaatttagcttattttttaaactttaatatagtacaactcaaaatacgtacactaataatatattatttatagaacaaagtattattggtgatttcacaaacaaataactaagctcttcaagccatatcatcactctctactacatggagtaccaaccaatattagcctctttcgaagtgcttctcttttcactttttatgtttattgtggtgagcatactcttgaagagagctcaaagaagcaataactcagcttcaaaactacccccaggtccatggagactacccttggtaggaaacttgcaccaactttggggcacttttcctcatcacacactcagagacttagccaaaaaacacggacccttcatgtaccttaaaattggacaagttccaaccatagtagtttcatcaccagagtatgctaaagaggtcatgaaaacccatgatattgctcttgcatcaagaccacaaactcttgcttcaaaaaccatggcttttgatcactctactgacattatatttgctccatatagtgagtattggagagagcttagaaagatttgttcacaagagcttctaagcccatctagggttagatcttttcaacccattagagaagaagagtccattaatatggtaaaagatatagcttcatcaaaagttggctcacctatcaatctcactcaaatgatcacatttttgtcttatagcatcacatctagggctgcctttggcaacaaaagcagtgatcatgaagagttcatatcaattgtggaggaaattttgaaattgtctggaggatttgcatttggagatgtgtttccatctttgagttttcttgattggtatactttaagtaaatataaagattgtaaattaaggttatcaagaatattggaaagaatagtcaacttacatatagatcaaggtaaggatatcaagtcatcaacaaagaaaagtggaagagaggaagatttggttgatgttcttttgaggtttcataagtgtgaagatcataagttcacattaacaaatgacaatattaaagcagtgatttgtgtaagctttatatataatatatattcatatcatcaacttgtttatataaaaatattatcaattttgtgaatattaattattggtatcaaaaatttcaggacatatttgctggtgggagtgaaacatcagcaacaactataaactgggctatggctgaaatgatgagaaatccaagagtgatgaaaaaagctcaagatgaggttagacaagtctttggtgaaaaagggttagtcagtgaatctttaatcaatgagatgaaatacttaaaatcagttgttaaagaaactctaaggttgcatcctccagctccgttgttagtaccaagagaaagtagagaaaagtgtgagattaatggctatgaaatacctataaaaactcgaataattgtaaatgcgtgggcaattggaagagatcctaaatattggattgaatccgagagttttatgccagagagatttgttgatagctctattgatttcaagggaggtaattttgagtatactccatttggtgccggaagaagaatatgtcccggtatgtcattcggcctaattagtgttgagcttcctctagcatttttgctataccattttgattggaaacttcccaatgaaatgaaacatgaagagttggacatggctgagagatttggtattacaacctgtagagaaaaggatttgtacttgattccttctaaatatgatccaccttatatggccaaagcaatgaatatataaagtagtttgctttaggctgatttctcttcttttattattattaattgttgttgttattctgactgaaataaaccacaaaagcatgtagatctagtaactttgtcgtataatgcaaatctgtatcaatttggaataattatatcaataaatatttgttagatatttgactcaaattcatattattttattgattttggatgattaatatgtgtaaaatatttttgtttggctacatagtgaaaagtcttcataaagaagctttgaaattttaatttttctatatatattaatatatatatgtgtgttaattcttattttgtgtgagagagagatgtgtgagaaaaagagtgagtgtgagtttattgtgcggtgagaaagagagtaagtcccagtgggccgccttcatactggctccatccgatgggatttcagggtaagacttcgaggttcaatttatggggtttgatctctgggtttggctgtgacaattcttggtccatctgggtaagagacgagagggaccgtggtctttctttttctggtgccgcatgaacgagaggagcgagcaacaacaatgttgtgttgatgctcctgtctagcctttccctgtgcagcgtgacgagggagcaagagagaaggtatcggagagagagtgagaaagatgagattagggtttttagtttcgggtccataatgttctatttatactttattttttattgctgaattttttttttttttgatatttttttaataaataaaaatttcttttattttgcaagagagaaaaaagaacaaaaaatatattttttttttacaattttcatttaacgaaaatttctcatatagctaaattaaatataattctccaataatattttaggaactcaaataattgtccaataatattttagtccgccaataattttttccaaacaataattttttaatacagctaatttttaaaattattctctaattgaaaatatataaatttacaattattttataaattataattataaatttgagttattatttgaaaattattgcctattatttgaaaatttgagtaatacttaagattccttaaatgtcggttcataactaacacttatactcaattcaatttgtatatacatatatttaaactttttttggtattagttatgatttttttgccgatttacaaacaaacatgttgaaataaatccccatatgcacatgtccagatcatcatttaacaagaaaatatacaaagcattaaaatctaagtggccttcggcctctaacaacctaatgtgatagaaccagtagttagttgcaaaatttattaaaaatgttgcaactaactcccatctctctctcatctatcctatagttataaatacgtacatgcaaatcaaactgaaaaacagtgatcagatcagaaaaaattggaaaggaagagacttacagtggttaagtcttggaggcctaggtttagggctcgaagatccaaaccaagaagaagacatgcatgcacaaagaaaagaagaagaaggagtctgtaagatattcagagagagaaagagagaaaaataaacactggaaaattaatggattaccaatcgtacctgtgatttggaatgctactttgtaactctttgatcttgaagatctaatagtgaaaacgagtgtaacgtccccgcttcaagcatacattgggtccttacacccacggaatgaatgactcttannnnngagtacgccactctggctgcttcaaggattgatgactggccctacagaccaacacgagtattttcagcgtcctttgtctcactcacacacttcctgggtttttccaggaggtcacccattctaaaattgccccaggtcaagcacgcttacctgtggagttctttcgtgatgggctaccaaaaaacaagatgcaccttgttgatataggtagtatcaatccatccatttaagctctcttcaactatgtagtcccatacctacacannnnnngaatcatcacacttgaccttcccacgcaatgtgggattgcatagcttaccgggtgtttccccttacggatcacgggactactaactatcacaatcacccccccttacggggtccaccgtcctcgtcgaccacacttctggctgggtcaaggctctgataccnnnnntaacgtccccgcttcaagcctattcggtccttacacccactgaatgaatggctcttatacacgagtacaacactctagctgcttcatggattgatgattggccctacagaccaacacgagtattttcaacgtcctttgtcctcactcacacgcttcctgggaaaagttcccaggagttcacccatcctaaaattgccccaagtcaagcactctcaactgtggagttctttcgtgatgggctaccaaaaaaagaagacgctccttattgatataggtagtaccaatcaatccatttaagctctctt

SEQ ID NO: 106114 - DNA, 543 bp, Cannabis sativa
  modified_base (281)..(282): a, c, t, g, unknown or other
cattatttcaatatgaaaaacatagagaactcctctactggagagcaacatgaaaaaaatattcaataaatttatatatattacatgattgcaacattcaaaatttatacatcaaatattcaaaattcttgaacaaaaccccccatctataccaaaacatatataacaatataaactcatcttaattttaacatttatcattattatcttcatacttgctagctccaattagttagaaagtgacctccaccaaagacatgctaattaccaaaagaagaatnnttatctctgcattttttttagcgtgaaattagctaaatgggatatatgtatatatatatatatatgaaagaattaatatggtagctccaattagttattatcttcatacttgctagctccaattagttagaaagtgacctccactaaaggcatgctaattaccaaaagaagaattcttatctctgcatttttttagcgtgaaattagctaaatatgatatatgtatatatatatataaaagaattaatatggtatagggag

SEQ ID NO: 106115 - DNA, 1116 bp, Cannabis sativa
cctattttctacgcgaataatctttttttattcaggaatccgatttttttttcacattgatatttttcttgcgatcttttatctttttctattgatatttttcaaatcttcttctattttaaatctgcaaaaataaaagataacaagcgtaaaaatgcttcaaacacgattaaaactaaattaaaaatatactaaacttaatttaaaattaatactaaaaataacctaacggtaactcctcttagatgcctctgttctttcatcaacatcaacaaaattctcccaacatgtctgctggctcttcacagtcacttcaattgcattagatgttcgagcatccctcactgtctcctcccatatgttttttggatgccacaggaggatcttagacacaacaacctatggttggctattttggaggctcatcgttacaacaacaataccctatgtatggtcaattcgggtcatcacaacaacaacctgtgtatggtaaatttgggtcattattgggcctatgtatggtcaaataggaggatctccacaacagtcaatgtatagtcagatttttcagtctggagagtcagcaacaatagtagactactttggttcgtccgcaaactcgacaatttgtcgagatcttacctacgcaacaatctgcacaacctaattaccctactcatgatggcgcctcaatctcgtgataattgtgacggttcaagacttggctctaatgcagatgattttatagaatttagtgatctgaacaataataattaggttttttaactaaaaaaaattaagttttaaagttttttaaaacaattttataattttatttaagacaattaatagtagtgtgtattgttatggataaattaatattatagataattattattaatgtttgatttgttaaatttaaataccgttaataatattttttaaaaaataattattatatacaatattataattatttttattatataaatattaaaaattaaaaatatttttttatataaaaaatattattatcagcagaatctgcccgtaaataatcaacatcgacgatttttaacaatagtacgtatcgacagaaatttctaccgatacaaa

SEQ ID NO: 106116 - DNA, 729 bp, Cannabis sativa
attctcttggaaaatattgagtgagtgttgaattatgttctattattgtgttggctatgtatgttgtattaatgtctttttagtccttggcccagatactgactttggggttcaacctaatacgaacgagtttgttgatcgaattatcaaggatatttaatctataaaggaggagcaccgtaattttaggaaatttctccccaaaggttgcttacaaaaatcacaagacgttatagaagaaggtatctctaaacttcaatcccttgaacacattcacatccttcttctaactcgagaaggttggaagtaagtttactattttgactcacatgaccaaagagcaacgcatgtttgcagacaagatgtcccaaaagaggacgatcaaaattcttaaagctagcgatgccatggatagagacaaattgacaacaactaagaagttgaagactgaagagtccaaacaagtttctgagagtaacttcactgatgctccattgactctatcttctcttggtacgtgcactacaattaagaggaatgccgactttcttgactgagaggttgttgatgaagcggttcttcgaatccctcacactgtatcagtctattctaaccctttgtcgattgaaggggatgtagatggaattctccatcccgctgatcgagcacgattgattaagcttggttcaactggggtttccagcaatggagtggctgacggttacaagg

SEQ ID NO: 106117 - DNA, 706 bp, Cannabis sativa
aataccccacaaatagaatgaaaaggggtcgaacattctgggttcaaaggaatcaaagagagaaaatacgagagaaatccaccaagaacattctctgtattaaatctccaattaataaaaaagactcgtggactaaggctcattaatgccccaaccacgtagaaatctcatgcattaaactttctaaagctcttgttatatattatttaactggttgccgaaaacctcggtcaacatttcggtgctttcattgagagctgaatgaagcgtcgtcaaacagaaaacaatcttagaagttgaagcaacaatggtggaaactcgtaacaatacacgttagccccatccccctcaagatgcttagaatccagagaacgaggaggtggcctcaagagtaaacgtgaattctgaggaacgagatgaggccaatgacgacgagtacgaaggaaactttgacgagtatgacgcctacgacaaaggcagttttacaaatttaatgctattgaggcaaaaggccactgatcatgaagctgagatcgcggcccaaaaggaacaaaatagaaagatgcaagaggtgatggtcgccatgcaaaaagccatggagacagcagggattcatatacaccctaaggccatcccggaaagactcgaagaaacgtcggaagaatcctctcctagcacccagaaacacaagaccagggaaccaagt

SEQ ID NO: 106118 - DNA, 1122 bp, Cannabis sativa
cattgatctgtcaatggctgacgccccatgacaccaaggatcgcatgatacctgacgacaacaagatgtttgtcaaggaaggcaagactccaaggtggccaaacagtagggtcttttcattcagaaaaatattcttcctatacaaataattttccaagatctgcaagagataacatccaaacaaatagatagaaattcgtagaaatccattctagtatagagcagaatatagatgatatcctaaatggtgcttctagaagcactcaacttctcacaattccatagggcatgaacaatagtctctgaccacttatactagaaggaactcagattggtgacatgcatcccaagattacaaagattggagaaagaaggaaaccaattgttagcaattttctacaaaaaatacctaatttttctcaggatgtccaaataccaaatttttatccaaaatgtacgattacattttaaaatgttattaaatgcgtataacatagaaaattttaacaattaaataatataatcaactgaaaaattttagttacatgggttgaattataacatttaaatgatgttttcttaaatatatagcgctaaaaaaaatattatagggctcggttggtacatcgtgatgtattgtattgtattatattgtttagtattgtattagtattatttaaacaatactatgtttgatattgaattgaactaataggtcctctaaaattataaattcattaaaataaattcgacccaaaccccaaccatggcctagactcggacccagaccccagacctaaacggggacctagaccccagactcgaacctaacccaaaccttgacctagatcctggacccgaacagggacctagacctcaaacttgaacctagacccacactcagacctgggcctagacacaaactcaaacctgaacctggagtcgaccccgaaccaggaccccgaccgaacccggatcctgaacccaaacctcgcacccaaactcggacccagaaagggacccagactaaacctgtgtaagagtttatgcccaaaaagtaagtagttaatggataatatattagagaatatataaaatattggattttgtgtcctaactaaa

SEQ ID NO: 106119 - DNA, 2830 bp, Cannabis sativa
  modified_base (1341)..(1344): a, c, t, g, unknown or other
cactgttgcccataataatactctatatttatatatttcttattttttttttttttttttggggaaagggatggcattttcttttttatgcaaacaagatgattcaattactaattcctaggcctttcaatataaatggtatacatattgttcatcacttcatcttagtagattccaagagaatatttgtccccaagaccttggaactaccaatcttttagttattaaacaaaaaattttaactttaataaacattccaatttttttttttgtttcatatatagtacactcacaattagtcacaatctaagaaacaccttatttttttttttttaaatgtaatagatacatacaaggcacgtaattaaacttgatttgggtgctttcatttcaattaaaagctagaaattatggatatatatatacacatatttaattgtatataatctttaaaagacaaatgttcaattttgaagcattattagtgcttttgggtttgttttcttaggccaagataaggcttaactatgtttgatgtggagatacataggataatgaaaggtacattgttcttgtcttgaaatatatgatcttaactatgtttgatgtatgtggtgttcaccaagatcaaattagacctttattagtggaattattggtcaaattaatcaaaaagtgctacaaaaggtttttttttacatgatgaataaaattactcgtgaatttacaatgttggcatttattattggcgcaggaaccttcttgaaccaagataactcatcgtttaaccgcaaagtatactttatcaaatcatgggcaactgaattctcaaagcgagccacgtgaaagaaaactgttcctaaaaatttagacgataaaactatattttcaaacaatacttccagctcatggtacaaagattttgagataatatatattataaaatgataaaaatatgaagtagttgctcaaacttgggtcctgagtctaggtctgggttcgagtccgggattgagttcgagatttgaattgggtcccaagtttgggttcagggtccagatcttgagtcccaagtcctagatatgagtttgggtcccatgttcgggtcgggtctcaggttcgtgtttaggctcgagtcgagtctcgggttcgagtctgagccccgggtccgaatccaggtctcaagaactgggccaaagattgagtttgactccggatcttttgtaataatacaagctaatacatactatttattatgtattaaataatacaatttacgttgtattaaattttttagtcgtaataattaagacaatacattaatttatttaaatataatgnnnntattatttaatacaatacgactttatcagcctactaaatgagtcattagtgtcttaataataatctagttatgctatcataaattttacactacacctacatatagcagggtaatttagtcttttcagtcttggtaaagataaattacaatagaatcaatttaattaattataattaagtagtgtaatataatattataatttgatcatatagatttcagaacttttctgaagtagttcaaaatattttttaattaatttggaggatctaaattaagacaaaagcacaaggaacccaccaagaaaatatgtttggtataagtgtttcttacccttgatatatgtatattctactatatattaatttcattcatcaccaaaaaaattaattaatatttaattacttgtggtgaatctaattcctaaacaggaatttgacaaagggaataagacttagtgaaggtgacaaaacactacaagactaaattaaagtggctttcattcatttatgtttattaatacaaaaaccctaaaaataataataattaataatatgcttaattaattaattacttattagttactcttggtattgtcgaaaataaagacaagtccaattctcttcttactcagatttcaaggtgggttttcttataatatatgttaattggtatatatgattgttttaacttaataaaaaatatatatattattatcattaagtactatatatatactgcatattctgatcctgaatgggttttaataatttgttctcatctcttacttcaatattcttagtactattctcttaattcatatagacattaattaatatcacattgcatgtccaacgaagttatatcttttttaaaataatacgtttataaataaaattgaagttagacttcttggttattacaaaagatattaacaggtatagtagatatatctaccatgtccgtaacttattggcaaaagcccatttggccacattatgggccgcgtatttatagtttctagttatacaagaaaaattacaaacagtcataaacgtagagaggagcttgcattgacgcacatagttctcaatcccccaaatggagtcatccccttttaggtttgataacaatctctgaatcactctccaccaaaacaaaaggatgatgcaaaaagaccgccgtctccatagctaaaagacaagccgcagcttctccagtgagtgggtcagagaagtgtagtctttttgccgccacccacaaaactgattcgttatggtctctcgcaatcgccacagcacacatagtttcacctctgactttgacatcgcagttgattttaacccaatcttccggtggcagagaccaagccttagtcccaacagactgtggaggggaaagaaggcaggagctataatctgtgtaacaagaagaaatagagtcaatatagtgtttcatgttacccaaatttttattatgtaccttatc

SEQ ID NO: 106120 - DNA, 677 bp, Cannabis sativa
tgaactttcatccatgttagaaatttttttactaaaatttgacaaaagtccttaaatataacaatcttaatagttcagtaagaatttttaacgtccaaaaaaaattcagagagcatgatttagtacatgttaaagttcggggaaaaaattgctaattagccaagataaaatataagaatagaaaagaaaaattaaattaataaaagtcaattttttttaaatatatattttttaagggtttttatttttttatttttacacttaaaaatatatttttttgtatttttacaaaaatccatataataacccacataattactaataaaacaacttaaatcataatcaaaattcatatagcaaaaaaactactgtagcaactctaatcataaattaaaaaataatatataaaataattatcttattttttaaataaaagttgtatgcatagtaatattttttttagaaataatttcataataaataacaaataacaattaatatgtaaattcataggttgtaggaaacaaatataattcatatattaggggatttttttttttttttttttgaaagaatatatattaggggattgattggtttggaatgtgtagagccacctcgtcaagtcaagttagtctctattttatttgaagtcttctctttttctttctctctct

SEQ ID NO: 106121 - DNA, 583 bp, Cannabis sativa
agagatgtgtatatatatttatgacatatatactcatcaattcctacatattttaaactattctacatttttgtctttactccctaaagcataaatagccacaaacacatttttttctctatttcaaatttttttggatcaaattagggattttaaatgttcatcactatcatcatcatatttttcattttttcccaaaaagttcatccaaatcacaccaaatatataaatctctctcatttctaaaataaagagtggattaagataacccatagcctacattgctaagtttcattcatagattctaaaaattacaagcccaatttcacaacattagaaaaaagcaaatatgtaaaaagagggttttatgaaaaagtctaaagaacactatgatattcatactttctatgtattttaatatgggaaatagaattgaatagtgaatgggtgggagtaacttactcaatagtgatgtccaagcttgaatacccaccaataatctttagtttccactttgagcattcctttgaaatggttcttggagctatttgagaggatttttagaagagctattattttttat

SEQ ID NO: 106122 - DNA, 1155 bp, Cannabis sativa
  modified_base (1118)..(1120): a, c, t, g, unknown or other
ggcgcatcgatacataatgatggacaacctcctttatcgaagaagactcagcatgccatatttaaggtgtgtgttagaccctgaagctagacggatcatgtaggaggtccatgaagggttctgtggagaccataccagaggtccaaatctctcaaagaaaatattgagacaaggttatttttggccaacaatgaagaaggattgtgtagactatgtcctaaaatgtgattcatgacaagggtttgcaaacataccgagagccccatctaaaaaaattaccttgatgactagcccctggccctttgtggtgtgggtgatagatctcattggatccttgccaataggaaagggagggggtaaagtatgccatagtggctgtggattacttcacaaagttgataggggctgagcccatgaaggccataaccgctaagaaggccttagactttgttgtaaaaaacattgtgtgtcgataagacttgcctcacaaaatagtctcagacaatggaaagcagtttgactgcgaggaattcacaaacttttgcaaccaacacagggtcgtcaaaaacttctctgcggttgcaaggctgcaaacaaatggacaggcagaggccgtcaacaaaatactaaaggtcaccctaaagaaaaagctactggcctgtaaaaacagctggcctaaagaactgccacgagtattatgggcctagcggactactccaggaaccacaactggacactccccattgtcaatggtgtacgaatatgaagctatggtaccggtagaaaccttgctcccatcccacagaagggcaacgtataatctggcaacgaacaaagccttattacaagaagagttagatcaaatagaagagctccaggatgagtctcaaatacggatggcaacttatcaaagaaaggtggataaatacttcaatgctaaggtcaaagataaaaagttcaccattggcgaactagtcctacggagggtctttccagccacccaagaacccggagtaggggtttcgttgggttttgtgccctaaataaaacccatttcactataatcaaatttgctaattaataaagatgagaaaacattttatgttgcatagttcacnnnatttatttcatgtttatatttaatgtataaattct

SEQ ID NO: 106123 - DNA, 814 bp, Cannabis sativa
tatgactatgaacaaccccatggtgtcattattgactgacaacaagctcactggagctaactttgtcaaatggaaatagaacattaacattgcttttatatgtgaaactgccctgtttgtgctgactgaagaggctcctgagcagccaggtgagaatgcgaccaaggcagtcaaggaaaagttcgagcgttggcagactgctaacaacaaagctcgatactttatgctgtctagcatggttgacaccttgaaaacaaggtttgttaatactctcatggctacaaaaatcatgaactagttaactaaactgtttgggatggcgtcaaatcaagctcagtttgaggcgaccaataattttatcaatgcactgatgaaacctcatcagaacgtgcatgatcccctgctccaaatggaaagttacttccaagaagctgagaatcatggagctattatagatcaggaaacacaagtgagtttaatcttgaatagtttactccaacttttctaccattcacctcaaactatgtcatgaacaagttgacttttgacttccacgagttaatcaacaacctttagacatttgagaatttgattgaaggaccacagaaaggaggaaacaaagctcctagttttggcactgttaatggtacgaccaaggctgaggaaaacattgcatctacttcaaaatccaacaaaaagaagaagtggaagaatgacaagaagcctcttaaatctgttaacacagctaataagaataaaaaggctgttgattcaaaggcaaagaaaaaaggaaagtgcttctattgcaacgaaa

SEQ ID NO: 106124 - DNA, 2517 bp, Cannabis sativa
  modified_base (2479)..(2491): a, c, t, g, unknown or other
aatagcgatcagccatgagtttcaagagctaggcgaagaacgtacatgcccgagccacatcagaccaagcgggttaagggtctactagtgttgcacttttgaattctattttgccgcttaggttggctagaaagaaaagagttgtaataaagtttgtaaatgtttttgggatcccagctgtttaaaagtttaaatttattacaagttttattttcattccgtttagtataaaagtttaaattaaatgctattttgcttagtaatcccgattaggggattagggtttcataattgattttgggtagcatgcctaattatttagggccttacaaccaagcactacaacaaggattctagaaaccattgggacatccagatcattgtttcccaaaaacaatcgctgaaagaatatagtcatctctgattaacataacttggtgtttagagatggtgctgaagacaagaggtcccaatttaaatgatcggtctctcagatcatcactctcaatgaaagacttaaaaagctcagtttccatcacttttctaccaggcaatttgtctagattcttatatttaggcacattgagcttagctctaatgtattgggccacgtgtaagcatactcatcaggcatccttcgacttctcttcatacgaggcctgacggcttcaaaagataagttgtttcaactcaaaaaaagtgaatatcaattcaagagaactcttttcaaccatctcaaggaaagatcaagttgactccaccaaacaggaaagggagattttagctcaaaaaaattgatttctacctaaaaaattaagaaacactcgaagaactgatgaagatgaaatcactcagactcacaaataaaccataggtatggcgcagtgactaaacgcattggagagaaattaaataagagctctgttttttagggatccatgtatttaaatcttaaaacaattaggagtcttttaaatttaatatttaaaaggaaaaggtagatgataagcaaaatataatcatattttctcttctccttttttaaacttgaattttgaattccataatgagaaagaaataggaattcaaaatttaaaagatgcaacaactcctaatgcaatgaagatttaaacaaatttaaagtttaaaagaaaaagaaaataaatgacaagtagaagataattatcttttctcttctcctttttctccttaaattttgaatggaatatatcaaatggagtaggatttaaactcaattaatcctaatgccatgagaaatagatgattttttcttagttttgaaaggaaaagataaaagataagtgaaaatgataaattttttcctgtattccttttcaaacaatttttcgaaaactcccaaacacaagagcaagggaatttgaaatcccaatcctcttaataattcttgaagaacagaaacaatttctcaagattgtcaaaatggataaccacccggtagttttcagagaaacgggctctgttcacattattaaatcaaccagagaaaagtaagaagttgactagggggcaaatgttaacccaaaaacgtatcctggtgacgtggacattaatgtttgacacgtagaaagaaagaaaacatctcagagttgagtagaaccgattcatagcaatcgacctgagagggttccctagccctatgcccaagttgacttcggcaactccgaactgggtgtttagatccaactaagttgtttttgacgcactatccttcagtattctgtaccataaagatatgaagcattcaagtgcaaggaccaaaagtttaaaatacacgaaattctactcaggggcctagggtttcacccagcgccaaggttgacaacaaacctagggcttcaatttttaggaccgtcttagtgcaaatgagtgaaaactttttctatgaaataaactaggcatgtcaagaaaatatttgagacatcagaatcaaatttggagaactttcattttttagcacctggagcaccacctggccactttaaatcatcaaactaaaaattcttctctagaattttctttgactagagggtaaccaaaaggccaaaacaagggaacaacaccctaattgacattttgtcaacttgggcttattttgaggagttttttgaaagaaaaaaaaaagacttctaggcatattcttcgttttcctcaaaaattaagattgaagtatttctgtggagaaacaaaactgtctaagggcctgaaattggacccagcgcccaggttgacacatggcactaggcgcaatgcccaagttgacatattgttcacctagactatttcaaatcttgtttcataaaaagtgtttcgggcattttttttccatcatcagatttgagaaatatacaagtaaaccattgaaaaatgacatttccaggggcatcaatactgagcccaccacccaatttgacctagtagttgttgggttttatgcccnnnnnnnnnnnnnatttcaatgtaatccatttcattcaa

SEQ ID NO: 106125 - DNA, 599 bp, Cannabis sativa
  modified_base (539)..(541): a, c, t, g, unknown or other
agaaactggatcgggaccaggttttccttgtcacttatattgctgctcgccaatcgggctaacgcatctgctgttgtattttcttctctaggaatttgtctgaggctgtagctttcaaattgtgcgagaaaatcatgtatttttctcagatatgcaatcattttttctccccgagcctcgtattcgtggcatacatgatttaccactagctgtgaatcactatagatctcaatgcgctcggccttcatctccttcgctagtttgagtacaacgattagggcttcatattcggactcgttgttagaggctttgaatccgaatttgactgttgcatccagatgttgccccccaggcgtgacaagggcaattcctgcaccggatagctgatctgttgccgacccatcaacggatatctgccttcggcctcgatgagtcttttactgatgtaatagaccggatgctgcatgccgtcgccgtcttcttctatgattaatacggcagtcacgacatgctccgttactgctaggtatatccccagnnnctcaccgtccagaggtttagaaaggacgggaggatttgcgagctgtgcctttagatct

SEQ ID NO: 106126 - DNA, 519 bp, Cannabis sativa
aataacagacctaaaacaaattatgaaagaataatatttatcaaagcacatgaaccatacctaaaggtgataaaacctaaaatatggagaaacaaaaaaaaaaaaaaaatgcaatacaaacttcaatcaaacgaggagtttgattcttctcatttttacaatcagtagaacaataccaagaagaaaacgactcaacttaaagaagaagaaaaatcaaaattggagatgtcttctttcttcaaggcatttcatcaaacatatggtaggtgaacctttatatacatatatacacaaagactcagcttataaaaaagataaaatataaaaaattgatttcaaaatataaaaatcacaaataacaacaacacccataagaaagttaacaaacaaaaattgatttcgaagttgagaaaccaaaagaaaccctaaaaccaactaatgagcaatacaaatgaacctaaaacgattgaaacaacaaaccaaacttaaaaaagactaataaacaacgtgaataaaaaa

SEQ ID NO: 106127 - DNA, 563 bp, Cannabis sativa
tgtggctatataacagaattcttaatttatgaaaaattattgagtgactttttttttaaaaaaaaatctattcaaaaataacaattattttttattaagatgtattttaatattaatttttaaataaattaatattacttttaaagtctaaatcaccgatattttaggtttaaccagaatatactataacttaacagaatattatattattttaaatgcatataattaacatctccgttaacttttcatctacctctaccatccaccttgtatattattaattaaaaaaacgattactttctaattttataattttataataataaaattataatttttctcctttcttattgcgattgaataaaaaataattttacttttctttcataagtagatttttctaattaaattaattatttacactatgtcttatcatcttaaatgaaaataaataactatttgcaggaacaccgccattttgtcgacactaccttatacaatttattcactggaaaaatggataatctaattatatgcagacccaattagaatgaaaagtgcaa

SEQ ID NO: 106128 - DNA, 646 bp, Cannabis sativa
  modified_base (211)..(218): a, c, t, g, unknown or other
agcttggccgaaggttgaagcagctgcctcgttcccaccataagccacttgggccgctcagtactcaaggtacatgtccttagcttcgcccaagtagtcaaagttggcccagtgattagccttcaaaaaataaaagaagagctcgagactggctgtctccaaggcattgaccttctccttcaacgtgtacacctcggtcgaaagctccccnnnnnnnncatccttctcctccttcatccgaagaagaaatgctcgtagagaagtcctctcatcgtgaagactgtttacctcagtagataagagcctcgagatcctttgttagcacggagatcttcttctcagcagcgaatagcttcttgttggcctcgcccaactccaacctaacagctccggcttccgccctggcttcttcaacttccttcttggcaaattctgcctctgcgcttaaggtgtcaaacagagccgcattcttggaagcaacatacatagcccaggggtaagtgtaggccaacttcagactggcctgcacatcaaaaaaactttagcatatggagctaagtgtggaaagttaaagggaagtatcaaaaaagacttaccctggtgaactccttcaagactccatccaccaacacatccaaagacgagt

SEQ ID NO: 106129 - DNA, 506 bp, Cannabis sativa
gttccgccagctgttaatcctgaatagccggcaaacgtgggacatggtgtaatgactcctatagatgtaatcgcgcctggtgtgcaagagaccggcaataacagttcagcacccaaccagggcattcataacaagtcgttccgcccgttaccaacactcaaacggccattggagatgataccgagttacaaaatctctgtgctgctcttggactcgtgcagggtcatgccaataccatacatcatgatcaggaagaactttgcgctgcgataaacctcatgctcgaggaacaaaggcgtatgtttagtgagtggagagacaaagagattgaagcgttaagggctcatcatgcagagattgaaatcgtagtcggcaagctaccgtgctgatacgaaaagcctaccaaactgtatgtcagcaacctccgagtgtcatccccttgggttagacggacaaagatccagcgatgaatacttcccagactgcaaatggtcagccgccaaatc

SEQ ID NO: 106130 - DNA, 751 bp, Cannabis sativa
agtgctctgctcctaattattcaatacccctaatgcatcaattcattagatttggagtttgcactgttcactttgaactcttctgtagtttctttcatctatatatataacaagctcaattatgataatttgatgaagatgtagttgttgatttctaataattaatgagtttctactttcaatgaaccatgaaattatatttattaagtgctgaaccatcttggtgactttgagataatttatgttattttataaataaattgaataaaaaactttgtactgcttatattcacagacttatgatgtaaggtctttttttatattggataagggagttggtcacaggaaattcagttatgtgggtcattctctttgcttggtcttatgctttcatctacattgtctttccttcttcaattaacaattatcaatgaaagcatcaatacaatatgggtaatctatttgagttcgtgtcagctaaacactttttatatttttatgtttttgttttgtatatgatgaaagtgttgtagttaattgccaataataaaaaaagtatgtcatatacaatattacagagtatgaatgaatttagtcaatttactaattattagaatgttttaaactatttagcttcctttaatttttatggctttactaatattagaaatttaatccaagactactttaattattgtatgaaaaataaatacttgctggaacaccacaactttatcaataatatcataga

SEQ ID NO: 106131 - DNA, 661 bp, Cannabis sativa
  modified_base (613)..(613): a, c, t, g, unknown or other
ttctccggtcttcacatatcctgtggagatcagaccttgttgaattttctcacgaataaaatgacaatcaatctcaatgtgcttagttcgcttgtggcacacgggatttgacgaaatatgaagagcagcttgattatcacaccacaattttgctggaatagaagtcttaaactcgaattcagtgaaaagtcgataaatccatattgcctcacactcagactgtgccatagctctatattctgattcagcactggatctagatacaacattttgtttcttactcctccaagagaccagattgcccccaacaaatacataatatcctgaagtgcatcgtctatcttccttggatcctgcccaatctacatcagtgaaacactcaatctgggtatgtccatgatccttgtaaattatacttcatcttggtgctcctttcaagtaacataaaatttgctctaatgctgcccaatgatgaattgttggagaagacataaattgactaatgacactaactaggaatgcaatatctggacgagtcacagttagataattatactatccaactaatctgcgatatttctcaggatcttcaaatggttccccatcacgtgtnagatgcacagctggattcattggagcattaaattgattttgaatctca

SEQ ID NO: 106132 - DNA, 508 bp, Cannabis sativa
ttcgtattcggcctcgttattagaggctttaaatccgaatttgactgctgcatgcaggttttgccccacaggtgtgacaagggcaattcctgtaccggataattgatctgtttctgacccatccacgtgtagcttccaggccggtttgttttcagtattcctcggctgtggtattggctcaagaacactttctggtatgctttcaattttgcctgtgcattccaccataaagtcggctaaggcttggcctttgatagctgtttggggttggaagttgatttcgtactgccccaattctaccgcccacttgagtaaccatccagaggcatctggcttttgcagtatttgtcctagtggttggtcggtgtacacccgaacaggatgagcctgaaagtaaggtctcagctctcttgttgttagaatgaggcagtaggtgagctttttctatcaacggatattggccttcggcctcgatgagtctttgactgatgtaatagactggatgctg

SEQ ID NO: 106133 - DNA, 930 bp, Cannabis sativa
ccgccggtaatacattattttattatttttatacttattaccggcggaaacaattaataccggcggagccccaccggtaatattaaaattgctttgtctttattctggctcattactggcccaatgggcttccttattactgtgtatatatatacacttctttgtacaaaaccctacagataacatttaatttttcaatatatccttttcggctgaatataatacaagtaagagaaatgttttctctaatatagtatcagtgataaactccataaaaccctagccgcccccttcaccattaccacttccctatcttctccatttcatctcatggctccaagaaccagaaattccaccattgccgccgcctctatcagtgaagctccttccattccgctgctctctgaacgtccaccatggccaagatccttcgtcgacagccgccaccaactccgatgttgctccgcctcctcatgaagactccatctcagatccgcatggtgcttctccattcatgttcgatccggtaataatattatatatataaatggaaaaattaatgcataaattaatccgttgctagctccttttattcatttttttttctcatttccttattttttgagatttatctcataatatttttttttcttgtgttatttttattctaatggcagatttttttttttttgttattcttttattttctttgcaggttaagcatttcttggggttgtgtgtcttgcgtcgttcggttcacatctgggcatttgggttacggtgttctcttctggatgagagcgggtttagagtttcatggttgggcttggtcgggctcacagaggcaacgcatctcaccggggtggattcaatttcttcttagatttaatttttcaatatatttttctgattttggttttgatttttttt

SEQ ID NO: 106134 - DNA, 925 bp, Cannabis sativa
  modified_base (167)..(185): a, c, t, g, unknown or other
  modified_base (897)..(899): a, c, t, g, unknown or other
acttttacccttagcatcaaccgagaaacaaccaacataacccaattggattctaatatactccatccgaacactattcagccgtgtttccgataagaaaatcatcccgggatgatagtctttgacatgggatttgagggtgtttaaagtccaagggttcccaagcnnnnnnnnnnnnnnnnnnnaggctatcattgctctcggcgacttagttcccctgagttcgccgcttttaattccgttccaaagttcaaatcagaaaactccgaaatgccctttgttgcacttcctcgacctgctgcattcacattctccaccatcacctccttgctgctagtaccccctttgattttttaccttttaggaattacctttctccttttagaaggtcccttcccccttttcaacaaagcaaagctagtatcataacttatgggaatgtctattagaatcggcatatcagccatgttgttgttcattaaattctgttgagggctagaagtataattatattggtgttgtgtcaattccccaaccgaatcaataaagttttcttccctccaagaaccatctctcttcgagcttccctgtccaaaattcatcctacccatagccaacccgacaccattattctgaatttgattaggagcttccattgcagtaggagtcaaattcaatttatggtctttctcaacttccttccccttccccaaatttctagcaactttatttagagaaatagaagaactaacccgtggcatcattgtcggagatgagttgaattcgagtgaagaattaccaatagcattcaaaacatgacccgtaggctgcatcgttgatgaagtaggcctttttttaggaaatccagggggggccttgttgggttttatgccctannnaaaactctatttcaatgtaatccaga

SEQ ID NO: 106135 - DNA, 660 bp, Cannabis sativa
  modified_base (152)..(163): a, c, t, g, unknown or other
atattataagcaattaatatatctcttttgaaaaatttagctaaaaattattaaatttttaatgattgttttatcaccaagttacttatgtcgtagaaaatattatttcttttggttgactatatttgtaattacttgtccaaaggtagtannnnnnnnnnnnagttcacattccatgaagtgagtttatattaaatgtgtatattttaattatttacccaaaggtaataattaaatatacatatatgtttattattattttttggtctgaattaatatatatatatatattaagaaatttatttgcccaaaggtaataatgatatgtatttttttctttattattaactttaggaaggtagatcatgtgtgtgttatattctcaccccaaaggagagtttataatgactagttgactctacaatattttctaattgtattgctcatatagcttgatcaagttttaatttttgggttttttggtctcctttctatgaacaacaataaatgtttatatcgaaataccgaatgctccaactttaaggtatggcaaaaagatgttgttagaactattattttctgtagtgacaaattatgtccagtagcattccagttgcgtctgggactcgtagtgttttgtctggagttcgtactgttagt

SEQ ID NO: 106136 - DNA, 651 bp, Cannabis sativa
tagacctatttttttgtagtgaaaaatacattcataaggtgtgagcaacaattttatctttgatgagcttttatttaccaaaatactacttacacgtatccatttatgttagctcaaatatcaactttttttttctcgttttttttttgttttttatttttaaatttagcattcagtttcttttttattttctttcttagttttttatttcaaaaccatcttctagtcattaccctttcgaaatccacgttcaaagcccacaaaaaccacctcccacccataaatttcacaatcttcttcttccaactgcttcttttatcagttttttttttttataatttttattttgtatatataatggctattacatgtggctctgcttctccgtctccattgccaaaaagcttcaaaaatggatcataaattaattactgacaaggctaaaggaaaacacccagtcatcgacgatgatgacttcgattttgctccccccgtggctaaaggtggtcgccatctagtgaagaagaagttgaaggtgtctttgcttaaaaaaaaattcagcctccgaaaccagaaggaaagaagaagtcaacttcaagacaactgtgataaaattgtaatgcaaccgttatatctattgcgagccaacta

SEQ ID NO: 106137 - DNA, 637 bp, Cannabis sativa
  modified_base (57)..(61): a, c, t, g, unknown or other
  modified_base (241)..(243): a, c, t, g, unknown or other
aaaccctgtgcactgataaatctaggaatataaatttaatcacacaatcttgattannnnncactgtgctgacgacacaataaactagaatattaatgtgataaatgtttaggatgaatttataaatcaaataaacatataaatgataacatgaaccaaatgacacattaaataagtgatgaaagtacttctgtctctttattgatatttaaatgatatagattacattgaaatagagttnnntttagggcataaagcccaacatgtaaaactgtgaagaatccaataacctgaaggagaatcgggcttagatcttgataatactttgcagtagaatggaacaagggttagagatctgagttggaggagtcatattattctgccgcaatcaatttaaggtttttaactttatatgtgtttaaattctattgttttagaaattcatatttgggatgttaatcaacgtacttgttagtaaatctagatcatggaaaaatatattccaacaccggaaagagtacttacttcccaggttgacaaatgccctggtgcgttgggttctgcttatccaattctaattctgtttcaatcgtttgtgtaacaccctaactaaaataggcgtattacgtgattttta

SEQ ID NO: 106138 - DNA, 582 bp, Cannabis sativa
taataagtgttagttccgccactgccaactgttaatatatttataacttttacagaaaataaaaaataataatataataatattattatataatatgcaaaagcaaaaattctatacaatttattttctttaacctttgattggcttaatttatgtccctatatcatgaggtaaagatactaagccccagagtaaatttaccctatatataaatatttgtcttatatattgtttctattacaattgaataatgtttctttcggtttgagtgcctcttatttttttttctcggttattatctgattgatcaatgcttataaactttaacatattttggattgaataaatatataaaaaataattttttttattgatatatgtctattcagtggagttatttatatatttattgagcaggattcaatttttaaagaattaaataatatatggtaaactgttaattatttttcttttaagttgacatccagtggcggaacctagagaaaaatatatattatatttttttaagtaaaaatatatatatattatatattaattatatacattgaaacttattttcat

SEQ ID NO: 106139 - DNA, 617 bp, Cannabis sativa
aaaattacaaaagagaaccaagcttaaaacttcaaaaacaacaaggaataaagtatctagggcttacctttgatcttggcttaaggtttctcctcaaatcctagctaaaaatgacttgaatgtggaagctcgtgaattgagttattttgacatgatcaatcatatgcaataaattgtcaaataattttactaaaattttttgaagaaccagaagattgttctcactattaattaataaggctttaaagaagaatgtgcatatattttgcacatagaaaaagtgaaactatattttcatatttttaattttaaaaaaaaatatatgtagtatttcatttagtttctcttttatatttgtttataagataaaattatatttttattgatacttagttttctaatatactttatttatttatctagaaaataaatatatattaaattattttgaagaaaatatttaaattatatttctttaacaatcttgagtcattgttagatttttattgcatagtttcttatcgatgtgataagatcatataattatgcatttgcaaaatttataaatttatatatttttaattatacaagtatgactcattcttagaaatgaatta

SEQ ID NO: 106140 - DNA, 694 bp, Cannabis sativa
  modified_base (309)..(309): a, c, t, g, unknown or other
tttttgttgtattgatacctagagacaatactattcggatcgttataggtgggatatgatataactctctataaggatacaaagtatgaatcaagttggcagatctctaatgagagagatgaacaaccttagagacgtgtaagagatgaagtgagaagagagagagagagccctattgggcgtgagccagagggacaaagaatagagaatattgctttcagacttagagctatttggaggctaagtgacttaggtttctaggctagggttaaggcctttatataggaggcctaaaccctagaatacaantttaaatcctagatatttacatagtttgttagataattgcaaaagactaaagtgcccttgaatctagatattattcagccaatatgttcgacatttagggcccaatttccagtctatgccttgtgtccatgttttaggctatacatagagtcctgctagatcaatcttggcctcacatatacctacagcgaagtctggccagccatggtcctaccaggacctggcaggacaaggcctgcaggatctagcaggtcactatagctccaccaagagaaggccaacctttgattgtggaggctagccttttgcaagttgagcacaacttcgtacaccatttccttgtagagaccaggttcccttagtcgaagagatgcctccttggttc

SEQ ID NO: 106141 - DNA, 549 bp, Cannabis sativa
atctctgtaatatgtaaattcttattattaataaagttaaagtctattcaagtaattacaaagttttctttaaaattacttgaggggcatacatgtatatgttaactggaattcatctagaagtacatattatattgcaaacccgtttttaattttttccacaaaaaaaggataattgattaaaattgtttatggacaatataaagtcaaaaaattaaaaaaccttttctgcagattggaaaatcaaagtagcagttgtaaatgtgatcaactcataaaacaacacaaagctacatgcgaagctgaatatttaacggctcacattattcaagcatgtattataaacgaggcacaaaaatgctaggaaaaataatacttaacctaaaatatgaatagaagacctaactattcatatgagtaatcgaaaaaatacaaaatagttcttggagtgaattattcaaagtatttttttaagtttgctctaaatataaatatgttatatgtgacagattaaaactgcttattcaatgtttggtagattataaacta

SEQ ID NO: 106142 - DNA, 3992 bp, Cannabis sativa
  modified_base (266)..(272): a, c, t, g, unknown or other
ttttaaacagttttttttcaatcaatattttggatttcgatcatccccggactcaaatccccccacgccctggcgctgaaccaggcctctgacttgaacccgaattcgaccccaaaactagacccgacgtaaataaaataaaaaaaaatgaaaataaaaataaactttacagaacacacttttgttttctattattaaaattgaaaaataaaagtggttacaaaacgcatttttgtttttcaaaaacaaaattttactttcatttnnnnnnnaaaaaattagaaaacaaaaattttaccaaacggcacctaaattaaacatatataatataacaacttgttcatcaaatcaactattgaagaaaagaagcattaatcaatccaaccaacaaacgacttgttcatcaaataaaacttcatcttcatgttcatgaataatgataaaagtgaaaactaaaatatttcaaaatacatccatatccatagtaaaaggtaaagggaagtttacggttttttagtttttagtttttattttttaattaatatataatatgtaataaaaaataaaaaaatatataatatatgaaatatgcgggttggcgggcgggttcgagttcaacctgaaactcggtgatcctaaaaacataactcgcgaacccacctgaagggtaccgggttgaacccgacccggccgaatatttttttaaaaaaacatttgcaggttgatcgggtcgggtccaggcgggttgcccgggtccgggtcaaactctctcaaaatggtcagtcctaatggatatgatctaattaagggtaatacaattaaaagacaagttcaggatataccaggacggggagtataggaaattattaggatacgattcatacaaagcgacagagccttttcatcctaatatattgaaatcccacttccctcaaggatttaaaaacttgcatgtcgcacagtatgacaagacaactgatcttgtggcacacctagacaattttaacacaataatgcgagcaagcaatgttttaaaaaacttgtgttgcattctgtttccaacttctctaacgagagcagcaagcagtaggtttgataaattcaccaactattccataacctcctgggaacagtatccaaggattttaagaagcagtttcaggttgcaagagacaagaggtcggaagcatcctcactgaataacatcaagcaacagttgggagaatgcctaaaagcttacttgagttgctttagtataacagcagccaaagtgaggaatctgcatgataacatttagttgacagctcttcaagctggaataacaactgacttattaactacggtaggagaactatgggatgatttataggatcgccctattagaaataataatgaatttgatgaaagagcacaaatcttcatgtgtaaggaagaggcactaagcgagataaaattgctcaaatctggctcgggtgacaaacccaacacaagtactgcaataacgactgctgtaacaaccaaagcaaggaattcgaaccacaatgtctcgaatggaaagaggaaagccgagtcaagagattcgtcaaaagataagaaaaatcaaaagaagcacgtgaaatatattcttatatactcagtatacacggaattaagtgaaactcgtgagaacatttatctcgtaaatgaaaattgggtcgcattctgatgacccaaacctatgagaaatgctataaataagtgagatcccaataaatattgccatttccatcaagatatcggacataccactgagaaatgtccccatttaaaagatgaaatagaaaatcttatttctcgtggatatttgagatagtatataagaaattgagaaaatgaacaaaattttcccaataaccagaacaacaaccaaggaatacaacctttcttaattaagagtgaggacatcttaattatttatggaggaccacacctcatagaaaataacaatactgatcaaaggagatatataaatgaagtgaaaaatcaagaatctgcctttgctccagaaataaagcgagccaagcctaaagaactgcccattatttttattaatgaagatgcttcacatgttcggtttccacataagaatcccctagtgattatggtttagctcgcgaataagagagtaaaaagagttctcattgataacagaagttatgttaatattctctacaaggaaacattaaagaaaatgggtttcgaagagtcaaaattaaaaccatgcatggttaacctgtgttgattcacgggtgatagtgttgcaagtttagacacaatcgaactcccactcactatgggagagccgccactatcgacgacccaaatgcaagagtttttagttgttgacatgcctttggtatataacatactcatgggcagccctgcgttgacattagtggggaaaataagcccaatcaaacacttgttcctaaagttccccactcattctggagaagggacggtgagaggtgaccatctattggctagacaatgctatggcattgagttcaagaatcgaagggcgaaccatcaattaatggtgattttaatagaggaaagtgaggaaaatgagatggaggacttggatcctatgatccatgacgaatacaaccaactcaagccaattgaagaattagaagaggtgaaaatttagacccaaatgacccaaccaagtgtattaacattacaaaaggtttgggggaagaattaaaatagcaattaatcacatttttgaaggcaaaccaagattagtttgcttggagccattcagatatggtcgagattgacccgaatgtgatatgccatcacctcaacattgatccttcttatcccttaaagtgtcaaaaatgacgaccattagatctcgagagacaaaatgctttaaaagaagaggttgacaaactgttaaccaataacttcataagataagcgttttatccctcgtggatatctaatccagttcttgttcccaaaccaaatgggacatggagaacttgaatagacttctctggcttaaacaaggcttgtctaaaagactgctttccattacctcagattgaccaattggtagatgtgacaacagggcacaagctgatgaccttcatggatgcatactctggatataactagataaaaatgcacatttcagattaggaacttcatcaataatctgacgctttattgttacaaggtcatgccattcgaactaaaaaactttggagcagcataccaacgccttgtgaatggaatgactatgtttgaaaaccagataggtcagaatatggaagtatatgtggacgacatgttggtgaagtctgttaaaagtgaagaccatgcaaaagatctcgcagaatgcttcgccatactaagaaaatataatatgaagctaaaccctaaaacatgttcatttggggtatcctcgagaaaattcctgggctttattatcaatacatgaggaattaaagctaaccctgagaaaataaaagcactgcttgaaatgccttcgccaagtaaaccaaaagaggggcaatccttgacggggagaatgacagcactgagtagattcatttcaaagtcgactgataaatggctcccatttttcaacattacgaggcaatacaaaatttgaatgaaatgaagagtgcgagcaggcttttcaagaaataaagaagcatctctccacaccaccagtgtttgttgaactaatcactagagagacgttatacatttacttagccatctcagaaaattctattagtgctctattggtgcgagaagagggtagaaaccaacaaccaatttacttaatagcaaaaggttattggggcagaacctagataccctccactcaaaaaactcacatttagtctggtacatgcattcgaaaaattaatagaataactataattatgattaactgtatgttcagaatttgatagaatttatacattaaa

SEQ ID NO: 106143 - DNA, 663 bp, Cannabis sativa
ggggagggctagttatcctgaagatcgaacccagaatggacataatagtcattcgagaattcccttctagacttgactatcattccacaagactctttccaaaactggcaaccgcgagtgaaaacttttcagaaatagtgtttgtagagacttatttagagaaactataccacaaatacgtatatatatttgtagctagaatgtatatatgttccactcctagtgtatacatataaatataagtataaatattatatatttataattgtaagagatgattaatgagcaagatgagagagcttatagtactcaataaactgctaaccgaaatgaagaactaacgaattgtaaataatacaaaatagtatataaaaaactgttgtaactttattggtacaagttgaagatgcatagcatattggtctttgaataccacacatgaccaggaacaagagcccaacaatatttcttcccaattattgcttgtaatttacatatatgctattcatttaatctacaaagtttttgttttgtattttcttggggataaactagccgaaagggaaaagtagagctcaaactttgattagatatttcttgaaagccaagcaaaactcatcataacaccaagttttatgtttttgtcttcttaatatatatact

SEQ ID NO: 106144 - DNA, 582 bp, Cannabis sativa
tcagaacttgaatctagtctcggacgaagacttgaacctcgattgggtcttggactcagaccgagacctaggactcagacctagacccgggacacgggcatcagaactgggactaagaccgaggatatgaacttggacccagaccttgacctaggacccagaccgagacttgggaccccaagtggaactagactaggactcgagactgtgatccaaatctagacccagggcttggacctgacccgtagtcagtgtttagatccaggacgcatatccggactcaaacccagacctggagtcggaccaagaccctggcccagacccaaacccgtaccccagacccgtaccccagaccagggttcgagtctgagtttgggcttgaatccgggaacaagaatctgactaggaccaagacccggatcgggactcgcacccggatcaggacgcagatctgaatcaaaactcagatcaggactcgggactcgaacagagacacggacttggacctagacccaaacccaggacccgaactgagatgggagactcagacctgcacctaggacccagacctagattggggac

SEQ ID NO: 106145 - DNA, 2531 bp, Cannabis sativa
taattttaatttttaaaatatttttgtcaggtggttttttaaaaaaaaattatttttcttctaaaattaatagaatattataatttttaaagttactttttcaacaaaacggagcaaaattttatattagtcaaagtttagggggtaaaaatgttaatttttaacggtaaagataacagaacctaacagaaggagcataattatgtaactattatattttaggaagaatttttaacaagtcgtatattttatgaggcaaaattaggtaatatgccgaaaaagttttcaaaggaaaaatactaattattcttaaaataatgagaaatattttattaaatctattgtactcaattctgcaataagactagttgtattcatagcacttctaatgtaaacaactgtaaagaatccaatctaattgttgcaatgtggcacaatcgattagcacatccttcatttgcaattcttagcaaagtcttacaaacaatgaataaaaagttttccaaatttgctttatctttttgtgatgcttgtcaatatggtaaaaattatcttatgcattttagtagttcatccctcaaaactactcaaccattctaacttatccactcagatctttggggtccttccccatattctacacatgaaggttacaggtgttatatcttgtttgtagatgacttcaccaaatacacttggatctatcccttaaagaccaaaatagaagccttccccacatttctcacctataaaacctttgtggaaaagcaattgaacaataagattaagggcctgcaaaacagactagggggagagtacagaaaactagaacctattttacataaattgagcattctctttagacacccttgtccacacactcaccaacaacaaggaagagttgaaaggaaacataggcatgtcactgaaatagggttagccatgttggctcaagccaagatgccattaaatttttggtgggattcctttgtctctattgtgtatctcatcaatatagacttcccaccttagtcaatgcatacaaatcaccatttaagagtctctataattccatactagcctataattttttgaaaacctttggatgtgcatgttttccttttctcaagccctacaatcaacacaagtttacatttataacatctaagtgtgtcttcattggatatagtctatttcacaaagattataggtgtcttcactcctcaagaagaatctatattgctagaagtgtcaatctcaatgagcatgagtttctatattctaccttgtttccctccaagaccattatttccacttacaaaaactaccttgctcttgcataagtcattcctttcataccagatcatgctcgtctgccaaatattcaatttagttcattaattatcaaatagcatagcagattctacacccaatattccacatgtctcatcctcttcttccaactgagaatcatccttcttagtctcccattgccaactcagcttccaatccttctttctcatctagtgacaccatattgcctgctgttgacatacatgtttctcctccacctttgcctcaaggccaccctatgcaaactagatctaaatttggtatctataagcctaagctatatcttgttacaacttccaaacaaaaactctatgaagaaccaaaaacaatgaaacatgccttaagttttcctcattggaagaaagtaatggatactgaaagtgtagcattaaagaggaaaaagacatggatagtagttccttccacaccagaaatgaatatattgtcaaataaatgggtgtataggacaaagtacaacaaagatggatctcttaataagtttaaagcaaggttagtagtgagggattttgaacaagcaccaggtttggatttcacaacaacttttagtcttgtcataaaggctactacaatcatgctggtgtttactctagcagtcacatatgattgggacatccaacaaattgatgtcaataatgcatttctaaatagtgagttacaagaaaaggtgtttatgcaacaacctcaaggatttgaagaccctgaaaaatcagattatgtgtgccagttaaacaaatcactctatggcctaaattaagctcctcgagcctggtttgacactctcaagtctactcttattaattagggtttcaaagcttctgtctcagatgcttctctattttttcaatatcagcaggggggtatcttttattagttctagtctatgtagataatcttttgataacaggtggtgacacagcagcaatttcaagactgattgaagctctaaataaaaagtttgctctcaaatcacttggatcaatcagttacgttttgggatttaaagcttacacgacttcctttggtttgtacttaacacaatctaagtatgctgctgatttattagacataactaattatgaagatgcaaaagaatgttctgctcccatgattctggccaataaattagatacaaggacaattcaccttttgaaaaacca

SEQ ID NO: 106146 - DNA, 1363 bp, Cannabis sativa
  modified_base (1025)..(1028): a, c, t, g, unknown or other
tcagaaatagtttcagtaaaacaaccataactccctcagttttaatctatttttaatgatctttatatcattggaaagataatggaatttcctataatttgtatgaacacaacttttattgaattagtgtagttattagtcaaaaatagtgatctttctgttgtactgtaagagtacgaattttaatattagggcgttgacccatgtcttattataggtagtagtgatgaggtaacaagtcttaagcaatgggatttgaggtaagaaaattggatagttttatatgtttttatcttcataaatttaaattctttatgtattggaatatcatttatgatttgttattatgaatatgtatatggtactgagaatgtgtggtatggacacaacatgagtttgtgaattgatatataaattagggttgttttgacttgtatatgttgtatgttgtattcatatattgtatgttgtatgttaacgtctcaggtaaagtgagagatcatggtagggtatgatacggggtaaggtcgttgaatgtagagataccctaccctgcatttttttgagtcgtgtatgaaattgttatggtggtgtatgatacgtgataaggtcgttgaatgtaaagataccctaccctacatttgtccgatttttatatgagattgttatggtaaggtatgatacaacgacagtgttgttgaatgtagagataccttattccatagcaatggtagggctaaatgtgcccaggttattgtagggccagttaggcccaggttgtgtatgtagtggctatgataccccacattatggtaaagacatgatatgattgaaataattattatatgttattgctatgagtatgatgtcacggttgtgatccctacatatatgtaatggtttcgtttagtacaaatatatggtaaataatataactttccatatttggggttatttaaattacaattatgagctaaggtatataatattgttaaggctggatacgttaatgttataaagaatcnnnntattgtgaattttaagatatgtttagtgtattgaatgatattgtatattaagcatttctttactgggctttgagctcacccccttactttccccctacagacaatggacagggaacattgaatgtaagtttgatgagctgggttagttctgatatgtatactgggaggggctatggatgagcaaacggtctagaatgccagtggagccttggttttatttttttatagtaacgtaatctaagcttagtgggatgttacaaatttatttaaaaaaaaaaaatgcactcaactacttattttgtttttaatatgaatgatcattcacctttttgcat

SEQ ID NO: 106147 - DNA, 539 bp, Cannabis sativa
ttaaacggactagctagtgtgacgtctcgggaaatcggggcgttacattctcactgccccgactcccacgcgtcgacgcgtggcagcacgtggcactgttccaggccaacgattttcttcttgttgttctcctcgacctcccctgtggtttcgttgtccatttcaattaaatatgtgttatatgcttcgctgatttgtgcatgtgaagtttggtggaacgaacatatttgtaatggcttctggtagaccagttcttgtttctgcagatgaatatgccaaattcttatagtatcacgtggattattgattattgattattgattctggtgctacagaccttatgacaggtaattatagcttcttttctaatcttcaaccccacgcttccacttctacaattacgttagtcgatgggtcaccatctcgtgttcttgggtatggtagaattactcatagtccaatgcttcctttgtcgttcgtcttacatttacctaatctttcttttaatttgatctctgttagtcaacttactcgtgatc

SEQ ID NO: 106148 - DNA, 1999 bp, Cannabis sativa
  modified_base (335)..(340): a, c, t, g, unknown or other
gagtctctactctctttctctcttctaatgttttgtgactgtgtgcaattgttcgaatgtcccttatggaattctggtatgagtattgatctaacctggtagtttccaacagtatgggactacacagttgaagagagcgtaaacggattgattggtactacctatatcaacaaggtgaatcttgttttcggtagcccatctcaaaagaactccacagttaaacgtgcttgacctagggcaattttaggatgggtgacctcctgggaaacttcccaggaagcgtgtgagtgaggacaaaacatgctagaaaaactcgtgttggtctgtagggtcannnnnnagtccatgaagcagccaaagtgatgtacccgtgtataagagccattagtccatgggtgtaagggctcaattgaggcttgaagcggggacgttacaatccatattttgttgtgttttaaaaatgtaaccgtattttgtaatatgctgtaaaagattataaataaggggactcccgaaactagtgatattttgaattaaaacttaagttgtgatttaaataattttattaatttttttaattaaacctcaattttcttaaaccgttggttaagtaataaaagtacacacgtggtgtccttacatgttaggatgttagagtaagactaggaacaatcactactcaatgacaaaaacttatcatatgaccaaggtggatgatcattgtaatttggccacatgtcaagactactaactatctagataacattaactaactgtcatttatatacagttagtactcgagctgaaccaaagattatttatagccaagccttagagtactctttttttttggaacacaatcctaggatctggtgagagaaattgagagagttgtttagagagaaaagaatatagataagaaggggtgttaatgacatggtgtgtgtctaatcaccattgtcacaagtgagttcatgttgcaaagaagctttgcttttcaagtttcttgtcactactacatatttgggcttttgaagtaatttttaaagtttttcaacatcagttttaacaaaatttactattgacgttaagcaacgctatagggttaaacataactgacaccatagtgtacactatgtcgttaattattattaaataatcgacactatatgtacactatgacatcgattatatacttgtaaccgacgacaaatgcttaaaaattgatgccatagtattaaaaattaatttatttttccaaaacttattataatttcataaatttaatttaattaaattaaatatttattaatttaaaataaatattatatatattaaattaaatatttatttttttgaaagctaaattaaatattatttaattagtttcatgactagccaatatacttaaattaattttatagaaacaattaaaaatattacaattatattacacaaatattttaaatttagtccaagtgttaacaagttaatatatctaattaaacatataaaaattataagtaacctaaaaaaataaactaaaaaagaaaaattcttatatatttcagcatcaatcgcctaagcctttgtgaatcaccaccagtaattattttatccaatgtcgccgtaatggtaacagttcggtttttgcatcgttttcccaaactgtaaagtaaatatttatattagtatatatattattgtttgttaatataatataaataagataactaataattaaaacttacaacttttggatcatttaaataacggttaaaatttgcacgtgcgatgatgtcactcatgtatttcaatacataaaaactacatttttaatttttaggctgtattggacaatatactagtgaaatttctcgccacaccctagaaaatgcatttgatacccctataatcttgtatgctctgttttaaaattatattaatattttagttcattaacatatatatatatatatgggtgtactcttaatgggta

SEQ ID NO: 106149 - DNA, 687 bp, Cannabis sativa
ttttgcagttaaaattctgcatagcccacgagtcaatctaattcgattttgatacaatataaggcctttttcttatgaatttttcatcccttttttagtgtaacatgcctctatttataattacacagttggctgatatctttacaacaattatcccctaaaatcgtggggtttgattacatgccacataaaataaatgcggttaatatttaaaaatcacacagctatgataggtctgcttttaccgagtcaagataatcgtgtattaaacacgttataaatcataacgttctgggatgtctcggtaggaactcagtatcaataaccttgatagcgcgctagagcttttcctatatctttctgagattgataatgtacacctcgtcgcttctgcgcttgaagatataacgctttattttgacaatcgcagttcttagtgacaaggggtacttcagcagttaacataatttaaatgtcagcttctgttcgagagagctgactcgtcaagactataaatctcattgaaggatgtctaaagttgattagtgaaagtaccagaagcatgccttcctatagcaagatggacgtctcgttatctgtcacttaggttcttcaagctgttgtacttacttagtataatgtatatcttctttatatattaaaagtgtctatctaacgacaattctt

SEQ ID NO: 106150 - DNA, 805 bp, Cannabis sativa
atccatgttgtcaacagaaacttgttggtgaaaatcatcttcatctgacaaggaagaagttgagtttgttggtggatttgctctgcatcttttcagagtttgccttagtgaaagattctcattttgcctcttggattgcacattaggattagtattttcctgaccaatagaaaaaccagccgctatggtggatgtatgcgtgactaatgccgaggaagatggaattggattgtgtatttggttagaggcattaatgacaggaactgatatagtggtaggggataagtggcaaaaaaattgttattattgaaaatggaagccattggattaaatatttaaaaccaccacactaggctatattacctagttataaatactttcaattttaaaaaaaaaaatactttcaatttcataaatgaaaaaataaaaaaataaattaatagaaataacttacattatttgagcgaacgacgtcgtttaatcgccgacacgcgttttgaagcaagcaaataatagagtgtgggccacatattccatttcagatcagattccattttactcaaaaaaaaaaaaaatcacattccatttaaaacttaaaaacaaaatcaaaattaatttttttttaaaaaaaaaaatagataaataattggaatcctaattcagtttggttttatctataaaacaatataaataatgggttgatcaaaacacaactaccccaaagggtggcaatcttttctgaattggaatcttcaatttgattgatcaaaaaagccttcaatcttttcgtcttctctggttctcc

SEQ ID NO: 106151 - DNA, 509 bp, Cannabis sativa
  modified_base (480)..(483): a, c, t, g, unknown or other
tccaaagcgtcgggatattaattttcaaatcggggacaaggtgtttctccgaatatcactgatgaaaggcattaaacgctttggtaagaaaggaagacttaacccaaggttcattggaccttttgaaatccttgagaggatagggcaagtagcgtataggttggctatgcccccagcactggcagttgtacatgatgtcttccatgtttcaatgcttcagaagtatgtctcaaactcttcccatattttgagttatgaagcattgaaacttcagctagacttatcatatgaggaacaaccagtgcaaatactcgatggaaaagaggaagtattgtggaggaacagtaaagtggtagaggcaacctcggaactcgagacgatatggaacagaaatatccggagttgtttcggtaaatttcgggacgaaatttctataaggagggggtaattgtaaaaccctagaattaagaaatggattannnnaaccctaattagataattatgaataa

SEQ ID NO: 106152 - DNA, 915 bp, Cannabis sativa
aaggattgcggcaataatttagagggagtctaaacttgtttaagtcaattatctttgtaattgttgatactttattaattgattttattctttaggccacgtggactaggagcgttcgaaagaacactgataccacgtacaaatctcttgtgtcaagttatttaattttatgcaaatatttttatattctgcctattctgttttgtcgttgcaaaactgatttttgcagtaacagaattacattctgcttttgcagacgtatacagttttatattttcatataaattattgacatttgcaaaaattcggtttttcaaaggatataaattatgttttaattgacattaacttttctttgttttcttaataatcaaattcaatttttctcattctatctcaaaatattcattcactcgaaaaaactactaatgatatagaattccaatatgtaaggtctatgattcattttcataaaggaaaatgtagtaaagcattactactgaactggttttgagctattttcgtggtgtatgaactcgaatgaaatcatggagagatgctcattgagttgccacattagatggtgaatctgctgctgcagatcaatcaatatttaagtctaagaatattttcatttaggaaagtctttatgctgtaaaaatgtgtacaagttgtcttaatggtttctgtaatgtataaatagaacctagacataagcttattccttcatctcttctagtattttatttttatacattaattttgttagaaaaatatcttttataaaaacctagagtgttcaggtaggttttgatttgtttgttgttgaccaaggttttcggcaaccaattaaataatagaatgagaagagctgtagaaagtttaatgcaagtgatttttacgtggttggggcat

SEQ ID NO: 106153 - DNA, 633 bp, Cannabis sativa
ttcaattaagtaaatatctaatttaaaaagtaattatagatattttaaggttattaagatattatctcaaatggttgagagatttcttcataaatatcaataaacagaattcgattatagatatttatttatttaaacaattaaatataatttaattaaatagatttaactactataaatagaagcctgatttgagaaattagaacagacttctcactcccagaacattgctatctttgaaatacgtagagagaaaaagaaagttatttttctctcaattgttcttgctcatgtgttgagaactcaataagaacaaaacttatacactttatccaaatagtccgcactattctttttgtgtggtggatcgatttagaagatatttgtgtgagtccaattatcaaccttatcatatggattaaaggatacaacatacgagaagttttgaggataccctaatagtcatcaagaggtatattcttatttttatatttttatgttttaatttaatatacacatatctgtagatctattgggatatgatacaatgataatcagataatataaaattcttccactgcatacctaatttagtactataaaaccaacaattggtattaagagcagttccat

SEQ ID NO: 106154 - DNA, 664 bp, Cannabis sativa
  modified_base (614)..(614): a, c, t, g, unknown or other
cttttgttattttcaataaattagtttattgtttttattataaatagttttaaacggtctagtaaatgtgacgtctcaggaaattagggcgttacaatatggtatcagagcaatacggtcctaaagagtgtggttagccctaacatgtaaagttcattaccacgagacgagctcgactcactgtactgtaagtggttattacttacgattaagttgcctttaaattgtgcttgtagtgtagtgatattcttctcatctaaaggtgatggtcaaaatgttccttcttgatatttttaggtttgtgtggtttaggagtttgaatatgcctcctaaaaggtcagtcagattgggtcgaggtcggggtcgaggccaaggccaacgccgagatagaggataagagaatggagggatcaatgaaccaccacaagcaccatagggatgggaagagctgcactggaagaaactattcgtaggcagaatgaagaacttcgtcaggtgagaaatcaaccggagccgccagagccagaaaatagagacccaccagctgcgttggtatatcctactgcagaggctagacatgagatgttagcagagaggtttcgaaaacaacaccnacccgagtttgagggaggcatagacccagtggtggctgaagagtggatga

SEQ ID NO: 106155 - DNA, 738 bp, Cannabis sativa
  modified_base (35)..(67): a, c, t, g, unknown or other
  modified_base (144)..(158): a, c, t, g, unknown or other
  modified_base (347)..(350): a, c, t, g, unknown or other
caaaaattattatcaactaaaataataataataannnnnnnnnnnnnnnnnnnnnnnnnnnnnnnnntaataataataataataagaaattctacaacacacctttttaaaatagatacatcatgtacgttatagttatttaannnnnnnnnnnnnnntttaagaaatttagaaaagtttaagacgctgaaaactacgttcaaacagtgtatgtcacgcgtgactattttattttatacgattgtaaaatagactgtttgaacattgttttctgtattgtaaattattcataatttctcaaaattttgtaggttatcttaaatagttataacgtacatgaatatgannnnaaattagactaaaaaaattttctcgaggccgaaacaaattaagggtgtatcagtacatccattttaaggggtgcattgtagaatcacctactaataataataataataaacattctcattcacagcaaataaatggatcacactagcaacaaaataagttcaaaccatgaaaacatcatataaactgtaaaaaggcaagacccactgtacgaaaacataattacactcttaaggttatttttgtaaattaaatgcaaaattaggtgccacatgtaaatttttcatatatttatgggttgaaatgcaaaatgaccataaatttggaaactaagttagtaaatgtccactttttaaaaaaattaagaaaatagccaaatctaataaatta

SEQ ID NO: 106156 - DNA, 1056 bp, Cannabis sativa
  modified_base (989)..(1010): a, c, t, g, unknown or other
caactccaaatcctcacaggtattgaaatatttgaaaagaggaagggttgtcactcttggagttggaaatgtatattaattgacgctcgaatggataaaaaattttatgacgacaatgtaaacaattattgacccatagataggctaaccaaaaatattttaaaattcaaatgacaagttaactttcgaaatttcattacagtacctagagccaaaataaagaaataaacaacgattttttttttatttggtgattaatatttatgaaaaataaactatagcaaagtttcttttgattgatgattttttatatatattatatatgcatttatatttttatcgatatatatatattttactttgctaaatgattaaaactaagatattgcttgttatatgatatatatgtatttttttaagggcaatatccacaataaataattaccgtagcaaaattttctttggtatattttgattttttttttaccaagctacgctgatagagaaatgttgctcttgttttttgtttttttttttgtttttttttttgtttttttgtatatagtatgtaagatattgctctttatatgatatatatgtattttttttaagggcaatatccacaatatatatttatacttttttttaacaagaggcaacatgtgtgataaaaaaaaattacaattaggctcaattctaaattaagtatccctctagtaattttcatatttttaaattttaaaaattttgattttaccaatttagaagatcaatatatgttcaaaaagtcattttttcaattctcacttctcacaaaaaatgaaagcttttaacttaagatttttctcaattaaatatgttaaaaacaattaaatcatatatttagtttgtgcaatttttactggaattactatctaagtaactaaatatagtataaactagtctaacacaatatttatttagggaaggctgtgaagaatccagtttcnnnnnnnnnnnnnnnnnnnnnngatcttggtgatactctgctacaggaaggatacaagggttagagat

SEQ ID NO: 106157 - DNA, 2238 bp, Cannabis sativa
atatatatacacacaatacatttttcattcataatatatatacacacaatacatattcaatacaatataatacatatttaataatatagaaaaaccctaaaaaaagttataaaaaaaataaagcaatgtaaattactaaaattagtagaaattagatttataccttaatagacgttgatatacaatattttctccactaaaaacggtggccggaggtataaccaccacaatcctacctctaccttcggtttaccctaaaaaatgagaaaaaaatgtgatcttttcaggtatatagttttaggtatgaaaaatagaagatttagaaacaaaaaatgagctgaaatggtagaaaatggtgaaatgggggtgattttccatggtggttggcgtagacggtttggaatttctctgatttggagatttctgggttggctaatcgattgaggaagacgaaaggatgggctagggttataaacccttttggcatcggttattttcaaataaccgacgccaaaagtggcgtcaaatttctttctaaaaaatttcaaccctatgacgtcggttattaattattatgctgaaaaaaatgtctctaaaggcatgttttgtagtaatgaatgttgctcaatacaattttccaatcctaactctctctctctctccatttctcactctaacttctctatctctctactatgtattgtgtctctttactttttcttcttgttattctcttatgaaatgagatgagtagtcttttttatataggctaatagacccaatatgtaagctgtcatatttgacagttaaattagttaaagactaattaactaattgaatgattgttgagggtttaaactttaaagaataataccacatatatattttaaacatcaaatatattatttatattaaccttaagctatatatatttttcacatttaatattttaatctatattatactattaattaagtactgaatttcgatgccctatgcccatttttcaagtaggcaaagaagcaatgagagcacggaactgagccaccacaatcaaagaagccaaccttcaaggggggaagggtctcttagtcgaagccctcgacacacaaacagtagtgccattaacactccaaacgagaagatgctaaggaaacacgaaaaggcatggctatatagctagagttcttttagagagatctgcttcggttgcacataattttttttttagtttttatatcatttttatgtgttcagggttacacaaaacacgttataccatgtccactgttagcatttgcactgttcggtataatttattattagaacgtgctaataataaagttgaatatctttttgtaccaatcaagataaactctcttccatatatagactcatgtcatataagcaatgaatatttgaaaagttgtaagctgataaggtttactcaattattttcaaccgaagttgaatctacctcgacgtattttggactgtatctcagtttgttttgaacacccaagattattatattattgttatttataagggtcaacaaatatgaactaaaactatctagctacactagctatacttgataagtatgaaagagaacccactaaaatcaccttaaacaaatatatacatagtttccatgtgatttcatgtacataaatgagaaaatggaggttcattactcatcttaaggcaaaacattgtagagattacataattattattttgattccacgtgtcacttcatactgcgcaaaaggtgggagggacccattttgataagaaagcccattaaactgtgtagaggaggtgagtggagtatccatatggttggaaatctttatctctaatgaataaaatattaaaaaataaataaacaaaacactcaaagattttgttgaaacaaaagaaataaaataatggcatattattctttaaaaaataagcataataaaggaaactcagtgttttctccatactatatatacaatctctcttagttcaaacttaattcaatcttaagtcaagcaagcaataacctttctatttcttccaaaacactccactgagacatttcaacaaacatctatggctgaatccacatcctcgccagctcaactcgtccaaaatctcgtcggagacttctactcaagaaggctactcctaattcacaacccgctcaatccttctccggcaacggcgggggctgcggcggctcctcct

SEQ ID NO: 106158 - DNA, 659 bp, Cannabis sativa
ttattaaagtcttaagtctttataatttataatttataattttttatttttaattattaattatgtttttatattttatttgacaggaaaatactatttagtagatgcgggataccgacaaattataagttttttaggaccatataaaggccaaagataccatcttccacaatttcaacgaggtagcaaacctactagttataaagaggtattcaaccaggcacattcttctctttgaagtgttattgaaagaacttttagagtatggaaaaaaagatggaaaatattaagagatatgcctagttatctgtagtaatttgtgaatgatacttctaatctgatattattgatgaaaatgtggcctttatataggttgattacatagtataattaggcaacaatcaaggaaattaggaaaaaatacaacctaaactaagctgtcaaatacacccttaatatagctgtacaaataactctagctatttacaaatatatttctacgctccccctcaagctgagttgtatatgttatacaaactcagcttggatttgaattcttcaaaacttgttcttggtagggcctttgttagaatgtcaacgatttgtttcttcgtagggatgtagttgagttcaaagatctttgaattcaccttttccga

SEQ ID NO: 106159 - DNA, 711 bp, Cannabis sativa
tataatttagaataaaattattaagtttacataaataaatttataaaatatatttatatattttattaagatgtaattattcttatatagagatatacttttgataagtacatatttgtcttataaatatgattaatttatgtattaatatttttaaattgattctttaaattattgattagtgtgattttaattgttttggatattttaaagactaatcttgcatttagaatttggagggatgttagcatattttggtagaaaatactagaagtcagtgagcttggttttacaaggtggaacttaattgtaaattttaacaaccttagaagcaaaattggacttggagctcaacttgaaagttgtagatctcgttcttagttttccggaacatcttgaatcgtccaattctaagttgtattgaagaagttatgacaaattaagtcaaccgcgcgtgctgggcgctatagcgcaggttctaggcgctatagcgcaggcatggaaaaaaagataatttcagcatgttggttattcgaaaatatctcatgggtgctatagcgctgtacttattcttttttttttttttatgaaaaaaaatcctaattctaaggggattcatctatcttttcaagcactataaatatgaccttagagctaccaaattaagataaaaacttagagagagagagagagagagagagagaagatcgg

SEQ ID NO: 106160 - DNA, 1258 bp, Cannabis sativa
gtaaaatatttccaacaccaagttgatctaataattcatcaatccttacaagaggatacttatttttaattgtcatctgattcaactttctatagtcgacacaaagtcgcaaagttccatcatctttcttggcaaacaaagctggagttccccatggagaagtactatatctaatgtaacccttatcatttaactccccaaatttttttctcaattcaaccaactcggcatgtgtcatgcggtaaagagcaatagcaactggttgagctctaggaatcaaatcaatgcaaaacttgatctccctattacgtggtaaccctggtaaatcttctggaaacatattcaaaaaaccactaaccagtgatatctaagggaactggtctaaatctctagacccatcctcgattgtaaacaaatttccatgcactctaaatttctcttcccacccaagcatgcccttaagatgggattttttctcactgcactcatgttggctcgataaacaatggaatcacctctcggggtcaaaagagtcactcttttgcgtgaacaatctacaatagcttggtatttaaacagccaatctataccaagaatcacatcaaattttcccaaaggcaacactaataagtttccagacaacttgtgtccctcaaacacaatacaaactgacttacatatggtgaatacctcactgtgtccttccataggtacactcaaatgcaacacaggactaaaagtttctcaactcaaagccaacatactagcaaacatcaataatataatggaatgtgatgcaacaatatcaaacaacacatgagcccaaaagtgtgagataagaaccatactatcaacaactccctagtatgcatcgccctatacatcatcaaccccaaaagcataggcttaagaggatgactttactttttctattccctttccttaactaggatgtcttatacttgtaccaaaccctccaccttgattgtactctctttaactcccactaagatcaggagtttgataaccatgtgagtaccccatgttgaaccatgaaccttgtggcctgaactagtgttgatactcagtttgcttgcctaattgaggtgtgaaaccataggaggaagactgagactggttggtcctgggctgtccatgaaaaagggtaggctctacatagttcagtgatcgattagtaagaaatcgatccacgaggcaccaacgatcatcaaaattcaatagttctttcccccccccc

SEQ ID NO: 106161 - DNA, 520 bp, Cannabis sativa
  modified_base (222)..(224): a, c, t, g, unknown or other
ctctactgtacaggaaagggtaaggcattagctgattagccatgagttcaagagttgggtgagtagtgtacatatccgggccatatcaaaccaagcgggttaagggtctacaagtgttgaatttttgaaattctattttgccgcttaggccagctaactgaaagagacttgtaataaagtttgtaaatatttttgggatcccaactgttgtaaagtttaaannnttacaagttttattttcattttgtttattacaaaagtttaaattctgcgctattttgattagtaaccctgtttaggggattagggtttcgtaaataacttgggtagcttgccgaattatttagagcgttacatgcatggccagccagtctttacttggtaggcctttggtgcgtagccttcatctgtggacaacaagcgaagctccgagttgggccttgacaacccacgaaaatatagggaaagtatcagtaacttctctattatctagggataattaactcatttaaagtttatt

SEQ ID NO: 106162 - DNA, 1962 bp, Cannabis sativa
ccctatcatgctggtgacaaggtatttcataagtcaccaagtcaccccctaaagagcttaatggggtttcaagagatttccaagaacataaatgattttatctctccatacatatatcaatggaattacaaaaagaaaatctaatcacaaaagtcttcccactccaattaggtacttggtgcaagacttgactaatgatcaagcgccaaggtatgctcatgttacagaatagcccccttgtgggtgtgccatgggcagcacgccacactcgtcgtggaccagcaacttacacactagcacttcctcatggtaaccgcattcatcttacctttcgcgtgtctcttttgaaactgttttatggcaacaaccaatcgaaatactgtactacccattaccagagttgagcgtcaccaaaaaacaactgatggtttccatggttatcctagccactagaattaagctaatcaatgtcaaactagtttgccaaattctctttgagtactccaaaagatgtcacatgggaagactatgaatcatttgtgcaagtttatgaaattcctaaccttgaggataaggttatttttgaggaaatggatagtgttagcaaagctcatatagaaagcccaataactattaatactggaatatgataccaaagagtgaagacattgatagacaatgcagtccaaaagaatagcctaagttagccttattcttcaatcaacaacaagaaggtagaagcttctctaaacattgattgagagcttcctgagcgtgtgagccgagatggctccaggattttgtgatgctcgagcagcgttgagaagtggctcaagagccaactaaattctattattgttgtaatttcttgcttgcttgtttaagagggctatataaaatctttttgtaatttcaatattttggttgttgaatgaaatagcaagtatttactttgggagacttgaagaggtttctcttcctatcatgtaatatgcataatcttatcacaaattttaccacataatctaaatgaataaggaaaattccttattgtggatgtatcactttctggcaggaaaataaattataattctacttctctatgaaaatatttattgtatttatttagtacgttctgtaaattttaaagaagtataaaatatttaaaatgttgagaccaaagtatttagaggagtgttaaaataaaagttcaacttattaaacatgcatataaaaaataaataaaaaaatatgcacccatacgacaaaccatttccaataaacttacataatatcctaacaactataatgacacttcaaaaaaatggctataacttattcatgttcaaaacagaaatggatggatatatttctttttagattggaacaaacaattactcaatatataattattcaattattttgtttcttgctggaaaattattcaattatttggtaaatggtttttaaaataaatctaattccatcattcctaaggcatggccgaaaacatcattgtcatcctaagagcagacatgctggactggacctatttttatagtgaaggctaataaaacccaaaataaaaaatcaattattttttttaagttgtgtccaaatcaactgtactaaagagacctaaaccccaccttattatgaccaattgctttcttaaatattccacccatggtatcctatagtgtgaaatgaataggtctaccaaatatatgtatgtatacataaataaaagtaagtgtgaaactcaatattctttcttttagtaattgatgtttattcattacacattataatcacccaactcttatatttttcctttaaggggcagtagagcaagacataattgtgaaaaataaaaataagaaaccaatatttgaagttgaatctcacaagtcacaattcatgcatgccagaattccaccctctgttttttttttttttttt

SEQ ID NO: 106163 - DNA, 576 bp, Cannabis sativa
  modified_base (97)..(97): a, c, t, g, unknown or other
cccccttattcctaacctcctccacgtggtcaccttgtgggtccatatccacatctatcaccccttcagcccaatgtaatgggctagtatcttcccntccttttacacatgtatcatttcggccaaatatctccttctcactttcttcgcccaacaaactttcctccagctggcatataccctcttccacacgcctcctcttagtatcataaacaactaacccctctttttgaaatttaaaattattttctgatataggctcattaatatcaatcctactttttcctccttgattttcgaccagcccataaccacctgtaactccgagatttctgtctccctagtacgtgcgattccccatcgtcccctccgtgaagcccgaccctggttgctagttactctggttcgccatggccagagaagaaccctccattggctgccccatactatcccagagtcatctagtgccgatttgacgatgttgtctgcgatcgggagccttcataaacaaactgtatagcttgacaatggaatccaaagattcctcaaacaatctatggaaaatcttctctgaat

SEQ ID NO: 106164 - DNA, 550 bp, Cannabis sativa
gacaaggtacacaataacagaatggataatatgaaacaatgtatcgattctatttctcactcttatgcagattacagagattccattatccctatattctcctcgacccccctatggattggaacccacctccccagggctggatcaaaattcattgtgatgctaaagttggaggggagcatatgtgcgtagcagtggttgctagggattacctgagcaggttaatgtgggtatttacggccaaaatggatttttctgatgccctgtgtggggaagctgctgcggtttgcttggcgcttgaggtggctaaggaaaaggtcaccaatttatcctggtggaaaacgattcaaagatagtgatcaacaatctcaatggcttggatccccgatgggaaattgagaactactctttattttgtaaaagattcgcttcttcctttgcttcttgcttattttgtttttcggctagatcctgtaattttatggcccataatgtggctaactgggcttttacccataatttgtatggttgtattgacattacaactatt

SEQ ID NO: 106165 - DNA, 734 bp, Cannabis sativa
ccaaaaaagaaagccttgaaaggttttccttgacaagagtcgggtgcaagaatcccacagatggtgacattacgaataagcaaaaagaaaaggaaaaaggggtagaagtcgagaagacaaagtctactctaaacccctaagtgtcattacgcgggacaaagatgggtcctcgaaaaaaacacgatgaaaagaagcaattcaaaagcaaaaaaggaggaacctaacgcattgtacagaaactcaaaacaaaaaattcccagaaactgaacatccaacccagaaaaagcagatgaacagtaaagcatgcaatgtaaacaaacaatgaactaaagtacaagatgcgaagaacttacataaagcttgggaactgggcgttggtgttgatcgacggtaaaaagttgattggcaacgacgaaggaaaagaagtaagaaatctatggtgtttgaggtttcttttctctctggaagtgaagtaagaaggttggcttttataggccaaggcatgcgtgagacagctgtgatcagccaccatcgaacggctgggaaagcaatcgattcgcattctatagatccaacggtcagattggatcgtcatcaaggcggcagaaacgcttgagtacccatctaacacccgttaatgcgctgtatcaataaatggacaagaaacgaatcgacgcctgcaaaaagtgaataaaccgcagtaatgatggtcattaaatacgccatcacgcgcc

SEQ ID NO: 106166 - DNA, 1879 bp, Cannabis sativa
atttaatatatttattggatcaaatttgatgggttaaattaattctattgaattagatagttaacaaaatctatcatctaattaataattgagttgaatcattggagttaaatagattaaatatgatccaacaaacaaatacttagactaactatgcctatgcacacaatattctaattgtgaatttagttccccagcaaaaaacgaaaatgggaatttagttgtaaacttcgtaatttgcaacgatgaaaaggaacagcacaccacaaatacccgtggtttgtcacggacggtgaggatgtaatgtcacagatggaccaacggcgtagatgttagaggggttgtaaactaaaagggtaatctttgtgctcactaagttcgatgtatcactttcggccccgtgaggtgacgtggctttggaccccacactcacaacacagagcctcaggccagaaaggcgggaagccccagcttttgtcattgagatgagagtcgagagaaacaaagaaaatttaaatacaaaaaagaaagaaaattaatcaaaaaccaaaacaaacggaacggagtttacttacttttgtttggttccactgttttggattttttgctctaaaaatcatttcaatttttatgttttttgtgtaataattcaacataatctgattgagctggggtcctctcctcctcaattctattctattttaccttgattgaaagattttattaaagcccacaatcaaatgcttcttttttctataagaatttcttttgattattttaaatttcttttttgtgtgtagctatagtatataatagtgtctctacgggtgtcccagtggcattttttttgcatgttcacattttttgagcagacagacaaagatgggattcggtgaccaaccggaaccgattcttttcgtcttccttgtcaagatttcttctcaaaattccatttttcccttatgatattctcacatttttccatgcagccttctctaccctatcttcttctcatcttattatacattaccagtggagcattttgggagtgagttggatttttcttctctttaaattaacagctcttaaaaagacaaccccagaaagcttttacccttctctctctttctctctcttcaaattcttaaaaggaccaatatttactgagtattggagagctaaagcaaaatggcttgaagaaggaagctccatccaggaagaccatatgagatgtgggttttctctttaactctcttattaccttgttccttggatgctttcatggatgacacaaggcctacccacaacatctctactctgcttttgtttctattgttactttttcttcaccagccaactctgcgttgccaagagagtagtggtaccagcagaaccaacaaaatctcctctgagcctccatcaccttcttctagttccagaccctctcacttccaaagcggcgttcgcagagtcattctgagcattgctttaggtgttttgaccggagttgggggagcccttgtcgttgctttcatggtcggttgctttgtcaggtacaataacagaaccccaattctcaaaggcccagtaatattctctcccaaaatcgaccccaaaacgctgcaatcggctttgtcgagcgaaaatcagctactggggtcaagctcgactggtaagtactacaggaccgtgctagacaatgggctcactatagcagtcaagaggctcgaacccttttctgagaacggctcactggagggtaaaggcaagtctaagtcaatgaagagactcatacagcaggagctggaagttcttgctagcctcagagacaggaatttgatgagtttaagagcttatgttcgtgataaagataggttct

SEQ ID NO: 106167 - DNA, 764 bp, Cannabis sativa
aaaggataccccaccaaaggattttatgtctttccaaaattttggaatcccatagtctattccattgtgttggagccaccacacaggcgggggctctttccaaagcttgaatcaaataagcagacttcgtggggaatttcccgtttccttcattggtccaaatctacctgtctttcccttgatcggaaggcttgcccactttcaggatatcattgattgtttcagagtcaaagagggtctcgagcttagggatatcccaattcccatcactcataagaagattcgccaccttagtcaccctctcagggcaagaagtgatgggtttcaggtagtactctttcccatgaaaaacccacgggtccttccaaacatttgtttcttcccgatttgatatcaccttacaagcccctttcctgagaatatcaattttaccacatttttccaaaaccaagattctaaatctttataagttacatcaaacaacggtttgcttttcagatacttggctctcaataccctgcagcagagtgattgatcctcagtaaggagggcccaaccccacttagctagaagagcctggttaaattccatagatttttgaaaccccaagccccctctagatttgggaaggaaaagttggtcccaggccttcagatataaccctcagtttccttgctcacaaccccaccaaaaatccataaccataccatcaattttcgaagcaagcttctttgagagcttggtagtttgcatagtatacacag

SEQ ID NO: 106168 - DNA, 552 bp, Cannabis sativa
ttaaaacttagctactatatatattttttagctcagtaaatagtacttaactaaatatagaaattattattcattaaactaaacatattttattatttttatttaacttttttacatatgtgtatgttgtattattatattttttttattaaagatataatatttaaataatattaaaaaagaaataaaaaaaattgatagatggtgtaatgtaaaagtgtaagagataaaataaaaaaaaaatataccattttagactttgtgttttgtaaaatttactaattggacagtctgttttgttaaatgacaaaatagaccatatattttccaaaattaaaaataggacactgagctcaatttttaaaaattttattttttaatataaccaacttaaagacaatttctaacatgaatataaacagaaaatataaccagttttgtcattatatctctaaatcaaattattattaagttttatttggacaaaaaatcagttcggcatcctatttgtataattttaaaaaatgtagagtctattttgtcattaaacaa

SEQ ID NO: 106169 - DNA, 567 bp, Cannabis sativa
acaaaataaggtccaagtcatcctgagatcaaactcttcagctttaaccatctcaacatgttcaatcatccttgagctctagactcactaagtcttagcctttcctttacctaaacatgtaaacaatatctgtgagttgacaaactcaataagaaaagcatataacacacaacatattactgacttgtatttaggcgtccatacacctatctacaaggcttaacaaatgatcaagaatgttcttaacaaaagtatgacatttgtaccacatgcactaagtacatgtctcataatagtgttggtagggctgaaccgtaccctgagtactactgagtgttgtactacatgcacgacatactcatctcgtactagtgttggtaacagtggatcgtaccctctgaacatcatatattgtaccaatgcactttgtacagctaccgtactagtcttgatagtatatgaatcacataatcacaacatgcaatttacatacatacacatatacatattttataataatcttagttcgttttctaattcaaatgtgttggtcaacttgaatggaaa

SEQ ID NO: 106170 - DNA, 539 bp, Cannabis sativa
  modified_base (180)..(180): a, c, t, g, unknown or other
atagtgtcatattgagctcatgggtaacgagtggtaaaaggggtactttataaagtaccgggattgtgtgtttatgatattgtgtaagcatgttgatatgagattgaattgctgaactttactgattattgttttattcacttttcttgctgagtctctgtgactcacaggtgctttatngtgcaggtaaagggaaggcaaaggttgagcacccatgagtttggggtcgcagcagcaatgtacatatcagccgcagtggcacgccccagtgaacaggatgctctattttgaatgcattttgggaatgcaaagtttatgtcgtaaaatcactattaaacaagtttgtaaatattttaaaaatagggggatctcgtagttaatattacatatcttttattataaagaaattttttatgtctgtttttaattatcaaaatttaattacccacatttttggtataattatagtatataaaataagaattttataatagcacaaaatggtattagagccctgacctagccggaagtgtggtcaa

SEQ ID NO: 106171 - DNA, 599 bp, Cannabis sativa
ataaaattttgggccccttaataaatatataaatatatttaaataaaaaaattaatctaaaaaaattatatactacatatcataacataaataaaataaaataaatataaataaatctaaaataaattataaatattacaaaaattaatgaatttatattttttaattagttgtatcatttatgttaaaaaaatttatcttgctaaaatttcaataaatcaaattcttaaaaagaaaaaacaatcaagtctaaatttacctgtaactaataatttctaacaactttattaaattatagtccataattataataagatatataaaaaaaaaattaaaatcaaatcaaataatattcaagaaaaaaattatttattattattattgaaattaaatattatatcttgattaataatttttttcccacaagaaagaaacaaaataataaaaaaaaaatagacgagttttttcttagtagcaaaaaatgagatgaacttatgaaatgttcggcttttctttaaataatatttgtgcatttatttttctttggctttagttattaagtgtatagtgggggcttgtagttgtttcttaaacaattt

SEQ ID NO: 106172 - DNA, 583 bp, Cannabis sativa
  modified_base (212)..(213): a, c, t, g, unknown or other
attgggatccggatctagaccaagggcttggacaaaacccatagtcggtgtctggatttgggacccgaccctttacccaaacactgacaaggacccaaacgcacaccaagacctgaacccagtcccaaacccaaaagtggacccaaacccgtaccctgggacccaaaattggaaccaaaaccgaaagttaaccgggactggaactaggactnngacttggaatcataactgaaattaaacatagatccagaaccgtaaccggaccaggaccaagactccaaatcagacctatacccaaattgggagtcgaaccccaatccaaacccaaacctgtactcgggacccgaacctgaacctgaactcagaccaaaacacggaactagactagggacgcagaaccagggtcgggacatagaaccgcaccctagtctcgatctctaacccaaactcagaaatgggaccgagacccgtgacagtaatcaagatcttgacttgggattcgggtaacagggcctagaacagacccgtaatcggtgcctatatctgggactcagactaggaccagaacccagacgaagaacca

SEQ ID NO: 106173 - DNA, 564 bp, Cannabis sativa
taatgtaattttttaatcttgtgatgttgtcaattttttttgagtattataggttttttttttttttgttttgggaaacaaaatcactttatataatttattcttttggtaaaaccttgagtcttggacaaagaattaaattcttaacatgggcatccctctctcctctaataaatttgtcatgcatagcaaacattgggtcatgcatcacatacttttaatacataagtaatatactcacgttagggagtgaatatatactaggaataactaatatagatattattagttaaatatagtctataccttagcaaatattaaattatttgatataatattactttagatacaataagaaaagtaaaatataactaaaaactaaaatagaaaaggacgttggctcttgttggagacaatgttattataaatatatcaacgtattggtcaaactttgagcaatggaaaaagacttgtcattgagcaacacaacgataagtgtttagtcttatccaatggtaccacattctcattttagcaaatatatcctacaattttatgtactat

SEQ ID NO: 106174 - DNA, 1166 bp, Cannabis sativa
ttattaccttattaattttttttagttcccatcaatgggtattacccattaagaagtgttccaccatatatgtatatgttctagacttaatagaatttttataataaacataataatgaaataaatcatataaaccatgcaacataaaaacgatttctgatcttttattaattagtaaatatgattatattgaaatgaattttatttagggcagacaacccaatagacacgtcgttctaaggtagacatccgactctcatcctgcagtagacatccggatcccaatctatggtaggcttctagatgtactgtccccaagtaggcccatatctttatcgagataccttcaatttatccctgtttcggaaggctaaggaggctttcaaatctcgcgagagtgacatgttctagaggcgaagtcttgagcctttgttgggcttgggcccattttggatctgacttaggcgtactttgaaatggtgattattttttggttgagcctcgtgtctcttatataaatattatggataacatgatgcaattcaagtagaatatgaaagctcttttcaagacggatttaagtgtgtctcacacccttgccacgattttgatattttgggcctcaaaattgactcgcgagctcgtgcaagatttcctaacaaatttggtgtaattttttttttattattttattgtaatttaattggagctcattttctataaaaggagatcttccctaacttattatacgcaccatccattcactctacaaggtcagagattctcgctcttcactttttatttatagaaattgtaaagtgaagctagacttagtcattttatctctagttttttttataagacaattcactttttttttttttttgggaaattagcagtgtttttcattactccaaataacatttacatcttgatcagctccttttataaaacaaggactgatagtaattaccccaacctgattacaaaacttacaactattacaactcactataccaagttgtatcacctatggacacttttttaggccatatactttgtattctaatcttacatgtatgtttaatcaactgtacatttgtcttcggatcttcttgggtttgctgccatagccgagcattcctattcctccatatttgatacaa

SEQ ID NO: 106175 - DNA, 536 bp, Cannabis sativa
gtttgaagctgggtctgaggttggtactaggttcaaatttagggtcgattgtgggtttaatttttaaggtataagttagagttgaagtctaaaatataattaaaataaaaattgtttaataaattttgaaagtaattttttttatttttaaaatttaaattcttaattaaaaagtaaaaagtaaaacaatgttaaagtaattaatcacaccatatttaattatatagtactattacacattattagtatgtatttgcatagattaagagtactattattattattaattcttattattatatgggaattggatgttagtttttgtcccctttttatttttggcaagtgaaaaaattataattttttttattgtctatcatattatatataatagggtaaatagcggcataagtacccaaaattttatgtttgtaagtgtcataaactcaatgtttatttttagcggcataactacctaatgtttgtaaaaccgtaatttttttccagttttaccagtacagactctgttttgaatt

SEQ ID NO: 106176 - DNA, 780 bp, Cannabis sativa
ttgcatagaaattaataatagggagataatcatattaagccatattcaatagatacaattgaaatcgaagccctagtttttattaactattaatttcctttaattatttgcttcttagtagttttcttattttaaatttctttcttaatttgtattccaccaaatagaagtaaaagtttaattttaaagtatttaactacaactcctgtgggatcgacctcactcctggtgagtttactacttgttaacaatacgtacacttgtgtgtgcaaaatatcacaacaattcctaatgctaaatgtaaggttcttttggaaaatatggttcaaagaattaaagtatggagataaggaatccttcatatgcaagttgagtagtattagttaattcagtgcttatgtctttacatttttattgggctcaattgataattattccaaaaaaaaagttctccagagagtgaatgcaatctgtagaagttttctttggaaaggtttagttgaggtaaacggacatgggcttgtggcctaatatgaaatatgtaaaccaaaatcaacagggggcctgggattcagaagaattcaagaatagaatgaagcaaggatagggaaatatatttcttggactgacgactaaccctgtggaccaacacaagtgttttcaatgtgttatgtactcactcgcacgcttcctaagaaaactttctaggaacgcttaattgtggagtttgatgggctactagaaaataagatgcaccttgttgatataggtagtaccaat

SEQ ID NO: 106177 - DNA, 565 bp, Cannabis sativa
aatcagattgtaaagggttttatttagggtacaaaacccaacagttaggtgtagagttttgttagttagaactaattagtaatatttaaaactaattataaataaaaaattattaattatgtttaagttttcaagaattaatttgagtcatttaattaaattaatcactataaattactatacctatcaataataaaaattacaatatttattgtattagcttgattgtttatcactctttcaaattctaacttgtatctttgagtattattaatatcttttattaaatttttgatattattattatcattatcattatcaaattataataataataataaactaaaataaaaatattaaaataataatttttatcaaaatattaaaattaaaaatataaaaaatatttgaatttaacacaaaaaattaaagtttataaaataaataaaaatatcaatatataagagtggagacttaatattgctaaaaaataagagtttggggactaatttattaagaaataaagttcgagattaacttgataaaatttatatagtttgaaaat

SEQ ID NO: 106178 - DNA, 1086 bp, Cannabis sativa
  modified_base (101)..(102): a, c, t, g, unknown or other
aacaaagagaagttgaatgaaatcgtagagaaggggacgcgtgaggccaaagtggatgaaaagtaagttagatcattctgtgttctataaaagatcaactnntggtatcattttattagtggtgtatgttgatgacatcgttattactgaaaataatactgaaggcatctcattcattaaatctttcattcatacccagtttcacacgaaggatttagaggtgctcaagtatttcttggaagttgaagttactcaaagtaaacaaggtattttttagtctcaaataagatatgtacttaatttgttaactgagacaaaaaaattgggagcaaaaccttgtaatgctccaatgaatccaattgtgcatcttacacgtgatggggaactatttgaagatcctgagaaatatcgcagattggttggaaagttgaattatctaactgtgacttgtccagatattacattcccaattagtgtcgttagtcagattatgtcttctccaacaattcaacattgggcagcattagagcaaattttatgttacttgaaaggagcaccaggacaaggtatagtttacaaggatcatggacatacccagcttaaatgtttctctgatgtagattgggcaggctccaaggtagatagacgatccacttcaggatattgtgtatttgttgggggtaatctgatctcttagaagagtaagaaacaaaatgttgtgtctagatccaatgctgaatcagaatatagcgttatggcacagtttgtgtgtgaggtaatatagatttattagcttttgacagaatttgggtttaagacttctatcccggcaaaattgtggtgtgataatcaagatgctcttcatattgcctcaaatcctgtgttccatgagcgaactaagcacattgagatcgattgtcattttgttcgtgacaaaattcaacaaggcctgatctccacaggtaatgtgaagactagagaacaattaggagaaatttttacaaaagctttgaatggagtgcgggtcgattatctttgttacaagctgggcatgtttaacacctatgctccagcttgagggggggt

SEQ ID NO: 106179 - DNA, 3302 bp, Cannabis sativa
ctcaaaaccaattggcaatgagtggagtagccgttcttatatatggctcaattctctaccatttattccatgataccatattgagaatcaggggttccatctcaaaaccaattggtaatgagtagagtagcccacattcttatatatggctcaattctctaccatttattccatgtgggacattgtccacaatagacatatataaatgaagagaaatgtaaaaaagtgttggtggtgtttaacattttcttatgtgttaatatcactatattagttcaactaaatatttaatcttatataatttaatgaaatagctattaaaaagtatcgctaattaattatgcgacacatttagaaaatactaaaaataaagtaaaattagaatactaaaaaaaaatatagaaaacaacaacaacaaattaaaattaaaacttactaaaaaaatacttccataaataatgatttcagcaaattattacctaacagtttttgtataaatattatgtggctaaaaataatgataatacagcaaacaacacattcaaattaataactacaaatgtcaatcaatcttaagtactatttaaatatttttaaataagaaatatcactataatttttagattccgtttaatttaattaaattactctacaaaaactttaccattgaatatctttctaaaattattttctgaattattaaaaaatttgtttgataaaagattaccaagtaatttgttataaaattacatagtgcgagttaaactttttgattcgtcacaagtttgagtggcacaagcatgacaagacatgagattgaatgaagcaactaacaattacacataattgagtgctcaagttacgagtttaaatgaaccagctggaacagtttatgttttctaagcggttgatggaacagaatatataagtattcttaagattaattgtaatgctgcacttttcttttatctaattttattttagttttttgtcaaaacgtactgagaattagaaggctaattatttgactctccattaatagagtgatagattgcagaatattattttagttaatttcattaataagatttcattatttattaaaaaataataaaaaaaaaaactcttactaattatcaatttcatgggaaataaagtttcgtgcattaataataatacttccaatctatatgtaaaattcagatgtcaaattaccggtgtttacgaattatgttattttgtcagaatttttaattttttcaattaaatgatcaaatgaaactaatctactcaaaattaaattagtttggtttaaaatgatgatttatatttcatagtttttcaaatattttttatagtaattattcattttttcgatattttgtttaggttttgaaccgctaccgaaattattaaaactatgaccgaattagaaaattttaaacagtccagattgactaaattattcaaaccaaattcatttaattcggtctcaaataattatcaggatgcatgcatccattaacgttgattatatgtggctttttttttggtaattatttacttctgaatttatttatgcgctagctctttttttgtaatataacagactatgtaactaaaatatttaaaagatagtaattagttatatttgcaaattgcaatattggtgtgcattatcgtagctagacgaggttaagtataaagaaaaccttattatatatctccgtagtgcaaatttggttttctctttcacatagtccaatttgtctgtcttgtctctcttattatgattatttagtgcaatgaatgagtttttggtctataagtaaagtatatataaataaaatacatacatcaaatcataaattaaacataacaataattccatcagcttcaattatttgatgcttttcattatttgatagtgatcaaagaaacaaatattgttgtccgtccacgtttattttttttctttccttctctaatcgcacataattctatctatatgtataactaatttatgattttaagtaaaaatcattttcgttccattggttgagattaattatgtgaaaaaatatgttatttaaatacattacaattattattataattttatttaacgctctaatatatttctataatatttttttttttgggaaccacctatcttgcaaagctctataataacatgttattgatactatttgcttaacttaactaaatttgtatcgtcttctgaagtgtagaccaaaaaaaaaatggcatacgagaaaattgcataattttgtaggagcatgcaaacagctggaaataactatattagacctgaaatataatttttatatatggtcaacgaatgagtcacatcgatctttttatctagaaccatcagtttcagattgtgtgaagtgtgatgggtactgtaaagcagcgtttactttttgagcaattatatatttacaaaatttggatgcacttttgtccaaaataaaaataaaaactaaaaaattatatttggatgcactgaattataaagaaagacaaagattctgacatcattattagacagggtgaaaatatagctttgaaggtctatatatgtagtgaagcatacataacaaacatgaataaactcatcatcataaatagaacaaatattcaccatacatttctgtcgcatgtgatcattatccttataataatgtaattcaattcatttcattctaccgatcactcttggtcttaataaaaattgtaatattattggtttgaaaaagattagtttgtttccactacatagctagaaaattattacttttttcttttcttttctcacacgacactatcaaaaacttctctttattttgtttcactttgatctacaccaagtgcaatatatgatcttgtcatgtctaaatcaatgttatttacgaaagttgtttttagcaaattttatacataaatattgttttatttaaaaaacactaattgggtacttgtatatagttctatattatacgccaattgtctctaaatattgtaagcatgtttttaattcaaaccacgtgttaatggaatcatatacgtatagtatccagattctttcggtcaatcaaccataaaaatactgaaagtacacatataaaagagaaatgctaaaactacacatagtaaggtagaccaatcccatacgacccattaaaagagtgggggaaacttacaaaaatattgagttttggcttagggccagtttggcacagctgtgctgtggggaaaagcagctgtagctgtgctgt

SEQ ID NO: 106180 - DNA, 662 bp, Cannabis sativa
gacacatacctgcctcggagtacacagatccaaagagataattcatttattcgatagaatgaatacggttatgcaaagaaacctcggattatgtatagcgagacaatcacctcgctattcataagaaacttggtgagacgaatcatttgctaacacttagcgttttttctacattataatagctaagaataataactcagagataaggaagatacagttgtccaaatcaacattgatcatctttaaggataagaataacaagcagttaagcggttatcaagtattatccacatgcaatttaaatgaaacgtgggaatttatcacgtttcatcaacaattatattttaaatagaatgtaaataagtgccaatctatatttctataaataggggcagatcccatagaaaatagaacgaagagtttgagagagaaaatatatatgatcaattgtatgttgtattttgtattcagaaaatatcttaaataagatagactcgtagagtatgaagatttaactgcagaaccacgttaaaaatatctggtgttatttatacattatttattttttattatttttgtattatatttattacaaaaggcttattattggttaataaaaatctgcgttaacatgtattagtagtaaaatcctaatatccaaa

SEQ ID NO: 106181 - DNA, 742 bp, Cannabis sativa
ccctcaggtaactaattctagacgccgtaataaccgtactcacagggaacggagggccaacccggagggattcgatttgaaccaaccaacgtcgagggaacacctcaatccggaggcatagactgaggaagaccttgaatgactcaatcctcgcagcagacctcagtcgcgagacaacgacgttgaattcgcctcctcatcctcgcaggtacactaggtcggattctgtggaaacaccgcagggaggacgatatcaggttcacaggggcgatctacgcgatcaccttaacgatattttcagggtgcgctcccaggcgcctcgtgacgttggagagccccgtgatccccgaatgggggatcagggcgtaaataatcgcatcaatccgcctaccgcaccagctgcgactactggggttaatatcccagcaaacatcactgcagtagtaacagcgcctacggcgacacaagtcactactcccctagctgggaatatcgatatacgcatgcttctgtaggccttaaaaatgctcgagcagtagagaaagcccatatacaagctgcatgggacctctcctttcactgcagaagtgcaacaagctcgactccccaagggattcctgttatctgaatccctaaaatacgaaggtacctctaatcccatagactatttagaaaaatttaatactattatggaagtggatcaggtacctcaactcgcaaaatgtcgcattcttgcgacaac

SEQ ID NO: 106182 - DNA, 705 bp, Cannabis sativa
tttgcaaatactcgtcttaacaccaaatctccaacattgaatagtcttttcttgacttttttgttgaaatatcttgtaactcgatgttatatgttgcgttggtgattaacgactcagtttgtttttcctcaagtagatccaaggacaatttcaaaagttcttggttttcttcttgattataaaactctcttctgtgtgttgatatgttcacttcaataggcaacattgcttccgtgccaaatgctaactagaaaggaacgtgtcatgtcactgtcttctcggtagttatgtgggcccagagtacctgaggtagctcctcaacccatctgcatttgacagcgtctaacttcttcttggtagtatcctttaaggttttactaacagctacttgtgcatttgcctgaggcctggatactgacaagaagcattagatgactttgttcctctcgcagaatttagtgaacaagtcggcgtcaaattgggttccattatcagatactatcttcatgggaattccaaacctacagataacgtttttgacgataaagtcaaaaactttcttgcagcttgtagaaacgaggggctcagcctctgttacgaaaattatataacaatacgcaagtgtacgtaatcaagtagtaaactcacataggtgaggtcgaaccacagggaattgaactgaataccactaaactagatttatga

SEQ ID NO: 106183 - DNA, 523 bp, Cannabis sativa
  modified_base (37)..(37): a, c, t, g, unknown or other
actattatacatatcaaaataaaaaataaatatcatntaagaataataatataccatacaacaaaaaataaaaatatataccgtataacaaaatctacataccaacaactcataaaaaattaaaaaaaaaaaacgacataactttaaaataaaaaagattttaacaaaactaatataggtataccataatctttaaatagtttaaaagggtcatttctctacaagttttgaaatgaggacatttactaacataatcctatgatttagggtcatttgctataattttttgaaataaggacatatgctaacatagtcctatgatttggggccatttgctataatttccctaatatcaactccttaacatgtttttgtattacaaaattcatttttttacttagttttgacaatttgatttatctttttgtactattacattattttttttttcatagaatttgttattacaacttcatactttcagttttttttattttcatttttgagttagtgacggttaaaa

SEQ ID NO: 106184 - DNA, 825 bp, Cannabis sativa
tcttaccctataagtttttatttatttttttaattttaatgtcttactctataaattttttatttttcatctaatatacaatctattatgtaatacatagtaatatataatttattatgaattgattttattttaaaaaatttacatatactattctatatttttgttagctcaaaaaagtgtttaaactaaattattttaagtgaaactagacaaattttattttctctatacataaggaaaaatacaaatcaaatgagatgtcatcttatgatcatttttgtactatttatttattttataatatgtcttctaagtgacgtatatttttaattcttgtaagagttcaacattatttataaactatgtgagtattatacttattaactctataaaaatatttaatttaaatatatatgaataaaaaattaagttttgctataaatgaatgaaagtctactctactataatatttaactcatttaaaaagaatttatattttcaatagtttttaattattataaataactttattcgagatgcatctttatttttattgtattatgattaatacttatgttaatcataaacaaaaatgaaagagagactttacatattcgtattatataattttatattactcataaaaaaattaaaaatattggacttgaaatttcattcgtaactaaaaattaatttctttaaagtaaattttttaaaaattatcaaaactgcagaattcttagtttaacgatgtcttttgggtttctacgttaactttaacagaatattctattgcttaacagaatattctttattaatttt

SEQ ID NO: 106185 - DNA, 967 bp, Cannabis sativa
  modified_base (836)..(838): a, c, t, g, unknown or other
caagaaaagaaaaagactttccccgcccaaaaccccaaaaaagagaccactttggaagaaccaaatcctgaataaaaaattattaaaaagggttaggaatctatatttctagaggaatgagcagcaccaccgccaaataagacctatcccacaaatttacatcacaaagagaaaatacagcatttacttaatatgtttactggtaataaggtcgcaaatgttcaacattccagtggttatttattagcgagctattaagtcgagccaacttataaaccccggttccaactattgcttcgataacataaggaccctcccagtttgggttaaacactccagcagatgcatctctcgtgtttgcaaatactcttcttaacaccaaaccctggacattaaagagccttttcttcactcttttattaaagtatctcgtaattcaatgctaatacgctgcattagtggtttgcgactcagtacatttttcttcaagtagatccaaggacaatttaaggagttcttggtttttctcttgattatagaaatctcatttgtgggtcgtaatattaacttctactggcagcattgcttccgagctaaatgccaacgagaatggagtatgccctattactgttttctctgtcgttctgtgagcccaaagtacttgtggtagttcatctacccatctcccttttacggcatctaaattcttcttaatagtatcctaggttttattaacattttctacttgcccattttcttagggccttgaaactgacgagaagctcttaataattttattccttacgcagaactcagtgaacaattcaccatcaaannnagttctattgtcagatactattttaatgggtattccaaatctacaaattatgttctttacaacaaaatcaagaactttcttgcaagttatggaaactagaggttcagcctctgtccactttgtaaagaa

SEQ ID NO: 106186 - DNA, 673 bp, Cannabis sativa
  modified_base (641)..(642): a, c, t, g, unknown or other
caacaaaaaactatatactatataaaataatataatataatattattaaaaaattatataccatattaacaaaattatatacaaccataaaataattatattatagttacaaaattatatatcgcctttatacataataaaataaaaattaaacacgatctaaaataaaatgatatactatataattaaatttatataccatataaccaaaaaatatatactttacaatcaatatatatataataacaacaaataaaaataaaaatacataagatgctaataaaattgtatatcatgtcaacaaaagtacaatagaaaataaaacttaaatattattttaaaaaaataatataccatataacaaaaaatacatatactattcaccaaaatatatatacaaacaataataataataataaatatatattactaatatatatatatatatatactatactaacaaaattatataccacaattaaaacatatataccatgacaataaaattatatatcaccattgcatataataaaatacaaactaattaaatatatttaaaataaataatatatcatacaataaaaatatataaaaagaataattagatatatataggtaccaataaaattatatacatacannaaaatatttgtattatgctaacaaaattata

SEQ ID NO: 106187 - DNA, 631 bp, Cannabis sativa
tcgttgggtcctcttctgtttctctcaggggaatgatgttcgatgattgctgacctacagtttggtaggctcttcgtatcagcacagtggcttgctgactacgatcttcaatctctggatggtgagcccttaatgcctccatctctttatctctccattcagcgaacatacgcctttgttcgtcaaacacgagatttactgcagctcgcagttcatcatgatcatgatgtagagtattgctatgactctgcatgagttcgagcgcggcacaaagattttgtaattcggttgcgcctccgatggtcgtctgagcgttggctccaggtggaacagtcatattatgaatgccctggttgggtgcgaaacttttattcccagtctcttgcacatgaggcgccatttcagtgacaggagctgtttcaccattcaccgcgcttcctgtctgtccgggattaacagcaggcagaacccttgaactcccttggtcctgtaatgccggatccagcgtttgtgaatttgctgggtcagacaggcctctacgagtttgcaccatcgtgttgacagttgactgtcgaaaagaccgatttgtgatccttctctcaatgaaagcaccaaaatgttgacttcgctt

SEQ ID NO: 106188 - DNA, 1397 bp, Cannabis sativa
  modified_base (366)..(383): a, c, t, g, unknown or other
agaaaaggctgacaagtggacgaagaccctagcacaaaaaatggaggaggacttagcattgcattttgaaaaatctcgatatttgaacgttgacacatgtagaccttacatgctgcaggttcaccttgtaggaattgttgagaccggtggcatagtggacttgcacttgcggcttgttccagtgcatgaaatttccttgtcctcatgcatgtgttgtagctcagcaacaaagtattagcatgtacgcactatgctcaccatattacacaatagaatattggaggagcacatatgatagtacaattatgctagttggtgacaaggataattgagaattgtccgatgacataaagaacatgacagttnnnnnnnnnnnnnnnnnncaactagtaggacgacccaagaagcaaaaggttggaagaattcagtcaaaccgaattgcttgtatggtgaaaagattatcataccatgaaattgtggcaagtgcggtgccaagggccacaacagaagcacttgcaactaccgagattaaaaatgaaattttaatttagtcgtattatgatgtgttgtactattatgtattgttattgaattcatattggactattatgtattgttattaaaatttgtggtattttatttttaatttgaggcatgaacaaattattttactaaacagtaattgggttaaatagaaaatttagcatataataataataaaaaaaagcacaatttttcataaaaatatattataattcattgttaatctccctgtccagtatttggcacaatccttccaaaaaaaattattctatgttttggtagaataaatctacaacccatctttgtctaaacaatgacatgttatcatcattcactacatcgagtagtagctcaagaatcttatgctttatatgcttgacaacgtacacacagtaattgccactgcatcagtgaaaaagcaatcagttagtgttattataaccatatttattaatgtattgaattacttagtaagcgtattacctcatctttgtttggggtacttctttcctgcccttgagatcccaagtgaatggtctgacttgactttcgaaggctgtcatctgagggaccattaccatgtagtgggtattaaatataccagaatgatcgatcgatgatgtgaatatatgctgtagtaatcatccatcaatatcttcaattaatttgtagtgattgagccaatactggaatcgaggatgaataattttcacaactctaaatccacctcgatggccacccaatgttttggagcatgcaagaacaaggccatgtatataaattctttcttctcccaagaaggcaagactggataatttatggttctgacgtatatttacatcttgggaacatgg

SEQ ID NO: 106189 - DNA, 805 bp, Cannabis sativa
cactttgggtccccggtcctggtccgggtcctaggttacagtccgggtttgaggtcgggtctcggtcctaatttttatggccatgtcccgggtctaggtccctcttccaagcccgagtcctaggccccagtccaagtccagtacccggtcgtgggtcaagtcctagtccgagtttgggtttgggttccgatctcggtttgggtccaaatttgggttcgagtctaggtccaggctcgggtccgtgtccccagttccgatctgggtctaggtttcggggcccaagtctaggtccccaatgtaggtccaggtcctaggtcccgatctggttacattcaggtttgggtccttgtcccaatttaaaatttcaattcagtttttttgttcgggtttgggtctgggtcttggtcggggtctgaatcctggtctgagtttaggtctgggtttgggtccaattccagatcctagtccgggtttgggttcgggttcggtccgagttgaggtcctgggtgcgggtctaggtctgggtctaggtcagggtctcggtctgaatttaggtctcaagtttcaatctgggtcttggtctagtttgggtttgactccaactttgtatccgaatccctatctaggtctgagtctgggtcttggatcgggtcccagatctaggtccttctccgggttcaggtcatggtctcggtggcggtctgggtatacgaacgtgtttgggcctgagttttggtttcggtttgggtctggggctaggtccgagtttggttctaggttggggtccgggtcctggtctggcagt

SEQ ID NO: 106190 - DNA, 1188 bp, Cannabis sativa
ttagcaaaacttttcaaccatgacaaaagtcaagacaaaattttaagaaccttctagacggattgtttaattttatggtttgatatttttaaaattaatatttatagttaaatttgtttaataaccattcatgggtaatacccattaaaaagttttccatatatatatatatatacagtactctatatgaaaaagaaaaagaagtacatgtaaataccacaaaggaaataaataaaagtatttaattacatatataaatatattagatggtttattggtctatttatatttataaacaatataattataataatcataaaaaaattattacttttttagaaaataaaaatttaaattgtattcatttttatattgcataatttctcaaaaagaaaaaaaaaacttacaatttttatacgaatattaattgttacttctttattttaaaatatatgtatgaattttttttttcatttttattcttattgtggttaattcttttataaacaaaaagttaccagaataattgtattagaagtagtaatggcacaattgtaataacatgaaaatatcataactaattattaagtaaaaataactcttactaaaaatatgacatttgtcatcacatcaaagagataatgcaaaagagagtggaatagagagttctcttagcactcctctaattttttaataatactttacatataatcatataaaaaaaataattaaaatgattagaatttgaatatatattagtaaatacatgtgtattattattattgttatacaaacttttggttgggtgacacggcacacaattaatgagaaggcacgtcatcacatcacaaagaaggcttgtgaagggtactctgctaagaaacaaaatatcgagacccataaaagcccatggtggatcatatgggcgacatatgcacaaacatgctgcccaaatagtaatactcagtacctaggcagcatacatgtgcctcccaagtaacttctgagttacaattcgacagttccgagctagccttcttagaaagtggtctgatatgccttgcacaaagaaaaggtaaactctgaagagcctcaggtgtggagcacacacttgggtggcatacaccatgtcgcctaggtgtatgcctcctagcttgggcagcacagtagtgttgggttttatgccct

SEQ ID NO: 106191 - DNA, 555 bp, Cannabis sativa
  modified_base (107)..(110): a, c, t, g, unknown or other
  modified_base (383)..(388): a, c, t, g, unknown or other
cgatatccgactcatgacctagaagtgtttgctttgaaaatttggcggcattatctttatgaagaaaaatgtgaaatttatgtcgaccataaaagtctcaaatattnnnntactcagaaagatttgaatatgattcggatttcacctcagttagcagaggacatggtcagatccaacattgaatttgttgtaggcaagcttcacaacttgacgctgcaatctaatctgctagaatgaattaaagtcgctcagatgactgatccagagttagtaaaaatcagagaagaggtttcaactgctcaagccaaagattttacagtgtcagacagtgggatgttattgcttaaagccagggtttgtgttccaaatagtgtggaactcannnnnnaaattcttgaggaggctcataccaccccatattccctacatcccggcaccaccaagatgtatcaagatcttaaatcttatttctcgtggagcagaatgaagaagaatttggtagaattcatatcgaaatgcctaacctgccagtagatcaaggctgaacatcagaga

SEQ ID NO: 106192 - DNA, 985 bp, Cannabis sativa
  modified_base (270)..(272): a, c, t, g, unknown or other
  modified_base (352)..(373): a, c, t, g, unknown or other
  modified_base (655)..(657): a, c, t, g, unknown or other
aggtagtgatggcttaagggaaaagatgatgcatctcaatcgttcagataaaatttgggcctccactcctataccctagccaaaaccatctttctctctttccctcttcaaaaccgaagctacatagtgaaaagagtgagtgcccagacacatcaagtagtactcaatcatagtgtgtaaggctgtgaagaatccagtttcaagataaggagattcagactcagatcttggtgatactctgttactgaaaggatacaagggttagagatnnnagtggaaggagacattatattccgttgcaaccagtgtaaggtttctaataccctgtatgtgtttatttcatatcgttttnnnnnnnnnnnnnnnnnnnnnnaataacatacttgttagtaaatctcgatccttgtaaaataaatgcaacaactagcctcaaagccatggtaattgatttaccttcaagaaatttggacttaaaataatttgtgtgtgatttggatggtttcatgttgatatgtgtgttatttgatgattgattgatgtttgtgaaatttttatcaaaaataattgatttttcgttctggaattatttttgttggatagtttggaaacaatgaagcaattcacttttttatagaactcaattttgatttaattnnnattagttatgattttttgaaaatccgaaaatatccagggtgacatcacccttatgcacgcgcggatgtcttagaattctcgggtgcacgcgcatcaaacatgcacatgtccgagaattctcggtctgaaggcactgattttgtcttaaggtgggctgcgagcacggaaatgctgctggcagcatccctgtgcgtgaaaccagccccatctgcccatgtgcatgtgcctggatggtatgcaatgcataccagctgagccaaatgcaattttttttcaaattttttcattttttcatgctttttcacggaattaatttcgaattttttgt

SEQ ID NO: 106193 - DNA, 1084 bp, Cannabis sativa
ggatcatgcgggttggcaaagtttgtctaaaaagatcattagacaaggatattattggccaatgatcaataaggacacacatgagtttgtcaaatgatgtgatagatgtcagagattttcacatatacctcgcgtagcgccaactgaacttagaatgatgacattgccctacccatttgttatatgggggatcgacctgattggggcattacccactggagaggaggagctaagtatgcggtggtagcagttgacttcttcactaaatggatggaggttgagccccttgtatccataacctgcaagaaagtccttgactttgtcgtcaagaacataatctgtaggtttggaattcccataaagatagtattcgataatggaacccaatttgatggcaacttgttcactgaattctgtgagaggaataaaattatcaaaagcttctcgttagtatccaggcctccggcaaatggacaattggaagtgattaataaaaccataaaggataatatcaagaagaagttagacgctaccaaaggcaggtgggttgacgagctacctcaggtgctctgagcccacagaactaccgaaaaaatagccacgagatacactcctttctcgctagcatttggctcgaaagtaatgctgcctgttgaagtgaatatatcgactcacaaaagagagttttgtaatcaagaagaaaaccagaaacttttaaaattgtccttggatctacttgaggaaaaacaaactgagccgcaaagcaccaacgctgcatacgaacaccgagtcacaatatacttcaataaaagagtcaagaaaagactgttcaatgttggagacttggtgttaagatgagtctttgaaaatacaagagatgagttagtaggagtgttcaaccctcactgagagggtccatatgtcatcgatgcagtagttggagtgggagtctataaattggctcggccagatggctcgctaataaaaaacaactagaacgttgaacatttgaaatcctactatcaataaataaatgatgtaactggcattactaatgtaagctttaaacttcagttatgaataa

SEQ ID NO: 106194 - DNA, 719 bp, Cannabis sativa
aattcttctggatgccgaaacaagtcaagggtgcatcagtacattccttttaaggggtacattgtagaatcaccctaattttttttctcgtttagaaaatatataaattagaaaactgaaaataagggtgttttttataacacttttttaatgagttttttcaatttttaaaattagattagtgaaaatattttccaaaattatgttttataaaactgtttttactttttaattttttcaataaataaactaaattttaaaaacaaaaaaaatcacttttaattttttttttaaatagtttatttttaattaatgttttggactccgactccaacttagaccgtgaaaatcaaactccaacccgaccccaaacttagacccgcccccggtctcgaccttagacccgaccttggacccgacttaaataaaatcaacaaataaaaatgaaaataaaatttacaaaacacacttttatttttgtttttaaaattaaaaaacaaaagtggttatagaatacatttgtgtttttttaaaataagattttaaagacaaaaatttaacttttatctttgtgattaacaaatttaaaaataaaagtattaccaaacggcaccataatttataaactaaattatagtggtaatacttttttaatcaatttagtattcttaagattagggtggcgtttggtaacacttttttaatcagttttctgtttt

SEQ ID NO: 106195 - DNA, 803 bp, Cannabis sativa
  modified_base (160)..(172): a, c, t, g, unknown or other
gtatataaatagctttaattgaacccttatggccaaaccctagtgggccctatagaatttcaattttgttattttatttaaaacttatctttttttcttttcacaaatatcttttaattataactctataaatatcaaatctatctatttaataattatnnnnnnnnnnnnnataaaattaccatttaacttatttattacgccttacaaagtctcttagttaataaacaaaccataaattctcttttcttctcaaataagcccttgtttagtgaaaattcacaaacaagacatagtcttctttagaattctaattgattaactaaaataatttaattgagcctacaagataatattatctcaactagtgtggaccatgtgcctatgtaattaagctcccaataagtagttctagaatttattgagtaaatgctctatcttattaattcctcattactccactatagattcagaatctcttgattacatagaacgctctattcaccaagaatagatacgctataaattattcattgtttcaatctaaataattaaagatcatttatagatgatttacatcgagtaaggataaatttatcgttctacctttcaatgtgttttctctttaaaacacttagccttctataaatgatatttcagtaaactaacataattactgaaataagagctcttctatttatgtatgttaagccaagcttataggaaattatcgtttcacttttatatagttatagaagctatatattccatatatatgattatcgctcccactcaattgcact

SEQ ID NO: 106196 - DNA, 506 bp, Cannabis sativa
  modified_base (71)..(76): a, c, t, g, unknown or other
attcctattcttattctcattcccattcctattcctatattttcattcctattcttattcccattcccatnnnnnntcctattcctatattttcattcccatttttttttttagtgtcaattaaaaacaattaaaaatggcattgaaagcaattaaaaacaaaaaagaaactgagaataaaattgaaaactaaagcccaataaataaacaaaagctttggcaattggaataatcaatttaaacttattaaaagaaaaaactataaggtagattagagcaaaaatagaagagccaaaatattcttaaagctgaaacgctataaaacaatatatataaaaataataaaaaagaaataaaaaaaatgatatagaaataatatatatgatatgaaatacaataaatgtaaattttttggacaaacaataaatgtgaaattaatatagtaaattatactagtaaaagttataataaaatgtatttattaattatatttttaaaactattaa

SEQ ID NO: 106197 - DNA, 758 bp, Cannabis sativa
tctctctctctctctctcaatcctagggcagctgggttttggggttttttctttggaaattcagctaattcttgtaaggaaagtggtggtctcaagttttgggtatgatctctagcaactttcttttaatttcttgtttttaaagagagtgaattatgcatgttttgatgttttgcttactgttcttgttgttgtgattgggttatgacttctgtagttaaagtatgtttaattgagtggtttagaacaggttttgatgcatgttggttggattgaagtaagtttggaatttttaactcaaaacttttgtttttatgagtgaaatgttgtttagcttgctatagttcctgtagttatttgtggttgtattcagaggcttagttatgagtttctatgtggatttatgcttgatttgtggctgttggttgtttgagcaagctttggagttttgaactcaagcttggctcattaatggcaaaactcgtttctgtgattgaagctttgttttatcacttggaacatgttcattggggtctaattagcagggctggaaggttgcatgaaatttcgtgttgaattggtggagaaatggaattttgaaaaattcctgcactgaacctgaattccagttcagggaggcctgtaggaaccggtcgaccggttggcttccaggaatttttctagaactggaattccggttgcgtcaaatttgggaaccctagttcttcccatttttatgttgtttagggtattgccat

SEQ ID NO: 106198 - DNA, 619 bp, Cannabis sativa
ggatatagagaagattatggcaagtttttggtggaaaactacatcaagtaagggtcgtggtattacttggatgtcttgggaaagaatggcaaagcccaagatggaaggaggtatgggtttccgaattcttcatgactttaatcttgcaatgctagctaaacaaggttggagacttctgtgtaattctgattctttggtgggtaaagtattcagagccaaatattttcctaccagtgattatctatcggccgatttgggaaataatcccagttttgtatggcgaagtatttgggctgctcaaagtgtggttcgtctcggggctgtgcgtattattggaaatggtgaaactaccaggatcctctctactccttgactacctgatagtgggaacagacttgtaacttcaactcatccagctcttttgcataacactgtgagttctctcttctcattggaagctcgaacttgggaccctgaggttgttgaggacctgtttaacaaccgagatgccaatctgatcttgggtcttccgctatctctcaattctggttctgatttctggtcttggtcgggagaccgttctgggtcgttctctgttaaaactgcctatgtcatgctg

SEQ ID NO: 106199 - DNA, 2929 bp, Cannabis sativa
ccaaagaacctgcccattttctcttttgaggaatgttaagaacaccatatggatgatgatcactcaaaatataatttctttcaacaagaaattttctttgtgcataaataaccatgtcacgggcattgtcattgtagcaaaatagaggagaatgagttttaaagtatagacctttcatccttggagaagaaataggttcagtgactagtttcttgccttaaccctttgaggacaatggtgaaggaactggtgcaggggcagatactgcttctggaataggggcagtaacatttgaagactccgtttcactagattctgattcgggattagcaagagcaggaaaagattcatcagactcatcagtattggactcaaattcttcttccttgggctcagattcagaagaagatggtgatggatatggagaaggagaatgggcctttaatttctttttttgcagcagatggggaagacgatggagatgaagaagtgttcaaaattaattttcttttgggtgccaactcaattttctttaatcgacttggcttcataggcaattttagaaacccagcagtaataccaataacctttgatgaagatgaacccaatttagcctttgccctagccaccactgagggttcaataggataagagtcaacatttttgactcgagatggcatcaccacttcagatggtggtgcatcgactccaatatcagaggtgatgtcttgaaacaccataggatgctcattagatagaggaaacactttattttgagccttggtcttggtggtgcgaccaacagaggcagtcggagctgatgcaggtggcagtgaggtcgaaacttaagccagaggtgattgtggaaatcagactttagatgcagcaggggccttggacgatgatcctcttcaggtcttcactattttcctttttgcaaaaactgaaactcaagcacactcacatacgattttagagagaaaatacagcaaagaataagttaaaatcgtgaggagaaaataaagaaggtgtgatgtatttaagtgacaagacttaccctttttgatataaaaccactataaagtagtttcctttttttaaaatgaaccaaaagggaaaccaaaactaggtacacactcacacacgatcaaccaacaagttacccctttttttaaaaataaaataaagaaattcgcaactaaaaagggaaacaaaaaaatatattttttatttatgcttcttttaaaaaaaaaatgcaataaagaaaccacaaaaatagggttcacaaaaccatctacccaagatactttcctttattttataaaaataattttatgttaaaaaaataaagacaagataaaaatggcaacaagcacaactaaattatgacaaatatcaaacatgccatataaagataagttgacaaaaataaagacttgatgaccatgaatattttagaacaaataaataaaatgtcaatttttacaaaatgcttcaattagtttagccaaatttaattccttgaattacattttttttagattaaatgataaacgagaagaacaaaatccccaaaaaaaatacatacgaccaatgtgcatgatcctaaaaaagatgacaagccaaatgaaaataggtgttagtgtatgatagagataataacacttgtgatttttgaaataaaagaaagaattttttagaaaaacaagtacaattcaatcacaaacacatattttttaaggaaatcaatcaacatgtaagagtctgacacttatttttttaaaataaactgtgtaatatttttcttgcaaaatttcaagcatatgtgtgtgatagtgtatgcaagggaacaatgcccacatgacaagaaagtctttttccaaatgcaaaagttgtaacctatgaagacgctgtcacactacaccaatggtagcctttttctatggtagtatatcatcttcataactgtgaattacaaagtaccaatttactcaaaagacagctttcacacactaatgcaggtagctctattctttcatgggagcttgaaacaatgctacacaaaggatgctcaaacattaatcatttattgattgtctcaaatatgtctaggaggaattgattatttttctctcaagtaaatacttctaaaatcacaaaaatacaagtcaatttatctttcaaaacacaaaataaaattttcaaaaagattgctagtaagagtcttagtgaaaatgtcagcaatttgtttatgtgtttcgatgtattccaggacaagaactttattttcaagtacttctcttatgaaatgatgacgaaagtcaatatgtttagtttgtgaatgttgcacatgattctttgaaatattgattgcactagtattatcacgaaaaatagttacagtgataagaagagatatataacaaacgaattgaacaaaatttgtaatgccctaatgctaaggcctcctgtagtgctttttcaattacagtgctatcttttctaatcaaagaattttcttaaaaaccatgtcaaattaaaacttttatattaaatattaaactttataactttataaaattatttacaagtaccgggatcccatttttaaacttttatacaaaatattcaaaatacaatatccaggtcgcacagtgactacaaaatataactctagatgtcccgagaccgaacactccaggtcgcgccgccacgacatgtgcaacctcatctcagcccaggctcactcctgttcagcttttgcctttcctttacctacacatggaagcgaaactgtgagttgacaaactcagtaagaaaagaatttaacatatcatgcatataatatcgacttgtatctaggcacccatacacctatttacagggcttaacagatgagtaagaacgttccatactagggtacaaccac

SEQ ID NO: 106200 - DNA, 1449 bp, Cannabis sativa
gcaattgtgactctgggtaaaaaaataaaggcctagccaaaggaatagatgataaactaggaggttcaggccaagcagcatctcgcaagaaacgatgtttgtcttctgttatttattgcaagaagcgcttgtggcgactagcaatatcatcttggtgggtttttactaggtggtccctaatttttgcataatttatttctaatttggattggggttttgaaattctgggtttaaacgggatggcaagttcactggggcactctgtttctaaaacttatggaggataaacttctgaaccagattgggacattgttacaaaaagaaagcaatcccaattcttggatgaaatttaccaaaccagaagcttataaatttgagaaacccaaaagtctacgctctgcccaaaccctaaaaattacccagaaaaattcaacctaaaattgctaaaaccaaataagatgacaaaggtgcaaatcataaagtaatgatcaaacccaaaattgtaaaataacatagaagataagaaaacaaagagggatgaatcgcttactatttaaagtcgggtttcgacacgatgaacgattctccaatcgacaatgcagcgaacgacttggtaatctctttgaatgcttgaggttgaaaaacaaatccgatgaaacttgcaagaagtatgacgtcaaagacaaagatggcatgcaaagcttcgaaaaacctggctggagttttttgtagagaatctcaagaaaaattttgaaatggtaaagatggtgaaaatgtggtttctttttttccttttataccatagggttgatctccgttggattaagagataattggtccaatgggtagaaataagaaagaagtggaaaagatggttatttaatgctcatgatgtgcctcgaaactgcaaaactaccaaaatcaaagggcatgcgttttttcaaaatggattatgacaaaaataccatcggtaatcatttaaaaagtacttttcactcaaaatgactttttaaggggcaattgttatactcaaaattcggcaggtacttaagaggatgacacgtgtcaaccttggggaaaatcctttgagtaaaaaaaagaaccctagttctgtatcacaaaagtctgaataagattgactcgtggactatgcagagaactacaaaaccacgtaaaaaaatgggggtgttatatttttttgtttcttttattttctataatttttttgttctaaacctatcacgaaattaggctcctaatcgttaatgaaaatctacgttaatacgtggataacaatacaagtcaatataaaaaattgtattgtattaaataatactataatacaatatacaacacaatattatacagtagactacaatacatacaatgcatacaataaaatgctatataatgcaatacaatgaggttaatttaagcattaatataata

SEQ ID NO: 106201 - DNA, 658 bp, Cannabis sativa
ccaacttgctaatgaccctaaggatgttctttgtgcgtggtttggctcacattccaaatagtggactcttttacccctttatctgtactttcggaagctagcaaattactacaagatctgcttgaagcagtttacaccgaaggggatcaagtatttggatgtattttttgttctatatacgcaacggggatgggggtgccttctcctcatgataaatattggttctttgacatgaaatctagcccagtaaaagaccgctcaagtttttgctatttttcccaagttgattactcctcgctgactggcacgatagacaaggatgtctaaaagattggtgtgtacatccaagactattacatagtgtaggggatgaaggccaatcacctatcttttcagtgagtcaaaacttacgaccaacctcctttcacacttgggttgaggacaagggcccaaaccattttgcaaatatcgagtaaagcataaaacatctctttgctggctaccaggagaatttcctttgatatgggctatactcatctagggagcggatgtagaagaagggtcggtagccgaggcaccagttcctatgtaaccaacatttaagacaaaaaagaataagactagggcaaataggaagcaagctccagctgaggttctc

SEQ ID NO: 106202 - DNA, 525 bp, Cannabis sativa
aacataatatagttaagttagtattttgggggaattaactaccatatcatttttcttaaatggtcgattaagtcatttttttttttttttttaaattattcaatattgttatcactacaaaaagttacctttatgacaacatatttcaacataagttttttgtaattaaatgtgacttttaattactacaaaaaaagttactttgtcactaaaacatattatttatatataagttatcaccaattaagaacacatttagtcacaacaaattataatttttataactaatctttttattagtcagaaatttttaaccacaacataaaaataataatttataattaattacaaccttttcaattttaatcattaatttttttgtgactaaagataatatatacccacctaaccaaaaaatgctagaaagaattaaatgtaatcatatataatatgcaaacgatatatacatctatatatttatattaaatgatcatattcaaaataattccatcgcattaattagtt

SEQ ID NO: 106203 - DNA, 558 bp, Cannabis sativa
aaggcattgttgatgtctagctgtcgaatttcccaaccacgattaacagcaatggttaggataattctaacagtaggcgctttaatgacggggctgaatgtttcagaaaagtctatgcctggtcttcggtgaaatcctttggccactaaacgagccttgagcctttgaagtgatccatccgaattgaatttttctctaaaaatccatttgttgccaatgaggttctgacctggtgcaggaggcactaggacccaagtgttattgtttttgagtgctgtattctcctcatccatagctttgttccaacctggatgagtgagagcttcttggacattattgggaacacaggttgaatgttgccagacagattgtcccatgaagactttcggcttaaaaatacccacctttgcacgagtcaccattggatggccttaaacaccaggaggttcaagttcagatgactgctggtgtggagaggttgctacaatattttcagacagagagggaaaaataggtgtggcagaagcagtattatcagttcccctctcactgcctgga

SEQ ID NO: 106204 - DNA, 836 bp, Cannabis sativa
gcctttgcacccgtacttcaagagggtggcagactatttctggctttgtccgacccagttcactcctaagggcattaagtacctgtctgccctctttgtcccctacgacattcaaggatggggtgtgtcgtctccacacgaggtcaattggttctttgacttgaagtctacccccaggcaaagcaagtcagggtacttctacttctctcagccagacttcaagtgcctaacgggcaccgtggacagggatgttagtaagattaggggtttggttgacgagtactatttcgtggaaggcatggattccacctatactcagtttcaacagatcgcgatatattaccgtccacccctcacattggcacttagagacagggctcaaaggattgtccatctaccggatggggctcggaatatcactttgttgacatcggaggccaactttgtacaaactttatctgacagactttatactccagcctatgaaggggagagagaagaagtccagtgcttgcctagatgacggagctgagcaagagaaggagctcattcaacttaagtgtgaggctaagttgaagggtgatgcatgagccaagcagtatgctgaggaatattctaagcatgggaaggaggctcaagaatatttagagcaggagaggccgctcgggaagaagaaaaccctcccgaccgggcagaggcccattgaacatactatccaaatcagagagcctgatctacctgctcggccatccacccctgtagaaggaaaggggaaatccatcttggaagagcaggaagattcttaggatgatgatgctccgtccgtgcttgttcgg

SEQ ID NO: 106205 - DNA, 692 bp, Cannabis sativa
ccttttcctctcgcccctgttcctctggtcttttttttttcctttgctttcttcttcttcattcctaaagcacaaccacccaccaccaccaggatggcaccaccacctctactttagatccaaaataaataccaccacctccagccccacaaccaccatgaacacgacaccaccacctccaaaatcacacagaaaaaaaatgaaaccacttagatctaacaaaacaaacacacatataaacaaaactctcagatctaaaccccaaacataaaatctatttctaaaagactgagaggggaaaaatcgtgactgaaagagagagactctgaagaaaaatttacagcagcgaaatggggacgaaatttttggtttggggttttcgggaggtccggagttcgatggtggccggagaaggcacaatcgcatttgtctaagagatcgtgagtggagaaatgcaaaagatgatcttcacggggaggagcagagttcaacgggttttcgttgtggaggagagaggcggtggtggagagaagaccagatctgagttttaaatctggtttgattttttttttctgtgttaacagtggttattgttgggttttgtgccctaaataaaacccattacaatctgattagttataaatttagaattttgaagtgatttatgattacatgtctgttacatgtttatg

SEQ ID NO: 106206 - DNA, 615 bp, Cannabis sativa
ggttcgggtgtggattcgggtcctcatcaaggttcaggtccagggctgggtcccaaatcaagacaccgactatgggttttgtccaagccctgggtcgagatccgaatccaatcacgcgtcaaagtctggttcgatttctggtgtcaggtcacaagctgggtcataggttcaagttcgggtctgggtcgggtactaggtcccggtgcctattattgtgtgggtttgggtcctggtctagcttcggtttcgagtcgtagtctcggttcaggtttaagtctttgtttcggttttgatctaggctcgggtttggattttggtcctgctccttgttctgggttcgggtttgggtttaggtccaggtcctagtcctagttcggttctagttccatttgcaattctgagttcgagttttagtttgagtttaggtcggagttcgagtcctggtcttagtttgggttccggtctggatttcagtctaggtccagatacggctccgggtttaagttcgcgtcgtggctctgggtcaacgttggattcgagtcccaagtttcaatcccgatctgagttttgattcagttctgggtctaagtccttggttctgatcctggtctgggt

SEQ ID NO: 106207 - DNA, 673 bp, Cannabis sativa
ggtcattataaactcccctttggggtgagaatataacacacacatgatctaccttcatgaagttcacaataaagaaaatatacatatcaattaagaatttattacctttgggcaaataaatttcttaaataatatatattaattcaaacaaaaaaataataataaatatatatatatttaaattattacctttggacaaataattaaaatatacacatttaatattaactcacttcatggaatgtgaactaatatatataactactactttgagcaagtaattacacatatatagccaaacaaaataatattttctataacatatgaaatttggtgataaaataatcattgaaaattaataattttcaaccaaatttccaaaaagagatatattaattgcttataatattttgatcataaaaaataaagtgtccaccataacacattatttttgcatcaaacaatcaagttttaaaacttttacaacaaataatataaagatgcgaatataagaatattggtggagactacatagtcaagataaatcaaataagagagtgactatgtggtatggaacgagaagaaacccaaaaaatttactatgatcggcaaatttcgaaaaatcatcaaaaaatatttttaataatttttaactacataattatcattaaaa

SEQ ID NO: 106208 - DNA, 784 bp, Cannabis sativa
aagaaagcataccttataccaaaaattatgtacttgacttctgataaagtcacttctgataaaatcctaacaatcaagtttaagagaaactaaagttaaatattatcctaattctatcgaaattttagcagcataacggctataattgaatgtttccaaaaaatccaaacatattaataacaacaaaacacaattcaaaacaatataaaataatcacaacaacatttagcaatataaaaatttatcaccaatccgactgcagtacatgtattcacacaatctacttcactacagatgaatatttaagatattcaaactcatcctaacatgcctattattccactcatcgattcagcgcagtacaatatattgcagaacccacttcactacagatgaatatttaagatatttaaactctactaaacattcataattaatttataataaaagttagtaaatgtatacctcgagctacctagaaaccgatcaacatataataagtcggatccttacaaattgacctcacaacctagaacataaagaaatactacaaaattatcaatttctttatttagctacttacaagttatataatttatgagtaactatagttattaactaattaatttattactaactagttactaataaaaatacatgaatatgaatgaaaattagtaacttgctaagtagttgtaactaactatttactagttactaaaaaaataaaaatgcatgaataaaattgaaaatagaaaaaaaaaattgatacaaaatagagtta

SEQ ID NO: 106209 - DNA, 1052 bp, Cannabis sativa
  modified_base (531)..(532): a, c, t, g, unknown or other
agatgattcttacaacttctctttcgggaatctaataatgtggatggctggaaacatgatctacaattatagaatcctgactttcctaatagatcaaatgttagttccctataagtgttaattctggaacaaaaaattgtgcacaaatttaaattggatctaaattatacttttactagtaaattaatggtactaaatgataaagaagtaatgaaaaggataaatcagtaatttgaccaaaactaattacgaactgacacaagggctaatcgctggaattgattatatcaatagacactgcataaaactcagtaaatataattctataattactaagatttcaattttatattatttagttaatgagattcaataaataatctaatttattggagcttaaaattataggttcatagtccctggattgccaccttgaaacactgtcaacgggtagaataaaagttatatggatgtttaaaaaaatctattttgaattctcaaaaaattaattatttattttgtaataaatannttatttttcaaattaaaattagggaaaagacaaaagttgtcagaacaaaagacacaatttttgtcttaaccaagacagaggaggcgtaatctacaatgtgtccagacacaatgtaagcaccactattgtaggatgtccctattagttttgtattttagggttaattaatttaatagaaaaatatttgaaagcctaaaaatgattaactagtaaatatttgtctctccattactaaagaaataaatcttgctcatgtgttaatatttttttttttgaaggaaatgtgttaatatttaataaagagctttatatacaatattattttactagctcacactagtcattgtgtgtggtggaaggtctagaagatcaagttgtgaattttgtcatcaatgttctaaggatactgtaatatcccaaaaatgttattatgtttaaaaaggtatattttattaaatatggaataaaatgtgtgtttagagcataatggataagattaaaatcttattaagttaatcat

SEQ ID NO: 106210 - DNA, 512 bp, Cannabis sativa
  modified_base (205)..(211): a, c, t, g, unknown or other
aaaaattactatttttagtaacaattttttagtcttaacataatttttttgtgactaaatgttacttgtaactaaaacatagtattttttctttttgaatgacctaaaacatagtctttagttacaagtacgttatcactaatttagttttagtcacaataagtatttgtgactaaatgtattttagtcacaacaaattataatnnnnnnnactaatatctttagtcacaaactttttagtcacaacataagaatgatgatttataattactcacaaattttattgtgactaaaaataaaaaaatttatagtgcgaaggtatatgaagtcatgggagaatacaaaaacaaggtcaaggttagtgtttggggccaggatttgaggccatgggatttggggtcaaggacctggcaagggttgggtgcggggtcagggtcccggcccattgaaggtcggagtttgagtctgagtcttggtcctaggcaagactcgaggtctaaggtcgggattgg

SEQ ID NO: 106211 - DNA, 1142 bp, Cannabis sativa
atctgcagcagcactagtagtagtactagtagttttcagctttgttgacactaataactgctgctgttgtaatgatctaccagtagtagtactactgctactacaacgaatattggatgatgctttacgacttgtcgtattattattggactttgtaagaaagttgttgtgatgatcagctgcaacttgaactttcttcccaatatttgtgttccaatagttcttgatttcattgtctgttcggcctggaagccgcccagctatcaaagaccatctgcgcatgaataattaattattcgtagtactagttagttgaatatacattaattgttacaatttccactctatactcttaatggttgtcactctttttcgtttacttttctcaaattaatgaagaaatgaagaatgtacatataatgacgtgtttggccaattagtttgtttttagtgatttttgtattgttctttttctttggttgataatttttacaaattaaataatatttcaaacatgtataatgcatacatgcgtcagaattaaatactcgatcgacactctttctagaagtaaattaaatttacaaaaaataaatatagcttagaaagcgacatatatataattattagtgactactgacctgttgcctaagaggttgtgaagcctgataattagctcctcttcgtccggagaaatgtttcctcttttgatatcaggtctcagatagttgagccatctcagccggcaactcttcccacatctctttagccctgcaaattttatctactccattaatgatatattctagtataaaatggaaaaaattaaagacactaattaactatataatatatacctgctcttttaggaaggcttctccattttccttcaccgtgaactttaatatactcactcagtattctatcttccatagcagtccatgctcctctatttaagccttctttagaacaacaaggactcctccccatctctctctataactaatatgaactactacgtaccactcactataatttagagagagggagagagagtagtgtgaggtttgtgctgctggagctgaaactcttttctcaatgctgttccattatatatagataatagttataagaaaaaggga

SEQ ID NO: 106212 - DNA, 541 bp, Cannabis sativa
  modified_base (250)..(255): a, c, t, g, unknown or other
tagcttgttgggctagagtggcaatgatcaaaaactccggtttgttaagggaagtggccttttttttggcttttaagctggtttagttttctttcaataaaagtctctgattatcaaaaaaaaaaaaaacctaagtttaatttttgacggtaataatacttaaattatatttttagaactttcgtaagtatatggctattaagtgttaagtcaatatccacgtgccattttcttattagtatatttaaannnnnntttaaataaaaataaaaatttaacaatctagactaattagggaatgtcatgtggccatttacttgacacctaaccgccaagtagctacaaaagtttcataaatacaacttaagtattattaccataaaaaacttaagtatttatttgtaaccggaagataaacctaagtatttatgatacaaattattgtaatatttatgaagatgctcttataattattctagggcttatttggtacgtcgtattgtattgtgttgtattatgttggattatattgtattgtact

SEQ ID NO: 106213 - DNA, 692 bp, Cannabis sativa
agaaaattatatataaatacaacatatatccagaagaagattatgcattctcaataaaatcttgcatatatcctaaaaatcttgtaaacatgtcatataattgactgaaaataataaaagagatgaatacatatatttatatgtatatatttatattctttgatgacaatgaaaaataatctaatatcgatatagaattgagcaaatatttccttgtttaaatattttatatttgtcaaaaatattatatttatgtgaatacaactaaagaatcattgaaataattattattgatgcaattttatagtgaattttgaatacccaaaagaatttcaagaatattgcattgaaacatcaaagtataggaattacgatgaacatgattaatcttatttaaaaacataagacatgtatttcttgttcatcatttactggagagaatgataggagttgaattcatttaattttaaagagtgttctattatatatattatttatgttattatatatgtgtattgttattacttacaatatttatatattagaaactgtaaaatttatattgtatgatgacatattgaatatatattattcaatatcaacttttgcatacatcttgacgattatgcaaaaattatattcatatattctttgaaatattgtaaaaaaaattactaaataatttcttatat

SEQ ID NO: 106214 - DNA, 967 bp, Cannabis sativa
gattagattggatcggttacctttacatgtcaatcaacatccaatccgcacaagtacagattttgaatttactaatccaatccaatccgcacaagtacgaataatcgcactttgcgaattggattatattagattgaatcgactattttatgaacacccctaattttatgtgtatagagaaaatattttctacttcaacattatttttttaagttattttgttagtattgattttgtgttttgtttatatatatcaatattccgaaattgaatctatttatgcatattaatttatgtattaatttgtgtttttgtaatttgagtataaagacttgagctaactctctttatatgtttgcttaaattcttgtaggttcggtggtgtatgggatcgagagtgagtggcaaagtgagaggtcaagactaggttgattgtggttaacgactatatggagtcgacgaattactgatgatattttctttttgcttttctaaatgttatatcgaccacatgtgaacgtgatatacttatatttataatattaaaaattaattgtataagtttcttggtttataatgtgttctacttttttatccttttaactaaaatggcttcaaaagaattttgtcttttttattgtgttatgtatgccaacgcaatatcataattttatttaaaaaattgtgctcgaaaaaaatcatttatatatagtacataaaaatttaaatgttgatgttatatatgttattttcttttatgatttttctcaacaggttgaattaatttgtttaatttattatatatatattaatattataatatatatatatttaaaaaatagttcaaatcgtttaataatatcaattgaaaaaaagggcttttccattaaaaaaattaattaactttaccaattaataaattcgtattcattatatatgcttatctattattgcaaaaaaaacaaaa

SEQ ID NO: 106215 - DNA, 779 bp, Cannabis sativa
  modified_base (364)..(377): a, c, t, g, unknown or other
  modified_base (563)..(564): a, c, t, g, unknown or other
ggtagcaatttttattttatttttgaaaatggtggtagcaatttttttttaattataattaattatattaaaataaaaaaaaattctataatgcaccccccttaaaaggaatacactgatacatctctatctgttttagtatccgaaataattttttagtcaaattttttctcattgtcatgtaaattatacttatttaagacaacatgcaaaattttaagaaattcagaaaagtttaacacgccgaaaattgcgttcaagtagtatgttgcacccgtgactattttattttatacgcgtgtaaaatatattgtttgaacattgttttctatatagtaaattatttcgaatttcttaaaatttnnnnnnnnnnnnnnaatagctataacgtacatgaatattaaaaaaattagactaaaaaagttttctggatgcctaaaataagtagagggtgacacaatacatccattttaagggggtgcattgtagaatcaccctaaaataaatatagcataatttattttctaaacaaaataaaatagggaaattctataatgcacccnnttaaaagggatacaccgatacatctctatttgttttagtattaaaaaataatttttttagtcattttttctcatggtcatctaaattatagttatttaaaacatcctgccaaaattttaagaaactcggaaaagtttaatgtaatatcctgataagtctaatggtaaataatttgggtttatatttatatgatgggttaattagataataagtgg

SEQ ID NO: 106216 - DNA, 528 bp, Cannabis sativa
aattttatacacatgccgaaagcttctgatgttcttttttacttatggggcaaacttcccaaggaagatttgattcaatttattggtctttcttggctaatttggcagtgtagaaatatcttcatctttaaacaccaagttcaagagatccatagttgggtaagatgggctcttgaaaagttggatgatttttttggtgagtgtaaggaccctcggcaggacaacgctgtaacagcaaaaccaaaatggggtcctcctccttctgactgtgtaatgatcaatacagatgcctctttaattgatgataaaatggggtatggattaagtgctgtgcttagagattcagttggtgatttaattgtggttgaaactgtctttgttccaggtatagcttctatatttttggcggaggctgttgctgttaaattgggggttcgccttgcgcaaaaatggtctgtatcgaaagccattgttgctgctaattgtttaagtatcattaacagtctccaatcgagttcggctcttaat

SEQ ID NO: 106217 - DNA, 2689 bp, Cannabis sativa
  modified_base (95)..(97): a, c, t, g, unknown or other
ggcataaaacccaacagatacaattcaagaactttaacaaaatacttaccttggggcttggctagatactagtgctgataacgtgttataaaatnnnataaaatatataagaagaaaagaagaagaagatgaagagagaaagagaaactgaataagaatttctcagttgtttattctaatggggtgaacccctatttatacaaaaatatgactaaaggaataggaaactaaatcaatattttttaaaaaaatatacaaccaagcattaatagtgagaattaatttagtgatttggacattcataaataatattttataacaatattaatacttattttaatagatgatgtataatagttataaagaaaaattatacttcaaaacttgtttagcactcataacacacgactctttattctattctttaaaatatatcaataaatatcattttttttattttacatcaaagattcacattacattatatcttctctataaattatttaaaagttacaagttttaaaatattttattttttaaaaaaaaaattaaataaaattatattataatatcacacatatattaaaaaaagtttaaaaaattattataatatttgaagctcaataaataatgcttctctatatataatagcttcaatttagcttatttgataaaagactaattttactaaattttatttatattttagagaatgagctatgttattcgtatttttcgaacgaaggatacttgacatgaaaagaggaaattaattaggtcctcctaattggaccaggtcacagaaaaggcttacgagtttgggaacaaattcggcctaaaagctacgcggagattcgtcctacagcaccttcccattcgagatttgaaagtcttactatccttctgggattcgaagagaattagattcagagtgtgtccaattgacactcgaaaagctactcgaaagacctatcacgaacattgactgccaaaagaagccgaacatctacgaggaagagagactcaaatcggaccagcgacgattataccttttctaacataggatcaaatcttatcccctgtgttagactgtcgtagtacgcacatcccacacaccattttgcctgacggttagttcaagcatttactttgcaaggcgaaaccttttggcaacacgtgtccagtacctgcaatggtccctattgtccagctgcttttacgcacgagcaaaaaaccttcttgggggcccaacagtcagattattacatgtatattaccataatagttggcttatagaaaaaacctaggtgagtcctggacatgtccatacccgcactttagcctataaataccccttaatttccatacataaggaggataaaaaaacaagatagccaaaactctgctaaattttctttaagctttcttcttttccaagagacaccaagagggcaaagttagggtttcttgtgaacactattgtaaaaacattatacaagcctcttaaggccaataaactgactcgtagactaaggctcattaatgcctggaccacgtaaaaatcatttccttattactgcatttattatttcttaatctcttattttattagattccgaaaatctcggtacacattttgttgccttcaatgggttctgtagaaagatctaagccatgatgttgttgaaagtatggtggctacttgaaaaacaattacaaaaaagactcttcagggtggccttgatgctatcatggaagatgtaaaccctctctccagagcacgctcaatagagaaatttgagagaatgggatacagaggttgacaaccgagagggtgacctaaacaagcatcgtaagcatgttaaaaaagatcgagatgctgaagaggaggaggaagatgatgatggagagcacgtcaatgatgggtattataagtatggttattattatgagtgggaccccaaagtgaatctagtgtctaaagagctgcatgagacccgagaaaagttagcccatcaagaaaggctttcacaaaagatggatagaatgatggctcgtctctaagaaaaattcggaaatctagaaggggactatgaagcaaaaccctcagtgcaagttgttgacagaaacaacaaggaaaaccctgctaatgctgaaacctcaactcctgcgaaggataaggagaaggcaaaggtaggtgaccctcaaaactcgacatctcttgtacctcctaggaaaagtacgaatccaaccaacagacctatgcaggcacagaaggccactgatgcctgtgagcttagatgcccttctactctaaaaggtcatgttgcgcaaaaagggatttgtgtaaaagtaccaaggcctaggggaaggaaaaactattctagtgatttcgttaaccaggacggtgggactggggaatagtaatcagacgaaagctggttcactgtagacctttgaaggtgtctcaatgacaagtacaaaaaagctaagggagagatctcaagaactatctaaatgacaaagcttgtagacgtgacctcctagatagtgacatgaagtgactggaagagaaaattgttgctctaacaaaactcattcgcaagcaaagtgggaccttcatagattctaaagatgaggacctggagtcgtgtgttagaaggatcatgaaagtgttgggttttatgcc

SEQ ID NO: 106218 - DNA, 541 bp, Cannabis sativa
gacctgagtggaaaaataagctagacgatcctcggtcctatgtcacgacaattaacaactcaatgaataccttaactcaaaattccgaattaaaaccataatttaaaaccgattataattaaaaactcaatgaataccttaactcgaaattccggattaaaaccctaatttaaaacctattatacttagccctaaacaacttcaaaatagatcaaatagctcaaaaacaatcaaagacaagtaccaggttccaccccgagccaaaacagggttcagagaaaactcgagaattttcccttgcaggtaaccggtcgaccgattctggtacaccagaaccaaccggtcgactagttgctggcagaccagaaaaattatgggttttcttccccagcccaaatcaaaaccatcgcagacctaaattgcatttccagaacaatataacatacaaaatacaacatatccaacacatcaattaaccacaattcatcaattagctcaaaaacaccttctctaatggaaattaatctcaatttatcacttt

SEQ ID NO: 106219 - DNA, 639 bp, Cannabis sativa
  modified_base (612)..(614): a, c, t, g, unknown or other
gaaaatctcacaatatgattctgctattttttactggccaactcaaacaatgagaaatagatattcaaacacaaattatagtgctaaattgttttgtttcgcctcagagaattatagtgtgtgtatagtcttttactaacttgtgtaacatagcatagagtttacttgcactttaccgacttgtacattacaattttcctattatgtgtatatacacaatcatagaaaagtatacaaatataatcaggaagttttgtatgtacacttaaaattctcctgaataaaagatttgagagctgtttacattgttggatataattattgtagaaaatagtaaattgaattgtgtatgtatttcataaaatagtctatatttatatacaaagttatgagactaaatgagaaattattaaatacaaataggaaattagagatgttcatccaatctaattcgtactattttattcgtagtgcattcaaatcgcattacgtgcggatttcaatttttggattcaatccaatccgcacaatagttcaaatctaatctaattcaatccgtaaaagtgcggatttgaacggttattttggatttgttactttttaatattaaannntttaatatttatgaaaaaaatattt

SEQ ID NO: 106220 - DNA, 888 bp, Cannabis sativa
atctaaagtggtgtagtaaccatgagttcataagaataacaatgttcaccccagacgcggattatacgtcagccacaaggccaccctcatctttgtctcgtccttattcgccttcacactcctcgtcatcctcttctgctttctacaaaaacatacatattattcatacatattgatatctttataagtgtgtcattaatatcttatcttgatataatttttgtgtttcaatggagttagtacttagtattatgtatatctaattgtaagctctagatgtagtattttatgtatatactacaatgtgtgatacacttggtttttcttaagaaaaatgagatttatatctctttttctgttatgtaaatttttcatctaaaactgaaaaatgtagaatatgggttgaagaggggcagactgctcttgagaaagccagtatatgtctgcttaatattgtggccccgtgggctcttaaacactaaaaatcttgtccttggtggggttggtagcatcactgtaatcatggggttcaattaaagtcctattcaaataatgaggtatattttcatatttaaaatatcatatatttatatttatatataagtaatatattttctgcaattacacactaaaatttattttaataaaagtaatattaaaattaaattttgcagaaacatcgtttgtttttttaaaaaactatagagaaattatcatttattaaacggagaatccaattgtatgtagatctaaaataacggatgatcctaaaggacaattaattcaccatacaaattgttgagtcgatggaagattaagataattatgcttagttttatttttcatagggttttctatattaacactttaattaataattatattctt

SEQ ID NO: 106221 - DNA, 584 bp, Cannabis sativa
  modified_base (525)..(532): a, c, t, g, unknown or other
tccattttataggacttagcctaccaatccataagccaggtaggttagacaatgatcaaaacttaacaccgctcttaaggacttaaaggcaacacacgttaaaataattaattaaaatcgtatatgcttcctaacatgctctcacattcacaattatttaaaatactaaacaagtacgggcttactgaaccgtgaaacgagctttctctgatgaagattgtacatgtctcagcaagcttcggtagacaaacctggcggctctgataccaaaattgtaatgcccttatgctaaggcacgctacagtgcttttttttcaattatagtgcaatctttgctaatcaaagaatttttttcgaaaatcgtgtcaaattaaaacttttatattgattaataaactttataatataataaaatatttacaagtgtcgggatcccgtttgcaaacttttaaaagttaacattcccaaaatacactcattacacgtcgcacagcaactaccaaaatacaattcccagatgtcccnnnnnnnnacactccaggtcgtgctgctttgacatctacaatctcatccgagctcaggtt

SEQ ID NO: 106222 - DNA, 746 bp, Cannabis sativa
ttttttttgttcattatggtgttgatgaattgatttctttctactacttttattgaaataattagttcattttaatatatagaattaattagtttattaatttactgccttgataaaattattttggtattgcatcaatttctataaaaaaacaaaaacaaaaacaaaaaaacaaaaaaaatggtagtttaaaaaaattgcttcagtaacaaaaaatagcttcaactgagaatttttttagtgtttcattttttaaaaaataaaaaagaaaaagaaaaagaaaaaaaaaaagaaagacaattttaaaaatttttatggcattcttttttaaataaaatgaacttttcccatatttttaagtttttttttttcaaaaaatgccatatttagtacaattaagtttttatgccatatatatcaaaacttatctttcatttcccatatttttgtaaatagccctttataaaacagctaatcctattcaatctgcaaagtgcgtgcggattggattggattaaaaatccaaaatctccacttgtgctaattggatgttgattgacatgtaaaagtaaccagtccaatccagttcacacacatttctataaaattttataaatttatatatacaattactattgggttgatccgtcattgccacaatcacaacgacaacaccaccaccaccaccaccaccaacaacaacaacaacaacaaccacatcaacaacagagagagagagagagaga

SEQ ID NO: 106223 - DNA, 513 bp, Cannabis sativa
  modified_base (52)..(59): a, c, t, g, unknown or other
  modified_base (393)..(400): a, c, t, g, unknown or other
ttaataactatatatatttctaaagggactatatattattattattattatnnnnnnnnttattattattattctaaaatatactaattattttttttctttcttttctttttatcaattttgtagtaataaatagaataattattgttattatttactaaatcatcattaagcgtataaagaaagaaaaccaaaagacacataataaattttgattattatgtattattttaataaaataatatattattaccaaaaaataaaagttgaaaaaaatattatatttattatcaattcattactcttgataatgacataataatattaataataatttaaaattaataactatatatatttctaaagggactatatattattattattattatnnnnnnnnttattattattattctaaaatatactaattattttttttctttcttttctttttatcaattttgtagtaataaatagaataattattgttattatttactaaatcatcattaa

SEQ ID NO: 106224 - DNA, 969 bp, Cannabis sativa
  modified_base (27)..(31): a, c, t, g, unknown or other
ctccaaatgagttgattcaagatgcgnnnnnaagaagaaaaagaaatctaaaacttttatgttttgactttttccaaaattggatcagaaaatagtgaaatttaagattgaagttttagctttattttcttgtagaatttcctctattctatagattgttgttttccgaattttgatcaattgatatattccaagtgtgaaacctaaaaccaaagaaaacaagcgtaattctattccaaaaagaataacaaagaaggaaaacaactataaaaagtgacccaaaacgtatgctaaaaatagcctaacacttgaatcaactcatttagagttcgtatgtgaaagttatgcataatttactaagagaggtcgaagcaggaacattttggttgtgactaatatttgtagtcgcagcgagcacgacttatggccgcgacgagagactatagaaatcccatttttttacttttcgacagtcgtcgcggcactgactccgtacgggtcaaggggaactgagtcttttctcgttttgggctgaaaaactctatttaatgaaagggggcgaattatagagagatggacagaatagaaccctagaatcacaagaataagatgcttggaggaaacgtgggtgatttgtgacaatctttcatctagtttccttctcttctcttgatttcttatatttttatttgtgtatctagtttaattatggatttgattatgagctaaacttcctatttagacatgtaatgaatattgtttgagattatttcatgagttaatgttagttaattcttctttcttcattgattgtatgatttatttatctttgtgtttattgcatgtttaagcttgatcaccttatgcatgatttgtgatcctaatgtgaaatctgaaaagtaaatgttaggaatgctttaaatgaataaacataaattttgatgtgaaacaagagtatttgcataactt

SEQ ID NO: 106225 - DNA, 1447 bp, Cannabis sativa
  modified_base (538)..(563): a, c, t, g, unknown or other
agggctaccatatataagaggaagaggtaaataatgcagtgttgttagttagtaatgttcattaaaagatatatatatatatgaaaattaatattaaaattttacttttttttttggattagatagatctcgtaaatattgaatctaaaatattagataatctgatcagtctaataaatactaattctaaaaagttaattagaattttttacctgaactttgacttgtaacaaatcatatctcttaactattgagattttgtctaattgaataaaattggacaaaaatccttaaatccaataatctcaataattaatgcgcatttttaaccaccttacaagttcaggtcaaaattcattggacaaaaatgctaattaaccattctaaaatattaatcgcctaaaaacattagactgatcaatgaagaccctaaaaatgatcagaatcacaataaaacaatttggagatgagatgagattagtcaaatgtcgcatgaaccactccaaacgagcataactcaataataataataataatnnnnnnnnnnnnnnnnnnnnnnnnnntaataataataataatgatgtgtaagttgatagtacactaatgaacataatgagatttgaataagaaaaacatattaaacttaccgaaaatctttccaaacaattccagaaaaattggatgcagtagtcaaagcattagtccatccatcaactctgttatcatctttatatcgctgtctgtggttagcaagatcagtttcataagtccctttttgccaccgagcttgagaaggatctatcttataaaaaaagggtataattgaattttcacatttcactttacaaatgtgctcaagttcttgtaaacaccatgccgaagaagtataatgttcagagaaaataataattgcgagttttgattcctcaatggctttgagaagattaggcgaaatctcatctcctggcttaagttttttatctgtataggcacgtattttttcacgatctaaacgatccacgagatgactgagtatgttgtttcgagtatcatcgcctctaaaactgatgaatacgtcgtactcataactttcatggtgatccatatataatcacgaacaaaaataccaataccagaaataatttacacctacttactcagctcttagaagtgaaaatatacacatttttctcaggaaaaatactcggtgaagatgatgaagcaaagaaggcctggtcaggtcaacgctctaatagaccccattctactaagcatgtgctttcctccatatggtggggaccatgttttttttttcattcttcacctaattaaatgggaattttgcctaggtagttagtggggtttgaacctttaccctctaacctatttaccaactaccttaaccattacaccaaggttactattatgtctataaatatcatctttt

SEQ ID NO: 106226 - DNA, 2977 bp, Cannabis sativa
  modified_base (670)..(673): a, c, t, g, unknown or other
caacaccagctactagaactcatatccaactcaaattaaacttagaaatcaaaccacacaccaatttaaccctaacagccactaaaactcaaaattacatgcaaaaactaactaaaaccgaagaaattcaccaaataagagtttttacggtgtacctcaacttgaatcacccttgatttcttgctaaatttccaaaaaatggaagctaggttaggattccttctggtcttgtgggagtcgaacaaacagagagaaagaaatgagtttactcttgatatttttgatttatttctttaattttcttaattgatggaagaggaaaaccaaaccattaactaataatggccagctgccattcaagggacaagccacccaatcccattatgttaaattcccaaaattcccttttagcttataacctaagtaattttaagcctaggggtaagatggttaaaagccataaccccactcaaactcagtattttatctatctcaaatatttatcccactaagaaataggttctagacttactcatgcggctcaaacggccatccatcgcattttccattgtcaccgagcaaaaatcataaaaattgcataatttacatataacataaataatacctctagagtttaataaaatctacagaattgagaaattataactcnnnngctcatttctaaaaataggacccagttaataataaactcatgcataattaaaaaatatcaataattaacggtaatcgcctttactaattcatattctaaaatgcggtcattacacacaacccacgttgtatttacaagtcttgcaaattaattcttgccttctcggtgtcctttgacttcccattgatactttgaagattacctagtaagttgtcacacacattttttctcaatatgcattacattgagattatgtcaaagaaaaaattcttccagtactctagttaaaaaaatatacttttttttttaccaatttagtacttcagtagaacattttcgtttcacacccccaaactatttgtgttttctagtcaaatgaaattgaatttggtccaattgagataaaatatcatcccccatcaatatagtgctctcttctcaagcttcccattgtattttttgcttttccttcttggatcattcattgggagaaaatgtctgtggcccacatatctaaccttactatttaggtcaacggaaggagtgtgttcattgcaagtgggatacaccatgtacccttttgtgcataaaccaaacattagatcataagtaggaaaatcatttattgtccataacacggctgcacgcattgaaaatatagttccattgtatgcatctcaggcttgaacacccgtctcccacaactatttcagttcatcaattaatggtatcataaacacatccatgtctttttaaggagatgatagacctggaatcaataaggtcaacaataacgattcaaaactcatgcacttccagggtgacaaattatatgggacaaaattaagttgccacaatttataagagttgctcatgttcccaaatagattaaaattgtcagtagccaattctagcttgacatttctaggttcaacggtgaaagacggatgaagccggtcaaactgcttccatacttcagcatctgtaggatgcctaagcacaccatcttcttttgatttctgtgagtaatgccaccacatgatgcatcattcagaaaaaaaaatattatatatacaactaattaaatattttttaaaaaacaaataaaagcaagaattacatgatgctaagataacattccatgctgcttataaataattgaaagggatagaaagtcatgttatcgtaaacaatattgccttgtaacatctctgtggcaatgaagaaagtttgtacacataaaatgttgctatttctttttattgtatgtcttttgacagtttagtacagattcatatctataagattaacatgttacttttacattatattttgattactacaaagtttcattatattaaacatatataattataaatggctcatgtgttataacttagtcatgcaggtcaatagaattttgtaacatgaatatacaattgtaaacactcacatacactccactcataaagatatgtccatgcaaagtgatccaggtaaataccttgtaatactaaagagctcgattaagatcaccgacctctataaaaaagtcagctagattggaccatgcaattagaaaatttggttgtatatgaagagtctcaacatagcaactgtaagcttacacaaacaaaaacactagaaaattcagcaagattagaccatgcatgcaattgcaaactttggttttattggataaaaatattgtgttctagtagaattgttgtccaagactcaggagttttgagtcaagaataaattatattcatacgttaaataaaatacatcaaccatttttattagattagacttgttgagtggttctgcaatagttttgttcaagttttctattcatatgatttaagatgaaaaattgaccaaaaaatgcaagagaatatctcaagctcaactctgaagtataatcaatcaagtagctatattactcttttgctgtaaatagctaaggcttaactgcttcaaataaattatagctaatgaagtctaatatcaaagaaaaggcttacagatgaacatgataaaaacatggactaaaaatgtaagtcaacatcaaattttcatctgttacaaaatagtatagtcaaaagaattttgacttaattctgtcaaaaagaatcaaaaaataaattatctaagaatgaatcagttaaagcttcatcaattctctgtcaacataaagacactttgctatttatttcttctttgctttttataactgttatacccgaaatttggctacacttcagaaagtgacacgtgtcttcagtggaatatgaatcacct

SEQ ID NO: 106227 - DNA, 6683 bp, Cannabis sativa
atgattaattttttagcttattttagtattttttcctttgttcattcaagtgagcttttcattttatttgattgttatttcttggccatgaataacaatttgctaagctagatcttgttccggaagggctagatctagtagttaaacttgaatggagcaagaaaaatcctagatttaggtttttctttgtaagtggaataggaatatttcatttatcttgcataacataagaattgatgcttaattagtgttttgcaatctggtttgatataggaatatgtgaatatagatggtagaacttaaattgtgagttttggaaaattctcaaaagcctagaagaatttttattatctctgtgcaaaaaatgctggagtaatgttgaaccgatgctgtaacaactgggagaaaaacctgactagaggggaatagctattcaagccatttttttaccatatcacacttcttgcaagtaattctctagcattagtagcattaattttagcaagtttaattactgccattttaaatttgaatcattgctcaactattttcatattttttcctcttactttaagttgtaattagttggttttacatcatattttgtttgcaaatagtgtggagacaatcttacttatcactttattacttgtgtgactacgtatacttgcgtacataattttcacaacaatagagttgttggtgaccccaaatggattatgttatatctgaaaatgggtgtcaaagctctaaccatcaaagattttgatcttgcccctctggtgctggatttgttatttgatcgagagtagtttttcataagcccttttgtttcctagatgcctagactagagatctgatgtaatgcctgaattttaaaacttgctaatttgaaaataatctaattatattatatttatataacctcgtaaattggtatcccgagtgtaaaaccacttgttgaaaatacatgtattgtatatataaagttacataatatttttctacaaactacaagacaactacaaaatatagctcaaaatgctgaaagaccgaaaccctccaggctgcactgccgcaatatgtacaatccttgccaagcccatctcactgctcctccaacttagctttacccttacctacacaaagtagcaaactgatgagccaaccgagtcagtaagatatgcataaatatatataagcaatgctatactggctttatgtttaagttgtcttgtgctcaattgctaagctcaccaaatgattaaaaacgttctcaaaggaagtacgaccactacatcatatgcactagagtactgtctccgtactcgtgttggtagggccataattgtacttccgagagttactgagtgttgtaccacatgcactccgtaccccctggtactcgtgttggtaacactgtactaatacccttaaaactacatcaatgtcagtgttagtagtgtaaacaaatgataatgtgcattcattcacatatatatactttatgctatcttacctcatttgcgtgcttaggtgtgccggtcagcctgagtagaatagcagctcgacgtgttacaggaccctaatcacaatattcaaaatttcgatgagagacacgctaagacactttttgggaatctaaaatcaaaactagaaatatccctatggctgaataacatggctataccctaaacaacacaaaaacaggtaaaacaagggttcaaaaattgtcccaactggtagaccaattcccgaaccgaaattctagtttgatggggtttcctggggaccaaccgcttgagtggttgctacaggttcccctaaaccggtcgaccggttcaatgcaggaaccactaaaaatgtccctaacacttcaaataaaccccaaactttctaataatctcctgaacacctgtatataccacaatagacacatttcaagcaacagaacccaacaatttacatagaatcctaaatcaccattaaagagcaaggtttgagttcttaaactcaaactttgctcaaacatcaccacaaccaccaattctagcataatttaacttaaacaatcccaaataaactccagaacaccaacacaagcaccaaaccacaacatagcaacctagaactaaaattcaaacatttaaacataacttgagcttgaagaaaacaaagagggagaagctaaagggattttaccttgattgaggatgttcaaaacctgctagaatctcctaaaagaagctgagaaatccaaaccctactggtttcttcgagacttcgagagacagagagagagagagagtgtgtgtgtgtgtgttgagagggaattgtattatttcctaggtttttccttttaaattaaatataagctaataatgtaataaaattaacttaaaatttgattgttatcctcaaaataaactcacaaaaagacaaaaagaaaccttagcaaaatgactattttgcccctatacataacccaaaagtttagtgataaccaagtgtaattcggtcatttccatacaattccctgatacttccaatgtctaacaatgatgccccgctattaacatcctaaaccatacaaaacgttactctctaatggcccaacagcgcgttccaccgctatcgaacacaattacaaaaacaacgagaaattcacataaataagtctccacaaatacaaaagtcataaataataattaaatctcataaataaaccctaattatttgataatctaacatatcaacttaggcggtctttacatctgagatgcatggaggtggtacgaaaagcttggcttctagtggttaatggtgctaaaagtttccagcttgtttatagactttctaatatagagaaatagttggctatttggagcaaaattgttttggtatttacaaggaaaaattgattatccttgataattcctgcttgaaattcaacttcgccccactctcccgaaattgcccagctagaagctaatattctccttgaaaaggatgaggttttggctcatcaggatgatatttggcaccaaaaatctcgtgaaacctggttgtgggatagagatcagaatactaagtttttccatgttgctactgttattggaagaaagataaactttgttggtgttatttcataagacggggtacactggatatcaggatgcgccaatgtgggtaaatatttcttagataaatttaaggatatttatcaatcttcctagggtaatatccataatgagctggctgatttgatctctccttctatctcaagttcggtgaatgaagagtcgatgagaatctcgtcaagtgaagagatcatatgtgtggttaggtctatgggtcaattgaaggcattggggcctaattgcatgcctggccttttctgttgtgctcactggaataatatgggtttgaatggggtagatactatgactgagtttattcaaatggggaaatcgcacctttattgtgctcatccctaaaagagttggtgctgcaaagtgtgatgaatttcaccctatgtccttatgtaattttgcttacaatgttatttctatgatccttgcaaataggctccgcatgactctccctgataccatctctcctttccaatctgccttcatctcaggtcaatagattgctaaaattgacattttggcccatgaattaatggacttgctcaaatagaaaggaggggcaatgaatttgtgagacttaagcttcacttgtctaaagtgtataatcgtctcgagtgaaatttccttacaaaagctcttcaagcatttggtttagaagattatctcaaagtgtatctcctctattagtttctcaatcctccttaagggtggtctgctcgcttaaacaattttgcccctcacgtggtattctttagggagattcgatctcctctaacctatttatcattggcagtgaggtcctttctagactcattctttgggtggaagataatgggggcatccatggattttctgctaatccccgttgcacgaccatttctcaactgatgtatgtcaatgatacttttcttttctgtgaagtagagttggctgaagtatctaaggtgaaagattgtctggatacccattgtgcttggctaggccaatcaattgagattgccaaaactatctgtgatgagatggataaagtggtgcagaagttgtaatggctgggaaactccaataaaaatcatttccttgctcttactaattgtgattcgatttgcaaaaccaagtgtttttgatgtcctacttagaggaatgccacttgacgtgactaaagtatattaatcccgctaaccggggtccataggctaagtgatttcaaataaatttaatttaattaaataataacttgcaataaaaacatactttacttttaaccaaaatattaaagttacatattcgggaactcataaaattattttcaaaatattacaagttatttcatacaagtcgacctaagcggcaaagtagaatttatatacaattccctattagacccaaccctagtggtctaggttggctggaacatgtacaattcatcttcaaaactctcaaacttatggctaacccgacactgctttacccttgcctgcacaataaagagccaaggcgcaacaagaaagaacaataaaacagtacgaataattgttataatcatatttcttacttttggcccctacgtatataattgttccaccgcactatatatcaaattatcttatatccgcatcaaatttctatataacatagacctatgtgttactctcacacgtctcttttacatataaggcctcaataggatttatcttaagtttagttactgattctaacctagttatgccttacgcgcataactcttctcatttattcatataactctttatcatatatatattacaatatgtactaattagggtaataatcctaactcacgatttcatataaacaaccatataatataaaattgttccaccgcgctatactctatgtgcttagttcactgtgttacaaaattttcaatgtatgagaagaattccaatctaaatgtgatattgactaagtgtcagtattcctagtcacaatgtctcgagtttcacacaatagggttaatcctaaaattacatttcatcaaagttcacatttaagactccaacactggacaaagtaatagagctcaaaacgagctttccaacgatatatataacgttcaaaatagagttcagagtcaaaagttatgctcaaaacaaaattgactacaatagcaagagatgaaataaattggaactacctcaagcgagattgggtaggggcattccccaatttttaggtgaagcctcgccgcgatgactgggcttaaaaacctagaaaactcaattttaccaaatctgaaaatatactaattcaattcaaacttcaactaattcatgcagtcaatatttaggcttcaatcttagcataacaatcataaacacaattatttctataagcttctacacccataaatataatcaattccatatttttaaaattctcaaaatcaaagcttaagagaacttaaacaaagttcatgctcacattcaacaaagatagccaagcaaacttcatgcttaaaattcactttattctcaccaaaacatgactaaaaagtgacatcaactcagattcaagatcataaggcaaaacacaagcaaatatctagttttaaccatagttttcaccttacaaccatcaaaatacatcatgcaataacatcatagcaatctaactttattaaatcaaaacagtaagagatgaaagaaattggaactacctcaagcgttcctcaagcgttcctttagcttgctccaacaattaacaccaaaaactaactccaagagctaacttcctctcaaagatttcaaaagataacaaagaaactttaaaggggaaagtagaagaagagagggtcggtggtgagggggttatagctacaaaaatagtattctcattttctaactcaaccaaaaatcatatattcaattttagtaaaagatggtcaaatgaccatttttctcctagggctaataaaatacataataactaccaaaggtagtttactcattccacatcagacatattcatcccatataatcatatacatattttatgttattaccctaagcacataactcataaattttgaccatgaactcggttcgagccaaaatgctcgattgtgataaaaatcacttgcaataagacaaaaatcacctccctaacttgtcaaaaatcacctgcaataagataaaaatgaacatactatataataatataatctattagcacaatatataataaaattataattttacctttcttgggccaaaattacaaaaatactcctagctcataaatgagatcttaaatgtaataaatttcaaataattttacataattaattatataataatataattcttcatttataataattaaattttatttaattagggtttctaatccatttactaatcttaagatattacaattttggtggttggggaatttgaaaaaccgtgtttttacaaatgtcaattatatatacgaaaatgtaaaactgtatgcgtctgcagaagcaaaaagtaattctgttactgcagaaaccag

SEQ ID NO: 106228 - DNA, 525 bp, Cannabis sativa
  modified_base (240)..(240): a, c, t, g, unknown or other
tacgaaacaaaccctaccaacacgtaattggacattgaacccatttcatatgatgggagttgcaggggtcttgggcgctgctttgctatgtgctattcatggtgtgcgtcggtttggtgtttgcccatatctagagttagaataacctattgagaatataacaaaacctagtgttttggttttgggtttcccgggatgagggttttaatcatgtaacttacccggtttcaaaatgtgatnagggcatccatctagcacaagatttccgttcaggttggccagcacacttgcattcggaaatcaggtaagaactaaatataatatgtgatctgaatgtatgtatatgtgtgtatatgcatgcttagattattatttgcactaccaacacttgtatgattatcatatagagtgccttggtatagtgagtgttatttgtgagttcaacacggtgataccaacatgagtacgggaaagtgttgaggtgtgtggtatatcactcagtggtactcaaggtacgaaacaaac

SEQ ID NO: 106229 - DNA, 601 bp, Cannabis sativa
agtgcttcctgatcttatagcagagaaccaagggggattggttcatggaagattcattgcacataatgtgttggtttgtcaagacttggtgaggttctatgggaggaaaaattgtagaccaagttgtatgataaaaatcgatttaaggaaggcctatgacactatcgaatgggaattcttggaagaaatgatgactgcattgggattccctagccagttcattaagctcattatggaatgtatctgcactcccaaattctctctgctattgaatggctctatgtgtggattctttaatgcaaaaagagggttaagacaaggtgacccgatgtctccccttctctttgtgttaggaatggaatacttatccagaatcttcacaaaggtaggagattggccaggttttaaatatcatgacaggtgtgcatctttacgattgaatcacttgtgctttgccgatgatttgttagtcttttgccatggagatttcatctctattatgctgctccttaaagggctgaaattattttcagccacatctggtttgcaaccaaatgagcataaatcagcaatatactgtgcaggaatgcaagaattagaa

SEQ ID NO: 106230 - DNA, 596 bp, Cannabis sativa
  modified_base (174)..(184): a, c, t, g, unknown or other
ttcaagtcagaagccgggttcagcgccaaggccgtggggaggggatttgggtccgggtctggtcataatccaaaatttggattaagaaaaaaaaactgtttaaataaatattgaaagtgattttttttaaataaaaaaaattaatttctaattataaaattgaaaagtaaaaannnnnnnnnnnaacatgtttttgaaaaatattttacttttccactttgaaaaacagaaaactaattaaaaaaagtgttaccaaacgccacctaagttgttaataaattgtaaaattgaaactagtggggtccacttgtatggccggccacttaaggggtttatttagccattattttatcttttttattctatataacttaaatcctaaccctagatgaaatcctataaatagataatgataggctcctattttcaaatccttcatcagactattctgacaaataactgaaaataaagaggctcctatcaggtttcaaaatttctcctcttcttccccttagaatttcaaaccctatagtgaagactactggctcaagaaatttaagtcaatactcaatcatagtgtggaagattgtgaagaa

SEQ ID NO: 106231 - DNA, 881 bp, Cannabis sativa
aatgtgtttgtgtctaggttcggggttgtgtccctgtagtcaggtcttgggcttcaggtacaaggttgtgtcccgtgtctcgagtatggggtcgagttttggggctctttcccggttctggggcccaatttcgggtctaagtcccccatctaggtccagatccttagtccgagttttgttccaagttcgagtttggagcctaggtcccccatgtaggtctggatcctagttcacggtctatgtccaagtttaagttcgggtttggatcccgagtttgggtccgagtcgaggtcctagtatgggttcaaggttttagtgggttccgggtcccggtctgagtcctagtcccttttcaatatcgggtctagatcctgatctgggtcctaatcaaagtctaggtcgcagactaggttctggtctgggttcaggtcctcagtctaggtctaggttcgggtctgtatctgggtctgggtttggggcctgggatccaatctcggtatgtgtatgggtctatacccgtgtccaggttagggtttaggatttagggttttgtgtttagtgtttagggatttagggttttgggtttagtctcggcttcaatttcgggtcacatggtatgatttaaggtttgggagtgggtctgggtccgagtccttatctgggtctaggtccgtgtttgggttcaggtccgagtcttggtcacaaatccaaacacacacctcatgtttagtatagtttgagttctggtacggatttgggttctggtccgggtctggatcttggtgcaggttcgattccctgatttacacaccgattatgggtcaggtccaagccctcgtgtcttgtgtcctgcgtcacgggccaaaatccagatccttgtc

SEQ ID NO: 106232 - DNA, 775 bp, Cannabis sativa
  modified_base (399)..(399): a, c, t, g, unknown or other
ttgtacccagtatttccccttacggattacgacattaccgactgtcataatcaccgccccttacagagtctgacatcctcgtcgaccacacttctggctgggtcaaggctctactaccattttgtaatgtccccgcttcaagcctcgggccttccgccactgactaatggctcttatacacgagtatgtcactctagctatttcatggaatgatgattgaccctacaaaccaacaaaagtatttccagcatactttgtccttactcgcacactttttgggaaaacttcctaggaggttacccatcctaaaattaccccaggtcaagcacgcttaaccgtggatttctttcgttatgggctaccgaaaaataagatgcaccttgttgatataggttgtancaatcaatccatttaagccatcctcaattgtgtagtcccatacctacacagtctcagaatcaccacacttgaatttctcgaagcgatgtgagattgcacaacttacatgatatatcaccttatagatcacaggactactaactgtcacaccacatctgtcgcgtttgtggagattctagttgtgactggagcacggatattagggtcaaccgccataagatcttgaggaagacccgaggaggcagatgtcatagccggagttctccttgtgttcaccatgatttttatcagataaattaacaactcgttctcaatgatagcaccaaactgttgatctcagatttggccaacagacagcgaagtcgtatttaatgct

SEQ ID NO: 106233 - DNA, 808 bp, Cannabis sativa
aatttcttttaaaaataatgagctttagctttaaggatattcgacctccattattagttctacatagttcttgttttaatgagattcatccctaatagatgtttattcattagcaatttaatatcatagaatctcgaaagataagtattattgtaagtcttttattcttaacaatggtccaccttatagtgactgctaagagtagggcttacaacgtatgaaacaatggtagaagctcatgaaatagaatggcattgactctcgcctaaacgggacaacgttggattcttatttcaattgaataaaaggttgctaaaatagtgtctattttagatgagctgataactctattgaatgagtgatatctttgactctcgcctaaacaagacactgatatcgatttgttagaaactttagaaattatttaagattcgtgtttgttttgtatttttacatatctttattacttgctaaatgcttaataatttttgaattgtgtatgaatttatattgaaacttaatgacgtttattatcaatcatgtaagtataaattttgagtcttcattgtttatctaacttggtttgttgtttaattaatctccataagattgtcatccgttaaataacataatagtgttaaatctcgacagatagtatttgtaaatgtgacatctagttgactcatccctaaaaaagaaaacttaaaatagtgtttacaatatgaaacaatgaagaaatttttaaaataagaataatttttactctcgcttaaacgcgacatcgttaaatttttattttaatcgaaat

SEQ ID NO: 106234 - DNA, 1014 bp, Cannabis sativa
gatataattgttacaggtaacaactcaaacaaactcaagcaattcacaagcaaactcaacaaagtttttgctttaaaggaccttgggttgctgcattattttctgggaatagaagtatgcagagatgatacaggaatatttttatcgcaaggaaagtacatagctgagttgcttgataaaactgatatgcacacctcaaaccttgttcgaccaccatgacagtagggaaagctttgtcgatacaagatggcacactaatgaagaatcctacagattatagaagcttaattggggcacttcagtacctcactcataccagaccagatataagcttctctgtgaacaaattaagccagtttcttaaggctccaactgatgttcactggtctgcagcaaagaggagaatcttgaggagatatctaaagggcacacaagaccatcatggcttgttgcacatcaagtacagtgacagattaactctcacaggctattctgatgctgactgggcatgttgccccgatgatcgaagatcagtagctggttactgtgtttattttggagactctttggtgtcttggtcatcgaaaaagcaagccgtgatctcaaggtctagtacagaatcagagtacagagcacttgctcaagttgctgcagaaatcacatggattcaatccctactcaaagaagtgaattttcctctgcaaaatactccaattatctggtgtgacaacatgggggctagtgctttggcctccaatccagtttatctagaactaagcatattgagttagatgtgcattttgtcagggacagagagttctagccaaagctctcgacatcagatacattcccagtcatgatcaaacagcagattgcttgactaaaagcttgtcaaattcgagatttcattttctggtggacaaactaggtgtggtgcataccccacttagtttgagaggaggtgttagaaaatgaatttggttactggttactctcagtcactggttaccattg

SEQ ID NO: 106235 - DNA, 748 bp, Cannabis sativa
tgaaccctgcattcataaaatgataagtgttggtggtatttataggctcaggataaagatcctaagctcggtggctgcaattgataagttgttaagttagttatgccataactaacataacaacttcttcgtaacagaatctccacgccagcacaaaacagagtgcttctggatgagacataggttcccaggacaaaggactgaagcgtatgttgaagggacttctcgaataggaaaagagctagcaggagttgactatccggaactccctttcaggaggaagattagccatccggaatttcttttcggagtggacatgatagtcattcgggaactctcttccgaatgacaactatcattccacgagacttcttctagatggacaagctaactgtccggaaacattcttctaggagacaactaactttttattacttgaatcaatcttatggagatcttttcatttgaaaaaattataccacatctattattaaaatcatccacattcccatttatatatataaaaagaaaacaacaaaatcaataatatttgttcttacaccaaaaagtaaagaagaaaaccctcatttcctcgtacatattgatcttagtgttttgttttgatcttatacttgttggctgaggaagatttttacatactaacttaactcatcacactccttttttaaagaaagacttgtgatgagtgacttcaacttcgttcttgaaaagtaatttgcaaccattg

SEQ ID NO: 106236 - DNA, 1110 bp, Cannabis sativa
  modified_base (1066)..(1081): a, c, t, g, unknown or other
agaactcttccaagcatcttctccgtttctagcgaagattaagattcaactatttttggggaccaaacggaactttcgaaggaccataactgggacccagtgcccaagttaacacactatcaacttgggctatattcaatcaagttcttaaaaaagtgtttcgagcattttttccgtcacaagaaataatgaatattcaagaaaatacggggagaaaaccataaccccgagaccctagaaatagggcccaacgccgaagttgacctggtgttgggcccaacgcccaagttaacctagtactaggcccagcgcccaggttgacaatcaacccagtgcgctagtttcaatcactcaaataccaaatttggtttgaccattgaattcggaatggttaaaaatgggttaagagacctcgtcctccagttcaagaaccttagaagtatcaaaacggcatcttgaaagcttcgaaatgagtacccaatgcccaagttgaaaaatggcctagtgcgttaggttttgcttctccgattctgattctgtttcaaccgtccgtctagtttttcacaataactaagatccatgaagttagagaagtcaaattcacaacttttcatttctcatttctaaatgggaaactcactcgaaatgaagagtttcgagtctcattttcgcagaatagcaacatctctgagaattggcggccaattttgccagagcacataaatagattaagtgatgtcaaaatatcattaggcatcataaagtacattctttggatgttttttcacttacccagcgtccaggttgacgtcatatgtcaacctggatgctgggatgtcaacctgggcgctggatgtcaacttgggtgctgggtcatgaacaacctttagtaaacagccataactcactcaatattgatctgattgacacgattcaacttgcattttgaagctattttaatgctctatcaagttatgtatcacacaataatcgtaattctgaatctatttgtaacaccctaactagcataggcgtgttgacgtaattttaaacatactgtgcagcnnnnnnnnnnnnnnnnaggttaatgaaaatcgtgattaattaaaa

SEQ ID NO: 106237 - DNA, 652 bp, Cannabis sativa
agctgatggagcaagtcgacttgctggagcgcttcttcaacctataaaacctggttttcatcttgttgttttgcatgggttgcgacttgactgcatagaagtataacacttctttcgaactcagaacctccaactctcagatcttgcacaggatgtaccatatgactagcaatttatatgattggggaataagttaaaagggtgcaattcccatgcccgcacaaaaattgacaaaatagcttcgcaatggaagatgtgatccacaaataatacgtacccaattccatgctccgaagccctcaccacactaggctggttactttcccatgaaagaaaatctgtgccggcatagtccccgaatgttgctgacaccgtggtgtttgtcgtatcgttagagcatgtcatagctcctaaatttatttaggatttggtccatctcctagatggatgaattgtaaattactagggtgactttctttcagtgtttcttctttggagtggcttccaggaccacgtcctctttcgaatcctccttcgatagtcctgtcttgacttcttcctcagcgagatccaccatctctagcttgaacttatcatcggacatagtaatctcaactaaaagttgtcatcagatgaccggtcaggaatgcaa

SEQ ID NO: 106238 - DNA, 608 bp, Cannabis sativa
accgcaccccagtcttgatcctgaccccaaactcacaaaatgggacctggacctaaaccagaaccagaccgagaaccgtgacagtgatccagatcttgactgggattcggataacggggatcggaacagaccaatagtcggtgtcgagatatgggactcagactaggacccgaacccagacaaagaaccaaacccgaacccagacttagacatgggacccaaaattagaatctggacaagaatcgccaaactaggaacctagaataagactaggaccgtgaccatgacccaaacccagacctagaacctaacacagacctagcctcagacccaaactgagacatgaattcttgcccggacacggtcgtgtaccagaccggaactaagatccggacctggacctcaatctcgggcccgatcccaaacagagacttggacctagataaggatccagatacacctagactcggactaagacccagactaagatggaaattctttacatagatctggaccgagatcctgaccaagacccaaacttggacccgaacttgggacccgaacatggacctaaactccaacctagaccgagatcggggtttagacct

SEQ ID NO: 106239 - DNA, 523 bp, Cannabis sativa
ttcaattatgaagttgttgttgcacagcttttcaacttcatctttcagggctactgctcgttctttatccagcaatttttgtttttgctgaactggacggatgttaggatcgatattcaggacgtgtgaaataatagaagggtcaattccgaccatatccgcatgtgaccaggcaaaaacatctatttttgctctcagaaattttatcaactctgattttacttcgagcaacaaaccctttctaatttttagctttcttgccgggatagatggatcgatctcgatctcttctaattcttccacaggtccaacattgctgcttgggtcgccaagtcgaggatccacatcttcatcctcgccttgggaagtttcctacttgggaatgctttttcccttgtctgggctctgcaagggaaaaagcattcttttcatagccttggccactgcaaggttgtaacattcccgagcagattgctggttccctctaagacaccttaccccattctttgttgggaacttcagg

SEQ ID NO: 106240 - DNA, 735 bp, Cannabis sativa
atcaatgtattctatatttattatgcaatctttctgcttatattcattgtaacgagaagggaaatacttcttccccaagctcatagccctgtaaatagtgatgcatagtcacttggcaaagggtcgaaaacattctggtagagagatattatctaagaattcatatttaaagataccgctgtaagagctataagaaaaggaacctttctccttgttcttgagttaatacaaataacgaggattaggctactaccaaactgttcggggcagaacctatataaaattcttgtgtctttacattgctttactatatatctatcgctataaattacttatcgcttactaaatatgattcattgttgttggctaaaagtgaggtcaacacaactaacctcacggggagaaggcatatgccacttctaggaggcgtagagaacgaagagggtgaacagatacttaatgcccttgggagtgaattgggtcaaacagaggcggaacaagtctgccacattcctaaagtatgggtgcaaaggtagcaatgccccttgcttggcatgagcacccgaccaggcgcacattcccctttcagggtttgtggctcgattgttataagcgagaatgtaacagtccaactcgctcaagtagccatccttgttaagatcccgtaaatgtgcctcgatagcctttgacggagggctcacccacctggcacccaaagcaccttgcctcctgtga

SEQ ID NO: 106241 - DNA, 556 bp, Cannabis sativa
tatactttttttatttttttttttaataaaaagtaatattacacatcaaatcatttaatttagagactatatagactatatttatccagttatatctatattacttatgcattatgtatattcacttactaacgtgagtatattacttatgcatgaaaaatatgtgagattacactatataaattcatgggtatggaaaatgacattattttttattcgaaaggaaaaaaagaaaatgacattattattattattactattttggaagggaattaatacagtgacgtacgggactaaatcatctctatctggagatttcttatgtggtaataaaatctgggcgatcatcaaaaatatatgctctcaaaaaaaaaaaaaagagaagaaaattaaacattaattattcctgtgattaattgtgttgtttcccaaaacaaaacctataatactaaaaaaaaattgacaacatcacaagattaaaaaattacattatttatctaattaccatcacaatatttatgtttgagttcactaaagactattacaaaactatgtt

SEQ ID NO: 106242 - DNA, 756 bp, Cannabis sativa
  modified_base (137)..(138): a, c, t, g, unknown or other
gttcattgtcagtactatatccatccttttttttttacagactgtattcttactttaaaagaagttctcgaagattaacactatgtttggtagaggggagagaaggagggagggagaggggtggagggagagggatnnagggattggagaattcttttgtttggcaaaagggagaggagagatggaaggagagggtctccctccaaacacattatttttaatccctcttaacatgggggaattcaagaaaaagataaaaaattttatacaaaatatattttctacccttgaaaaaataatatataattatattaaaaatgataaaatagtaatttttaatatttattttactctccatcctttcacatatattcctaacaccaaacaacacaaaagagaacaaatatcctctccatccttccttcctactccccatcctttctacactctccatccatcctactctctccttcctaccaaacatagcctaaaggttgttagtagtgcagttatatattttacacaataattgagtgctcaagctacgaggttgaatgaacttattgtaacagtttttactgttgtgtcttctgagcaataaataaaattgaatataggtatcaaacgatctagacggttgattatttgactcgtttttcttattttaatttggtggtgtctccaacgaggagatatcctaaatgatttacaggctattattttagctaatttctattaataaaattacatgattta

SEQ ID NO: 106243 - DNA, 559 bp, Cannabis sativa
  modified_base (387)..(388): a, c, t, g, unknown or other
gaaccaagaagcgtgcaaaagccatgagaaacaaaaaggctgctaggagtggagaaattggaaatgtttgaaaaatttcatgaatttctagcaatggtggaaaaccattaagataagtggttaaagatcttgcgaactgataggagtggagaaatatttggcaaatatgcagttcaaagatcattaagttaaaattttgaattgtatccaaacttacctccccaaaaattcaatttgcgtattgatgatagtataaggtctatgattagttactagctgttgcctaagtccttctaggaaagatacttattcagtctaaggaaagttctattcatttttggcattgtaccaacatttattaagtactagtgttacttcctgactaanncagaagtagttgccaaaaagtgaagaatcgagtatccctaaagtagtagacatatagagaggaatttcttgatatttcgtgattaaggaaatgtaatggtggaggaaaggttgtatttaatacaacctatcagatcctattatggagaatatactacatactacacttgat

SEQ ID NO: 106244 - DNA, 547 bp, Cannabis sativa
  modified_base (501)..(512): a, c, t, g, unknown or other
aaaaaaaaaagatttttttttttttttttaaaaaaaagttactttatcaccaactaatttttttaaaagaacatatataactataaaatttaattaaaagtaatatgtgggactattgtggataatttttgaagttacccactatagcagtaatttttgtaagaaagtatatcaaatttgatgtaaatgagagagaaactaaaaaaaataatatttgaagatgaagtgtacattttggtagggctgagcatgaaatctataaaactaaaaaaatcgttcaaattgacctaccgaataccactggaaccgaaactggcaaaatcgaaaaccgaaaaaaccccttatggttaaaaccgccattgaacagttggtttttttttttttttgtaataaatcgacagaaaagaccaaaaccgaccgttatacatatatattaatctagtaagtttttttcttgttgtattgtagttactcataatatataataataatatattattnnnnnnnnnnnnttaaagttaaaagaataagacaattagtttttgaa

SEQ ID NO: 106245 - DNA, 918 bp, Cannabis sativa
tatattgtttgttttgagggtttaaggcatattattctattagtaatataactaccattgaggaggataatattgataccttaaaaaagtctaagattgaattattaccttccattatattaatttgaataacatttttgaattaataaataaatttaaatactaataatattatcctttattataaataaaatattacgatatagatttagtctgtgagatcaattttttttaactgaattatttttatattattagcaataatatatatatatattcattatacataaattttataaaaatagtgtacataaatgacatagcgaacaaaaataaataacatagtgataaaatatatagaaacgttcattttaattaataaaaaatacaataaaatttaatatatactaattaataaatatatttttttaatgaataattattttatttttatatatagttaatattaaatagatataataaaaaatatttttatttttatttttaaaaataatatataagattcctgtactcaaccaaacagtgtaagttaattaacaggaatatgattacatattaccctacacaaccaaacacaatttacacatttccctacaatcatattctcctttataaaattccttataatcaaattattttgaacatctcgtaccaaacgctccctaagaagcaattatatttaaatatataagattttcttaaggtgggaaatttttaaaatgccctatttgtgaggatttattataaaataggtctcattatgtagatataaaattaataatttttttttttatagagatatagtttataataaataaataataattattattttttatataatatacaattttattaaagtgttattgatttttttaattaattaataattaatat

SEQ ID NO: 106246 - DNA, 1347 bp, Cannabis sativa
agcactaagttcatcaggaacattgtgctcgaaaatgctacgatcaaagtagtatcgagaattcctaacaacaaaatatacagctcgatttgctgatcgtcttacaaaaggtaatctaacattattcatggaagaaagtaaactgcgacaatcatgaataattaaaccaaaagggggactcatcacttgatcactgtaaatagcttgaaaagagagtaagctgtctgattcaatcataactgatttccattgattacttttacccagctaagtgcctccaattgatacccattgcttccattatctcagccgcataatagcccccttgaacatgtgcccgagcctcaaccaaggagcctgtgttgtttcttgccactaaactgataccttactttgaatctgactcaaagattgccgcatcaacattgatcttgattgtattttcaccaggttttatccaacactcagatctatcatctttgttgccaaagcataaagatgataagaaattttatcctgagcttttctccaatgatcaagagtaatagaagctgaatcaataatttcatcaacagaagaagttttttgtttccaaacaatattatttctagctttccaaagaggccaacaacacatgactgcacgacacacttttttttctatcaaaacgtttaaatatcagctcaagccagctaccgaaagagctaccgggattacctatagaagccataccttgttgtaaccaacaagcttgtgcaacggagcatgaaagtatatcatggttgatggatgtagaagaacaatctgggcaagtagaataaatattaacatgctttacaactagttggagacaagtaggaagacaaccactgactgagcgccaaagaaagttctttacctttggaggtattctcaggtgccaaagacgatgccaaaacccaaagttattggcactatgatactgatttttctaattctggagcaaattataagcacttttgacagagaagctcccagaacgttcttccttccaagataaataatcttttgtggcatttgaactgagaggagtacctaagatcagagcaatatctcggctattgaagatgtcgcaaatgatttcagcatcctaacttcgtgactcaaggtgaaacaaagagctaacatttttattaatgaggtcaggatgtgttgtggtaacatatttcgtaacaaatgtactgttaaaatgcttataacatggataaaaagatataattatttacagatattttagatttttttagttggagtatgctgtaattgggatatttttattattgatatgtttagctttttttaaaaaaa

SEQ ID NO: 106247 - DNA, 567 bp, Cannabis sativa
gctgatcgaatgaggaagacaaataaccgacgacatagggggcacaccctatggtctcagttatgtccaaataaccgacgccataagtggcgtaaaatttccttctaaaaatttccaaccctatgccgtatgttatttattattatgctgaaaaaaaaggcttttttgtagtagtgagcgttactaagttaagtcatagaatccgaaataataggttacactcacaaagtaatgtccctgcctttgacattaggggacataatttgaccacacacttattccccactaaaatttatgaccccctttcattaaaatagagcatttctagtcgcgaccacaattactcccgaccaaaagcggtctcgacgcgaccgtaattcaatattttgcttcgatatgtctcaataaaatgtacataactatcacataataacaccaaatgagttgattaatgatgcattggaaagttaaaaaagatatctaaaacttttatgtttcaaattttttcaaaatctgaacagtacacagttcaatttaggcttcaagttttagctttattttcttaca

SEQ ID NO: 106248 - DNA, 868 bp, Cannabis sativa
ttctgggtactatgtttttgttgttcatttgcatgtcagggtagaacttttggttaagtgcttgatttttgggaaataactttggcgaaaacagtcgcctgttgcatataccctcttctaatttgtgttttactacttctctttcttctatttttgcgatagacccctctgttggaagattgtttaagatatgagacagttttcgttcccacgttctgtctttcatttttcctctgctttcgctgcctttgagatatttgcacctgatgtttgcctaggaaaattcctagaatttccatctttggcaagcatccggagggggcctcattccatcggttaggggacccccattcccacttttaacactagggtttggtttgagggctaagtgctggatttttccttttacagaactaaatgtttgcttctgcgtccggaaccaaatcttcccgtaagggggcagttactcttgctaccctagaggaagtgatgaagggccctgttgttcagaagaactacacctgtcgatcgaatggttgggaggcggacgaacttcgctcgaccttgacttgtgcccaccagctggaaaagattgtgaccttgacttgctacagagactggtcgcctctcaaaaactttaattgaccatgggtacatcatgtccgaattcgggggcatggatgaggccatgaagagtctgagagacttggcgaccgagaggaaagctatccgggaggaggctcagcaaagggaggctcagatggagcggagtcaccaggagacgttaaaggccaaggtggagttgaaggcaaaggacgacgccttgaaggatagggatgaggctgtgaccaaggcaaggcgtgagctt

SEQ ID NO: 106249 - DNA, 840 bp, Cannabis sativa
aaataataagataacattattataatattattttttatatatataacttatcgttaagtttaatgtatatgtattataagttatatcagtaaatagtaaacgaacgaacgaacgaaactcttgttctctcccttcgataaaaccttctcctcttatatctattttctttaatttttaacccgaaacctagcgatctaagctctggtagtagcgagatagcaaattcttgaaaagagaaagcttaaggtatggtttaattacgttttaagctaaaaacgattagttttatatatggaatttgtgatttagagtggttatggatattctgacttcgtagaattgttctttggtagctatgggaatagttttgatgtttacttattgaatttgaggtgattttgagttagaaatcgagtttggaactttttaaagcttagtccgaacgttaatggtatttttcatttaaaggctcaattttaatttctgttacgtaaggatagtaatatttatggtatatatgtgccctgtaaagtttagattgatttggataagttttggtagtgtttcggtgagtgcaaaatttagaattttcgagtttcaccgtttttacaaattcctaggagatcagaaattgtatttttgtcataacttttgactcgagtgtctgttttggacattctatataccgtgtcaaagcttgcaacgagctctacaacatggtgtatgttttagagccaaaatattagttttattttagtatttttataccgcgagatttagtagaaaaccttaaattgtcttatgtgaatattaagcagtgttttgggataaatacttatt

SEQ ID NO: 106250 - DNA, 958 bp, Cannabis sativa
  modified_base (895)..(900): a, c, t, g, unknown or other
acacgagaaagaaccatcttgggggcccaatagtcaaatatttaagggaaatttacaccatatactgttttttccaattttatttcaattttaatgttatctgattttttctacatttttactattttatttttatattaatatactattttttttaattaaaaaattttgtttcatttttaacacacacgtgttagcttgcatgtcttttcttttattatatttcaagtttttagaaaaagtttgatttgacttggtattgtcacatttgtgacaaaattttttttcttttcttttaatttaattttgatgttaggtatatcaaaccctagctttttattactttttattattgtctttccttattcatcttcttctttgagagttttttttttttcaaaatctatcactctcttcttcatcaaaaactctttctttctctccattaacatatatgtttttttttatttgatttctttgtccagttcttcttccattctaccatcattttgacttcattcgtggaacttacagaaaataaaaaaagaacccgtgatgattttttatatagggtaacaaacctctccactactacatctttgattgagtatcttactttgatcttttactaccgcgccttaactcttgtacttcttccaccaggtatttaactaattttatatttagttttgacactaatagagattatagtaaacagtagtttatgtactggtcatggtattaaggttgtttttaattcttttttttttcttttgtttttttgatttgttttagtattgtttcacggttgttttgtcataatctatcactctcttcttcatcaaaaaccctcatgttctctccattaacatatgtaaagtccttttttggcaannnnnntgacaaaataatttttccttttatggtaagattgttgtgcattcatacccgatttctt

SEQ ID NO: 106251 - DNA, 608 bp, Cannabis sativa
  modified_base (252)..(259): a, c, t, g, unknown or other
  modified_base (327)..(342): a, c, t, g, unknown or other
tattttattgtttataaattataagttataaaaatgatattttatatcattttatatcattttacttatcagatatttataaatagtattttaaatatttaaataacctacgtattttttgtaaaaatttaaaaaattcttaattggagatattttgacatataattaggataattattatttcttattttattcctaaaataataatttcctaaccatatctattttaaaattagtttattttattatttnnnnnnnnttaaattataagatttgaaaatgttattgaaaatatctatttagttattttcaaatcatttatcttannnnnnnnnnnnnnnnatttgataaaataatttaaataaacctagatattttaaattagtttcatttttgaattttaaattttggtgagagatttaaggttgcttttaactaccctaaattttcaaaatttagttggttagttaaaataataatttaattatatatatcctaattcacaatttattacatggacattgtttgttttatttaattgtttattcagaacttttttttaacaaacctattatttatttaattttaattgctatgattaacttgtt

SEQ ID NO: 106252 - DNA, 606 bp, Cannabis sativa
gtgggagtagattatcatatgtgaggacaatgtgcaataagatactgtgtattatgtgtgtgtttataacatgcattaaaattacaccgttatatcgtatgtgagaataacatggcgatatatggatgcaagtatgttatgaattgatttgatgttgtgatattgttatacttatggctatgttatctagttggggggttatgtcctacatagctcttcgtactaggctttatctcacgggtactcagtgtgtaggtaaaaacaaaaatgaaacagtgaggatgtgagatcgaggcatgtacaacatgttaggggttatcacggtgttttggttttaattgtttaattcaagatgattattcgaatacttttgtaaaagttaatatttgaaaatttataaatgaatcaagtgttttgttttaaaataatgagatctcatgcttttgttatttttaataaattaatttattatctttattataaatagttttaaacagactagcgagtgtgatgtctcgggaaatcggggcgttacaaaatggtatcagagcaatacggtcttaaagaatttttggtcaactgtaacatgtaaggttcatcgccacg

SEQ ID NO: 106253 - DNA, 851 bp, Cannabis sativa
ttcatagaggtgttcgttatagttacaacacattcttgtaaatttttgaaaaatttcaaatagtttacagtgacgaaaataattttaaagtttattgaatacgtttggtagactgaaatattaagaattctatttttggtacgataaactattcgaaatttttcaaaaatttacagggaggatattgtaactataataaatattaccgtgaaaaaaaaattgaaaaaaatattatgacatgtgatttcgagcgtgaaaattaactaaaaaattgtaataagaaattataattagcactcttcatatatcaactaaaaggaggataattttaaaataatatataacaatttttttttctattaaaataataataagaaacataataaatgcaaatctcattaatgcaattttcacaacctaaattattttttatttttaaaggaatcctagcttgaattccatccacacacaaaaaaaaagattcattaaaaaaaattattgttttattaataataaaatagatttgatcaaacaaacatattgatcaagtcttgttattattatcattgtcagcaagtgcatcatgggatatatatataattttatgaaaatgattatgaaaagtaggtataacctattgaagaggtttttctttattttatttattttttttctcctccttttctattttttattaaaaaaacaaaaatattattgaaaaattctacactctctaaaatagttcaccaatgtattttttttttatctatttcggtattagaaagaattttttagtctaattttttttcatagtcttttacgttatcattatttaagatattttataaaat

SEQ ID NO: 106254 - DNA, 545 bp, Cannabis sativa
cttccaagcacatctgattaaggtgttaactaatcaacccctgagacaggttttatcaaaactagatgcttctggaagattgataaaatggtcaatggaactgggacagtttcacataacttatcacccacaaacatccataaaagggccaagccttggtagatttcctgatagaaggaataactatagaggaaaatccgcttattcagctagacatggatacttagaaattatacgtggatggtgcatccaatgagcagggctcgggtgcaagggtgacattgattttgccagagggctttaaatttcattataccttaagatttcaattcgacgcactaaacaacgaggctaagtatgaagtcttgattgctggtttaaggacaaccgaagcattgaaagttaaaaatctcataggtcatagtgattcacaactgatagtaaatcaggttcttggggaatacaaggccaatggcttaaatattgcaaagtatctagagaaagtttgtaagaacatggaaatgtttgattatttcaaaatcgag

SEQ ID NO: 106255 - DNA, 1416 bp, Cannabis sativa
acgacgtgtagcctgggaataaaaaggtaataactcagttgagtcaaccggggtttgactagggtaaaaggtcagttttgaccttgggaatttaattattcactttgttgtgtgtagggcaaattgataaaatccctacaactataatagtaaatatatattttttaatgtaatttatggtattttgattgaaattaaacataaatgtagcattaaaatagtactttttttttaattttctttatgttgaattaacatcaaaattgagtttcattgacaattggagatagagtaagctaaatctagaagacgtaggttccaaaattcccaatggaatagttttccacctcgtgaagataagttgaagaagacttagtagctctatttcgggaagactacggcatgtgttgactactttcggaaaagtaatacctgtcactcttcaataaaactaatttcacatgtcaaatctaaaatatcatctccatgtaaaatagaaaaggttacattgtcatcattattaaatattattataaaaatttaaaaattaatcttataaaatttcaacattataccatatatatactaataattaaattattatattaaattatttctaaaaataatataatatatattatataaaaaaaattacattgtaaaaattaaaaaatttataatatatagtatgatatattttgagtcgtaattattaaattatttaaaattacaaattacgtcgtagcgtgcagtttaacaaaaatacaaactacaatcgtactagagatgaaaaatttatacaatgtgaacgatttgatgtacacccttaatccaaagtaaagcttgaataatataagtcactatttgccaattgccacggccaccagtaccactggtagatttaattagttaacttaatttcaaaggataaattaataaaatttcgtaataaaaccattaatatacatacacactactacgtcagtgcatacaattgtatttataattaacataataattaataaaaaataataaattgttggccccaatttgatatcagttgtgtgaatcttccaaacctggatcatatgatctttaattaattaattaaggtggtcaatcgagagagtgaaatagcaaggaaattgtggaaaattcccaccattactaaataattaattaatagggtacactcatgagtaagtgtgtaggactatgtatgattacgacaaatctattcttgccttaaattcaacccatgtgttggcttggcttcaattaattaggattacatttaatttgtcaacattatatcaattatcactatcaattttaaaactatgttgaaataatatatattatatattcatgttatatatgttatttcattgaatcttcctgcatttacttaatttt

SEQ ID NO: 106256 - DNA, 643 bp, Cannabis sativa
ggaatttgatgaggttaatgatcttatttggaattttgaggatttgtgattgtacctaatcttagcaattaggttgcctacgtacccaaaatgtgatcaaatcgaacgtaattcataatatagtaaacttgtattatttggagaaatgagtattttattttgaataaaaactcatttttaatctcccttgaataagttgggaaaccacttgaattacaattctattttcgtgagaattgtaaaataattcacgagaattgtaaaataattcaaattatttgagactttgtgtctttttttctttatatgatttgaattgtataatttagaattggactcaataatatttaaaacaatattgctttaagtcccaattttctcacattgattgtgtattcattttctttatagtacatgtaaatcttttgacctcacacactaaaattatctgaagcttaacttagaaatttaaccttcagatttttatattcatcatcatatatgtatatatatatatatggaagttaatataataggtattgtaattgttacctatcaatagggatagtaatttatagccattgatttaatccaatggctcaaatcaactcttgaaaattacactaaaattaatatatttttt

SEQ ID NO: 106257 - DNA, 1178 bp, Cannabis sativa
tagaaattcatttttaggatgttacaaacatgcttgttagtaaatctagatcatggtaaaagatattccaacattctcggcttcttcttttgacttcttcgcttcttgtttaaggcgggtgatttcccgctaggcattatcttgttgcttaatcacaaccccatattgggatagtaatttttggacctcgccctccatgtatttgagccgcttcgagagtcgtcgattggaagcaaaagagaggaaagaagcctggagaattatgaacaaatgaatatgagaaaagagagaaataataataataataataataatacggccaacttaccatgaagttgtagtcatcaaaagcatctcttctggactcccaagattgattaaatcccaatcagggggaaggagagccttaagtatgtgctagcaagcaatctcgtacgcctgggcgaatttagatccagcctcccccgctgcagccaacaaggtctcaatggccaggaggtagaagcatgagctgtctcaggaggagcagcgttggtgttgggagcgattggaggaggaacttgttcttgggtatcggtattagagacctcgaggtcaataggctcagacaatgacttatttttgtgggcagtggttttcctttgccttttgggaggtaccacctcggcatttgtggggaaccctgaatttgttcccctcttcttccctttccgatccatgatatcttcaaaacctcccatgtttgtaaaataaaataaagtgctaactattaaaaaggcagataaaaaaaaaagaagagtggtagtacaattttccacctaagggatttaccgaagtcactggaaggcgaactatcaatagaagagggggtagaaggaccgtaatatccactaaaatccttacagcctataatcttgaatacatcaaagggctcgatgggttctaaaacccagctcacgtctatatgacttgccctatctgtcatattgccatattgctgagctataccataatatgactcgtgacagttaatctggacgtagaatctagggtaccaactgtcaaacttatggaaactcggtctacgagaagggaatcccaaatataaaaattaaggctggtgtctcggaaggtgactaatgtgttacgttcatccctaagtactatgggagaccaac

SEQ ID NO: 106258 - DNA, 545 bp, Cannabis sativa
tggaatttgggttaacttttataaaaatactgtcacacggaattttttttaaaaatactgtaaattcaactttgattcttctaaagccactgctgtgccacttgcagggcattttaaattgtcaaatgaatattgtcctaaaactgaaacagatagagaaaacatgaaaggtgtaccatatatatgttatggctgttggatgcctaatgtatatcatggtcagtactagacctgatatagatcattctctgagtgtattaagcaggtttatggcaaaccctaggttagaacactggaatgcagtgaagtggctgattagatacttgaaaggtacaatcaagtatggtttgatttatcaaagagacacatcaaatatgagattagaaggctatgtctatgttgattatgcatcaaacagggatagcagaagatctactactgcctatgtattcgtgatcaacaaaagctgcatatgttggtaatcacaacaacaacccgtggtggcactatcaaccatagaatctgatgattcatggccaccactg

SEQ ID NO: 106259 - DNA, 896 bp, Cannabis sativa
  modified_base (276)..(276): a, c, t, g, unknown or other
aagttagtgaaagttgaggcatttgagattggagaagaagaagaaaagtgcttcacattcaaaatatactcttcaagaacaaaagaatgattgaaatcaagagagattttatatcaaaataacaaaattatgttgttgcattgacaaatctctcttgattacaacccttcttttgttcttgaagagtatatttcaaatgtgaagtatttttcttcttcttctccaatctcaaatgcctcaactgcactaacttgaattttgtagaaatgtgtatgngattctgagatggatcaaaagctaaagatataatgttgtcattttcaagtgaatcccaactatatttggtcaattccttatttaatggattgaaaatgttgattgtttagtcttgagtaaggaagtacttcctgcaaaaaatgagaacctgacacgatgacaatatcacaacatcctcaaagagaaaataaaaaattgtctattttaattgaaagtctttttcatcaacaggaatgtatgtgatagttttgatatctttgttgagacatgggaacttgtcttggatgataaatcttgagagttgaagataaagtaatttttcatttggtcttaattgtattgcataacaagttatattacaatgtaattaaaattattgagaatggtgcatagcggtttctgttgtagggtaatagttgattgtatggtgcatagctatttttgttgttaaagagattcatttattgtcttttacttattcagtaaagtgacacatgttatacacataattaatgatcaaatcggattttatgtttcaagaaatttgaaagataaggggctaaaataatgatgtatttttttgaattttaattccttttacctacaaagacattgtttca

SEQ ID NO: 106260 - DNA, 511 bp, Cannabis sativa
  modified_base (339)..(352): a, c, t, g, unknown or other
ataattcagtcattcatagagatactcaaatatcctatttcaattaagctatgagcaaaaggtattatttgattaagctatgaaggagtcaaacgaagatacatctttagcttcaatccttaaaataacaaatatcctattattaatattatttatcttaaacattatcaaaaattatttacactagctttgttactatctgtcaaatttaaccaaaataattttttgagaaaaaaaacttaatagaaataaaaaaaaaaaattctcttaaaccaatagattaagcactttcaatatcttttatttctttaaactttcaaaatcaataataataataannnnnnnnnnnnnnataataataataatataatttaaaaaacgcgatattattataaatatcaatattaaattccacaaggaaaacctatatatattggtaatgatcaatacgtacttaggttttcttaggtccttataataatataactagaatcatttatagtaagtatga

SEQ ID NO: 106261 - DNA, 500 bp, Cannabis sativa
tacttatttttattattaaaatttgaatgatcttattttgatattaaaatattaataatattagaaataatccagtttgaatttcaaaatttgctacccatattattttttcaaaatttgttatttttgaaatatattttatcaaattaaattataagatttgaaaaacgttagttttgacattatatcttattagatatttttttattaaaattaatttttggcaaaaataacatgaaattttgaaaatttgttaatttaggtttgaatagaaattttagcgtttctaaccataaaattttcaaacttaggatatttgttttatttaattattttatttaaatttataatattctaaccataaaatatcttatttttttcaaattatttatatttgtaatatttaatttattaaattataatattaagaatatctaaattttaaaattcaaggtattatattattagagatttaataaatttaaattttaaataaactt

SEQ ID NO: 106262 - DNA, 1867 bp, Cannabis sativa
atacaattatatttaccttagttttatttgtaccccaacactttataaatacactaaattttattattttattttatataaaatatatttttaatttatattagttttttctttttaaattttttctttttcacattcttaaaatgtatatttataaaacaagataatgcagtgtattagttatattataaaatcaaaatatttataaatgttagataataaaaaatttaaattataattattattagtagtatatctaaatttttttgtctcaatatattattaattttttatcactattatcacactgttacctaatgcaattacaagatggtcatctatcatcctccagcttccttgtcccacttctcgtcctgctcctttgtaactcttggttattgtttggcctcttttctccttgccctaccctagttcaaactacttaacccagtggctttgttttgctgttggcttttagttgttgtcttttgttagtcttttatcttttcctctttattttcctcctttctcctctcccttttgaatttcttgtttgtctcctcttcttgcttaaactgtatcccgtgtctcgtgtgttccctagcctggtcctaacctttttgtttccttttatcttgtgttgtctggttggtggggtgcttgtggttatttggttttgttagttggtgtttgcttttagtgctatggagttcgtgtgtcattctgagttggtggttggtaagaatctttctctctttgtggccactatttcgttaatcccatgtgactcaactatcaagagccttaactccctttgtctttttggaaaagtcactggcccccttattgtggatgagagctgtctcaaagcttttactgaaaaagaatggggacgccatgtctttgtgagtttagttcctggtgtggcaaaaaaatctaatctttttgaactgatttttaaagaagctaaagatagggagttggtgcttgacattagcccttggatagtcaaaggatctcaccttttactcaaaacttggagccctctctctaaaattttaaactctttcatggttgctcgactttgggtccaaatacataacttgtcgtttaaatttttctccattgtcaatggaaatgacatgggtgccctagtaggttctgtggtaaaagtcgacctggatgaaaacaaacctgcaacttggtctaaatggctcagaattctcattgatgtttggatcgagtctcctctatttttaggttcttacattaagaatgacaatggaacaaaaatttggatccaatttaagtatgaaaaaatcgatgcttttgttatcactgtggacgaatcaaccatcttcgacgtggctgtcgtttctcaagcccagatcccatcaccagcactgatggctcgagattccccttgttggatccttggctcaatgtcagatccacttacaccaactgctttgccagtaaacctctatctctcgttgtgtctgaggcacctggaaatgcgactgtcgtggacaagtctcaggagatgcctttctcgtctcctcctcgacacttgaatgtgaataggaacaacataggtgaagcttcgaacaagatgattagacgtgcccagtttttgaggagaccaaaaaagactactccacggccccgtccttcgaatggtaaaggtaaacaggccaattggattcctcaaaaccccaatcgcatgccagagtttttattttcctcttctagtatacatgtcgtaggtgttttgactgtgaacgagaaaggtggaactaacacttcctttcctattttgaaccatttgaaaaataatgacccacgtgccctaaatgaagaatttaaa

SEQ ID NO: 106263 - DNA, 849 bp, Cannabis sativa
cttgtaatcaaacatttaacaatagtacaatacagattctttcagctcttgtttctctctacatctctgttttcttgttttctggttttgtccattttcgttacatggtatcagagcttctcatcgtccattaatggagagttcaacagccaacaccggaggagcatcaagattgaacaatgctcaggtgaacaacaatcaacaggttcctctaccaaagtcctatccaatttctttcaatcactcgttgtctattaaacttgaagaacacaattttctcccatggaaacatcaagttcttgcatccatcaaaggcagtcgccttcaaaaatttcttgactctaaacatattcctccaaaatttcttgatgctgaagcagaaagaaacaatgtcatcaaccctgcatttgaagattgggaacaacaagataatcttcttgtttcctggcttttatcttccatgtctgaaaagacaacaaatcgcatgatcggatgtgattcaacagctcaaatctgggcctccctcactgaatattacaccgctctcaatgctgccaatgtcggtctctacaaaactcaacttcgaaataccaaaatgactggatccctcaatgattatctcctcaagatcaagggcatagttgatcagctagctactatcggccataaacaatccactcaagatcatatagaagctatttttaatggattgccctctgaatatgatgtttttgtaacatttgtaactacacggaaagactcttactctgtagctgaaattgaagccctctttatggcacaatctgtgagaattgacaagaatgtcaagaaccttgacataaacaaagg

SEQ ID NO: 106264 - DNA, 652 bp, Cannabis sativa
cattgcctgtggagaaacccaaagagggatgttgtcattgcatgtggatgtgaatggtttcatatttttaaccatctcagttgcacctcgtccagtatgttgttttcttataaatactttcctctcaagttcattgcctgtgttttactttttcttttttttttttttgatgaataagaggattttattgctcaacaccaaacttacatcacagcttacatcgtatttttaacactgattacaacaatctaatccctttaatataatcatgcacaattaagcttctagcatccattctatgtcttccccccttgctttcttaggcggccaagcttgaattctcagcttgctaagctgcttggtttgctgcactgttctgcttgtgagccccctttgctgtttccaaagtatttcatttcttgccttccatatgtgatacacaagactagccacaattgtattcaccatgctcttcctagctgcagaaaatttctttgttttatgacaggattgcagcggcttgagaacatcatttgctagtgtgttccattgcagggacactttaatttcttgcaagcattctaagctatattcgcactgaaaaaatagatgctcgatgttttcatctcctttgccacacagagcacaagta

SEQ ID NO: 106265 - DNA, 538 bp, Cannabis sativa
tatttggactcaatggtatgtacagccattgtcaagaatccattcatcatcgtccctctgatctgaacttgtgtatgcatctcctatctttggatctttactttgttccttgataataacaaaaacatcaccatctgaactgtagtgatcatcaacaacaacatttgggtcatttcctttatcctcttcatctttattttgccttttcttgtccctaagttcccagcaatttctgattaaatggcaaactttgccacagtgatggcattttcttgtttcctttggtcttaatttcgatcttgtgcttcctttgtgccttgagtaatttctaaacttggattgatccctaaacctggaatttcctcttcttggttgtcttcctcgaatcatcaaggcttcatcatttctggtttcttgtttttcagcctttttctagttaatagttcaacatatcttgacctgagagtgctcattacatcttcaagtgtgagagtatctctactgtacattataacagttctcatctctttgaactgat

SEQ ID NO: 106266 - DNA, 848 bp, Cannabis sativa
  modified_base (657)..(660): a, c, t, g, unknown or other
gccactaaatccgaccgagttaccctgactcctagtgtttagcctggcgtccatactactaaaatagcctgcgtgaccaagagccagtctggtcagatcgcgatcaagaataacttactaattaccgcttactttggaaatttaaaacatatgcctattcagctatccgactactaacatgcttcctatcaggcttttcttaaatcatactattaagataaactactaaagcaataaaagcttactgaaccgtggaacgagatgactgctgatgatgattgtacatgtcatgacgatctttggaagacaacctggcggctctgataccaaattgtaataccctaactagtttatgcatgttaacgtgatttttaacttactgtacagctcgttactaatcaacaaggttattgaaaatcgtgattaattagaatttgcttatttaattaaaatataaaatatcatacatataaaaattcgggatcccattttcaaaagtatttacaaaagtttaactgtatataacaaaagtttgtcgcctagcggctatacaaaataagccctgatgtcccaaagacgtatgctccaggcctaatcgtcgtgacatgtacaatcttcacctgctccctctcacggctcctcagctttagccttgcnnnnacctacacatggaaataacactgtgagtcgacaggctcagtaagaaaagcataacataaaacataataatatcccgaattataatcaagtgcccatacacccaaccataaccctaactgggttaggaacgttctaacaaagtatgattaactgcgaatccaacgtatactcagtactctagtcatatt

SEQ ID NO: 106267 - DNA, 1136 bp, Cannabis sativa
tggcaaagcatgctctgcggttagatcatgagttatcctggtttgaggattgcggatttttgcttaataaattcacgagtgattctaatcattttgtcaaaaaaaatcaagaatggctagaaattacaaatagataatgtgatgagagtttgggtacttgtttattttctatatatagtaaattgaagctgtttggttatgtctttcatggttatttgaagtgaattagatttgtttgaaacaagattacttataaaaaaatgttaccctacttgtaatttaatatgacaatttgggctacacaagttgggatttagtggtaatcattcactttccatttttttttatattttagacttagatattatatttactcaatgcagacatttattgttatatcttattgaaaaataaagtagatgataaataaatacaatgaaaaaatcttcattgtcaaccagtaactgggcaatgacagcttagatgataatgacaaggccattaatgcagaaaaaagctagtgcaagatcatatcataaaaatgaagattttttatttattataatttatatatggggccactttcaatagggaacatgtcttggacattttattacataatttgtgttgagaagtagatgaaaggtctaagcattaagtaaagagttcaatcacaaaaacagaaataataagcaaaaatgtacctcaaccatgttctgtgattctagtgaagctatagtacatatttcaagtaacaatctgtactcaaatatttaagttggccaaatcagaaaaggactattgggccttgtgttgatctgttttcttttcaacaagctggatctaaagacttttgaccacacaacttttagagcatagaatatagtaattgattcactagtagaccccatctatttcattgcttctttactccttttcacctttgatttcttaatgtgtatatatatatcataagattaagtttactagcacatcaacttttcacattctcaagtagcaaaacctttgagatcttctttctttcctttagagacatatatacaagaatgggattcagatttccaagcatagttcatgctattcaaagacctttttcaagttcaaaagatgttcca

SEQ ID NO: 106268 - DNA, 671 bp, Cannabis sativa
ggtattttaaatagagaatgagctattcggccgccaggtaaaatagaagctgcaatacctgaagatgcaacagctagtgctatcatttttttttttgaacgaactgcagccaaaatagtcttacacaagaaagtttttcccgttcctccaggaccatcaataaagaaaagaccagtttgattgttgaaaattgtatttaatattaagtcgaatgcatttttctgtttcaaatttaataaattagcagctaatatgtcatctttgctaacaacaattgctaattgttcattaatctctttatattgtttatcaatttcgttatcacttatataattattgactaagttataatcattgatatcttttcccattgattctagaataaatttgatgtgatttagaacatgagttctaattgtagatggggtgttcgttatagtataataatcttcagacattggttgttcaaatttttcccataactctttagggttagtaggtttacagtatactaagatggtagcaaacaaacggcgtaagctatagttcatattaaatgatgaggcttcggataaacattgttctagatttgtgtcagcctctaataatccactaagtaaagcagcttctcgaaaagaggttacctgtttacctttaactgtctttaaata

SEQ ID NO: 106269 - DNA, 1207 bp, Cannabis sativa
tcggcagcagtagggactccagggttggatgtccttttcttccccttacggtccatgatgtcttcataacccatgtctgcaaaataagacgaggcgttaaaatcattataaaggttgattagaaaggggaggattataattttccacctaagggatttaccaaaatcactagaaggcaagctatcactagatgaaggggtagaaggaccgtaatattcactaaaatccctacagcctgtaattttgaatatatcaaaaggctcgattggttctaaatcccagctcacatctatgtgacctgccctatcttccatagtaccgtatttactcggctataccataaaatgactcatgacagttaacctggatgcggaatctaggataccgactgtcaaacttatgatcaatacggtccacgagaagagaattccaaatataaaaataaatgcgggagtctttaaaggtgactaatgtactatgttcagctctaagtacagtaggagaccagccacattgattacctcgggatgctccttcaccagattcctgatgggcaatactttgaaggtattgtgcttgagccaagcgatctcaggcctgatcctcgggcgaaacaataatctgttgccaacaagaatacttaggaatcttgtaatcacaagtatattatttatcagcgagaaggcccaccaatcacaaattaacttcactcaaaaggaagttgcatgaccgaagaccgtagggaagagttaacaggcgcctatgcctactaaccatctcgagggtaggagtaggtctcatcaaaagagctgttagaagaaacaaaacattagtcacaaacttgaaaaaggaagactgatgtaaataagtaagaagagaacaatcacttatgaagtttgcaaaacgtggttgtgccgatgggggagagaccaaacgtccaaaaaaatttattcttaaaggaaactttatttggcaagtctacaataattttaggctcactcgaatgagtaccgagatagaaaaagcccactgcagtgttcttcctcgatggaacagccttgactgagtaaagatactcaatctctacttgagtgggacacctccaatttagaattttgtacaaaactttcaaactagcgagaatcctgtaggagatgggactcagctggaatggggcagctctgatgtggtttatatagtctttgaa

SEQ ID NO: 106270 - DNA, 781 bp, Cannabis sativa
agagagagagagagagagaattcgaaatagagagaggctctttattttcaattattcgacagaatagactaatgactggttttcaagttataagcctatcattatctatttataggattccttctagggttaggattaaattatatggaattaaaaaagataaaataatggctaaaaactcccttaagtggttggccatgtaatgggccccactagtttctattttactatttatttaacaacttatttatttcttttacaaatgccatattttaattttaattataaatgttaaatgtatttatttaataattattattcattatcaaataaaattatcatttaacttatttattaattagaccttacaaattctcttaattaataaataaaccctaaaacttcttttttctcaattaagcccatacttagtgaaaattcataaataagacatattccaatttagaattctaattacttaattaaacctaattaactcagtgtacaagcttatattatcttaactagtatggggaccatgagcctatataatcaagcttccaataagtagaactaaaatttactgagtaaattccctaacttattaattttttttaactccactatagattcagaattgaactcctaattacatagaatactcaatttgttccaaatatagagacgctattaattatccattgttataatctaaataattaaagatcctctaaagattagttacttcgagtagggttaaatttactgttctacccttcaa

SEQ ID NO: 106271 - DNA, 1846 bp, Cannabis sativa
gcgcgaaaaatgagcccattgttactcaaatggttggaaggctgaccttggcttagagaagtcaaggtgccgcacgggtgttccgctacctaaaagtgtgagcccgtgacacctggcaatgtaggattgcataacttacctgatattttcccttacggatcacaggactactgactgtcacattcaccgtcttcaggttcatgtgccttacgatgcttacatgtctcatcttgaaaagtgagagaaggttgtagaaaatcataaaagtacttttgggtaatcatgcccatcagtttgcgaaccatatcaccctccattggtcaaactccattcttagaacacaaggcagtaatgagagtggttttgaattgagctataagtttgaaattgtcaaaaatgagtagacatatatcgaagttcagattcttcatgatggcataagctaccaagcacctctcgtgatcaattgtggaaagatgagaagttaataataagtcagcattaacaaaacaaacctaagctcgagcaatcaagtttaatttccatctagacaagtacttttggtcattatttgtagttgaaaactgagctccctccatgcttaaagtttaagccaccttatcatcattaacactttttggactgaattaagttcaatgtttgatccctaacttgaggaacttcataaagattgaattgacgatctatctggtcaatacccaaaggcacccacacacctctcatataaatgtcatcttttttaattttagaataaaaaatttgtgaagaactcaaatatcatgttgtaattagcctccctagcaatggtgtcataaacttgttatgaatttttaagtacgcaagtacacatattgctacaagtaatatacttatgcaagtgaggtcaaacttaatgactgttgttaagtactaaataattaaattattagttcgatatgatgaaaataaatttttttaagatgtgaaattaaaactaaattaaaaacaataaaagaataagaaaataacattgataaaagtttagggcaattaatttcaattgtatcaattttttattgcctaatacaattttaattccttattctaatttcatgtgataaaagattaactacttcattatatattctaatattattaggttatatagaatctgaattatatagaaatcttaattgctacacaaaccatacaggtactttcgtcaaatattaaaatttatgtctttttcactatggcataattaatactcacctttcagattttgtattgaaatcataaacaaataattggtgatcaaagccataaacataaatgaaatagatgcacataagaaattggggaataactaaaactacattaaaaccaaagagaaatatcaaacaaatatacattaacactctaattagaagtttagctattcattgtcacagtgaacaattgaattgaattaaattaaataggaacataaaattaatagaagataaacaactcattgataaacaatggtcgtagtctctcaagtcggtttcttcttctaattttgtatcccacaagtctcaaaattcaaaagctcccccttttccttcgaaaattagggtttagaaaccctcataagttcctaaccaccttagtgggccgcgacattggctaatgcattttttggcccgtgtttgcaagatccacaagggcctatgaatttttaaagtagcaagccacgacctgagtacgcaatttttgggcagggaattctcttcgtgttatagtgagatttctctcacctagaaactcgagaccagactcctatttaaaggacacgtgtattcag

SEQ ID NO: 106272 - DNA, 1302 bp, Cannabis sativa
tatttaactcaaactcaattttcttaaatttatttttttttcttattttttcagtctatagaacaaccttaacccatataatgtaaaaataagatatttttactaggggtgttcactaagtatccgatccaatccaatccgcacggtccaatccaatccaattcaatccgcaaaatgcggatatccgcacttgcacggattagattggattgaaaaatctaaaatccgttgcggattggatgttatttgacctcaaaaagtaaccgatccaatccaatccgcacttaattatatatatttttaagaaattataatatataatatatattaattttctattaatattaaaaattatacaaacttctaatttcttaattttttttaataatatattgagttggtgtattttatttgttttataataaaaaataccaaaaaaattattcttattcacatagtcaaatacacataaatttaaatatatatactaacttatttattttaataatgaatatatatatattttagtgtaaatttaaagatgagtagatatatataatgacatatatgtatattggtttgatttatatataaatggagatggaaatagattattattggagattaagaaataataatcttttttaattttttttttatgaaatattaaataatttatcataaaaagtaaccgatccaaaatattatgcggattggattgaattgaatttaaactattatgcgatcggatttgatctaaaatatgaaatccgcacttagtgcggattggatgttgtttgatcaaaaaagtacaaattgaatcagatgaacacccctaattttcacattatttcttaattacgttaattatacatatttattaaaatttagaagtctccatgtcttgcggcctctgcaacttaagaaacctcgatcccacccccaccccacccaagtataaaatagtagtaattatatttgactaagttacattaaagagaacaaatagacaaaagctaacgtaatttttgcaaccttcagatagatatttttggtctacaatctttggatatgattcttgtcacaccattaattttccacgtaacagtccctttgtcccacaagcaaggctgtccaataatttcatgtcttaaaaacttttcattgaaagagatttatcgtcaacaacttatattaaaagtgcctatttaacggcaattcttagtttaatgattcttgatttaatgattcttaacagactattaacgttaaacgttaacaaataaataaacccaataatta

SEQ ID NO: 106273 - DNA, 914 bp, Cannabis sativa
  modified_base (126)..(131): a, c, t, g, unknown or other
tataataaagtgtacaaattataagaagcatatatatacttgcaaaaagctgcgtgcgaggcacgtatactaaaattttatgctagttttttttatatattatttaaaagtgatacaattaaaaannnnnnaaaaaatattattagttattagatgagattattattatgtgtatctaaatatagtttataattttgtcaattaaaagttaataccggatgcaatatatagtgtttaagaaagcttgataattaaaatatattcttaagttaatcgaaaaataaactaaaaattgatgttccaatacttaaggaaacattactgtgtaagacaaaaaaaaaattaaaaatcaatctctaaattattgataattgaagatagcatgtgtgtaaaaaattgtagataagaaaactaatgatactcattggtggattttaatcttcattttctttgacagagacgataaaagaaagagaatagttaatcacctgtcagtgtcaccaccgtagtatgctatgttgttataaacaaatgaaatcccccgaaaaacatcttttaccatatcactgatcgtaccccgggaaaaatttctgcaatcaattagtcttttaccatatttcagtgaaagcaatgtcagtggtcttgacatccacatgagccttaattagtgtttgccacttgcacacaagccttctctctctttaagacaagcgacctcaacttatctgtggttaatggtgatgtcaatttcatataattttgcatgattatagtttttttggtatggatatagttatagttaaatacataaaacattgacgaaaaataaatagtgtaaacataaataattttgaaattaaaataatgaggttcataaccttacccagaactttgtgagaacattcttcccttga

SEQ ID NO: 106274 - DNA, 592 bp, Cannabis sativa
gttcttcttgttttaaatctattacttctcacatgtagtattttgacagtgattgttccagacacatgacaggtgagaaagactatcttgacaacattagaccaatgcagtgtgaagaagttatctttggtaacgatctagttggaaaagtcttaggaaggggaactctcaattttgaaagcattcctagacttacgaacgatatgttagttgaagggctaagggctaaaggctaatcttcttagtattagccaaatttatgatcaggattatattgttaactttgatagtaaccattgttatgtttattatattcttgatgaaattgtcttgcaagggctcaaatttagtgataactgttacactctcactacgtatactaattgtcattctgctaatgataacactgctgatttatggcatgaaaaacttggaaatattcatttcaaaatttttaaaagattgtcaaatgcaagaatttgttcgagtattacctaaattaggtaaagaatctatgggaaaatgtagaccatgtcagcttggtaaacaattaaaaatttctcacaaaagtgttcctgatgtgaatacttcc

SEQ ID NO: 106275 - DNA, 861 bp, Cannabis sativa
ggagttcgtggttgaggcttacaaaggttttgccttgaagccctagtttgggtttggagatccacaactcaagaaggtgttgttcatgtaacaaagaagacaaaatacacaattgttagtattgattattgagagaaagagagagaatagagagcaagagaatattgtatatatattcggattaccactcttaccattgtgagttggaatccaagctttgtaactctgaagattcatagtggaacgaggcgagctcgaagaggacgtacccgcacaatttttggggaacctctataaaattttggtgtgttctctccattttattttctgcaattactattgtgttttttgctattttcggtttggtttttctggtttattgtgaatcgggttgggctgtaattttctgggtattgtgtttgttgttcttcgtgttcttctgtgaagaacaacgaagaaggtggctctgttgaagagggataattttctggggatagattcgaactagggtgcaatcgggttgggtttattctctagctggggttgttttttctgggttatttctggtttgttgtggctggtgttcttcatgttcttcatagaagaacattgaagaagaaggaggattgtatttctctgttagggttttgttagtggaggccgtgtataggtttgaatgataaaagagtatacatatatgtgtgatacatttagggttgctgtgatatgttaaaaacgacctgtagtattaatttaaaattaaaaagggtctgtcgtttgggttggttccaggtcagagggtcaaaagaaagctttgacttgtttttccttttgctgtggtgtagggcattaaatcctaca

SEQ ID NO: 106276 - DNA, 510 bp, Cannabis sativa
tgaaaatgtggagaagaagcaggatgaattgacggaagaactcgccactatccactcgctgatcccgggaaaggtccaggaacatactgctgttcttcgagcgaaagttgctactgtctgcgacttgttgatgactgaagttgagtgtttgcgtgggttaaacaaggaacttcaggacaagaatgaggaaatagagaggcgccatagagatgagttggcggcctttatagaacggctcgacgaagtccaagtggattgggcgatgtgcaagcgagctgttgcggggatgggaggaggcatcccaacaattcagagactcgagactcccaatcctaaaacatttgcgagttccagaaacgccaaagaggtggataatttcttgtggggtttaacccgttattttgaatctacatgtattactgaagaggaggttaaaatccgtacctctgctatgtatttaactgatacaacgatgctatggtggcaccgaaggcatgctgaaattgagaa

SEQ ID NO: 106277 - DNA, 580 bp, Cannabis sativa
  modified_base (171)..(204): a, c, t, g, unknown or other
aggacctggaccggggctcggaactagatcaaacacagccctgaaactcgagctcggacccagtcccggacctagacaaggactgagactcgaacccgaactcgagactcgatcccaaaccgagcccttgactgaaattggaattcgacctcgacatggacacgaacccannnnnnnnnnnnnnnnnnnnnnnnnnnnnnnnnnggatcaaaacacgggacctagacccaaacccaaatgcaaacccacaactgaacccgggacccaaatccaggataaaaacttagaccttgactaagacctggacccagatcgagatctaaaaaacccacacctagacttggaataagacttggaccccgaccccaacctggacccaaacccggacccagaaccaaacccgaacccggaattagaattggaactgtgactaggacccggacctgaggccagaaccaaacccaaaccataaacataactcatactagaacctagacaaggaccttgactaggactgagacctgagacctgggacctaaacctggaccgggacctggacctgacctggtcttaaaccctc

SEQ ID NO: 106278 - DNA, 686 bp, Cannabis sativa
tacaatataataatatgcaatattaaaaaaattatataatttaatttaattattatataattttttttaaaaaaaaataatatgtaataaatatattcttataacttttattagttaatttattatatttgaccatttttttaaggtttttttttttaaaaaaagaatatttactaacttatttttcaaatttagagtcattccataactagatgtgtcgttgagtttgtgatgtagaaaaagggtcccaaggtccatagtgatttggttacaaagctaaggttgtaactggggaaattacattgtatacccactttattttacttgttttaatttttatttttattttatattctttaatatatagccacttttataaatgatgtctccattagatcccttaggttagtgtaaattatatgctagacttaagtagaaagtgaggatatattgggcaacccactcaaaaaaaaatgtgtatattttaataaaatatagtatgagggtatttttgattaatgaatataaaaaaggaaaaaggtatttttcaacttctcccgttgtaagcgagctctgctccgagtctgaggggggcgtttggtttaagaaatttacatggtatactaacttttgccattttttttacaaaaatactgttaggtggtatttttttacttttttactgt

SEQ ID NO: 106279 - DNA, 552 bp, Cannabis sativa
agattagagtaaaaatacataaatattttttatagcattttaattttaatgttaatgtttattttgttactagaaaaaatatatgtaatcatgtaatttagttaaagaaaatttttagtgtaattttaatagttttgaaaaaaaaaaagttttgtattttattataactttagtatagtttaggtaatgtttaattttacaaagtttatttgatattagaataattaaaaactttaatttttttgtgttgatgtgtttgcaatatggtaggttattttttacaagtttgacgtgcttattcatcaatgatttttttttttagaatgtgcaggtatatcgttaagtctttctttggagcaatactagacgaaatttgaagttgagatcttaggatttaaagagtgtatttcattttgtaaacacttttttttgcttcatagttgatgatgatagaattggaattgagttaaaaattttgtaagcctaaactagtgcactatatattgtaattatattagtgttattaacaaatttttatttatgctcgattta

SEQ ID NO: 106280 - DNA, 759 bp, Cannabis sativa
gacaacaaatgctgcttaattttccaacgtaggttcccttcccaagatcaattcattctcagctgcgttgtgagttaagtacaatacagatatgtctaagttagttatatgatagtattataatttttaattataatggataatgtcatatacaccattgcaatgtacatatccttggttatatgttgtttggcagagcaattgataaaataaatagcatctatagtaaagatatgctcggtacaaacaatcaatcttttgcggatattagtatcttacattgatttgacttaaaaaagaaaatggaaattattagtgatagctctctcaacctaactcgaacacataactcaatgaaagtctaatacaccaaaaaaaaaaaaaaagacaatgccatttcaaaaaacaaatttatgttgaaaagatgaacctcatcagagggtaataacttgggagaaccacacaatagcataatcattcaaaaccttccgtgacactatactcatgagttaggttcattcagaaattattaatattacatgactatagcatttataacgacttgggacaaaaatgtattataatactattgtaagcagattagaaactggtatagcagaataaaattatagtagtaataatattaaccaaacatgcaaaagttttgagaggctggatctctcctataatgctgaaactattatctagctcaagcacaatctttcactaaattactcgacattacaataaataaattga

SEQ ID NO: 106281 - DNA, 538 bp, Cannabis sativa
tggatcttgcaattgtgcttctttgattcgctctaaaagagtagattgcagggtaatattagccaactgccctacaactaactcaattttagctagggtcatctcatttgctaactgctgggagatttgtttcatagtatttatctgattctgtccctttctactcaaggcatcggcaaccatgttggccttacctgggtgataaaggatctcacaatcataatccttcaccaattcttgacagtgtctttgtctcatattcaggtctctctgggtaaagaagtattttatacttttatgatcagtgtatatctcacatttctcgccatataactaatgccgccaaatatttagcgcaaatacaagtgccgcgagttctaagtcgtgagtagggtacctctgctcgtactcctttaattgtcgagaagcataggctattacctttccggcttgcataagaacatagccgagaccttgtctcgaggcatcacaataaacaacaaacttttccttatctgaaggaagagttagcactgga

SEQ ID NO: 106282 - DNA, 572 bp, Cannabis sativa
tataagttaatattaaaattctttaaaaaaaaatagtcgggtcggatcagatccgattcgaataagttgggtcggatctaatccgatctgagtatctgatctaacggggcgggacggggcaaatctttacatgatctggatcaggtcggatcatagccggatcagatttgacccgacccatttacactcctaattatccaccttggagtaaaagaaaatgtatatacatcatatatttatttgttgaaattgaagataacaagaaaatgtataactttgggcacgatatgacacgacacgaaaaaaataggcttaagcacgatacaacacgataaatccaaaggcatgacatgtaagcacaaataaactagctcaaaaatacaactgttagatagtctcatatcgctaatttgtggaaagataatagaatacataagaggaatgctacttctattggttttgagatggaactccattcacttcatccaatattctaacatggtatcaaagcaaaaacacaaaaaaaacccactatccaatcccaacaaaaattaaaccgatcgaagtagagc

SEQ ID NO: 106283 - DNA, 903 bp, Cannabis sativa
  modified_base (165)..(170): a, c, t, g, unknown or other
  modified_base (321)..(341): a, c, t, g, unknown or other
  modified_base (557)..(559): a, c, t, g, unknown or other
taagtggttgaaataaagtggcaaaattgtaactaaaagtggtccctttatggtcggccactagtatgaattattgcctaatattttattttttttaattcatataattaaaacctaagccctagttgaaatactataaaaagaacatgatgctctcatctcatnnnnnntaacctaattcaacctaccaaacctagttttcattctctcacaactagtagataaaagagttctttctatagtgattttgccttcttcattgttcttcatcaaattcgcccatagtgatagagtgacattcccacacatagcaagtcaagnnnnnnnnnnnnnnnnnnnnnacggtggtaaccaacccgaaggagaaaaggagatctaggttcagatcttgattatgctctgcgacagaaaggaatcaagggctagagatctaaacgaaagaaatcatattatttcgctgcaatcaatgtaagattttctaaactcttatgtgtttactttaattattttagggatattcatatttatgatgctaatgaaatatacttgttagtaannntagatcctggtaaaatattctcaacagttattgttaggctatttttaacctacgttttgagtcactttttttagttgttttcctactttcttattctttttggaatgaaattatgcttgttttctttggttttagttttcacacttggaataaatcaattaatcaaatttcggaaaacaacaatctatagaatagagaaaattctgcaagataataaagctgaaacttcaagcttaaatttgactatgttcttctcagattttggaaaaaaatcaaaacatagaagttttagattttttttttcttctttccaacgcatcttgaatcaactcatttggagtttg

SEQ ID NO: 106284 - DNA, 505 bp, Cannabis sativa
  modified_base (149)..(150): a, c, t, g, unknown or other
  modified_base (358)..(364): a, c, t, g, unknown or other
attccatatctatgattagcactcccactcaattgaactaccacgttcccaagatgtaaatatctatcaaaacaattggttagcatccacgaacaacttgaagaacataaataaaaaaattaagctgaacctaaccatattaggattannatccatagacctaagatcaacaattgatattgacttagaaagatataatggtaaatttatgatatcttgtttaagttcaatatcgttcccttcaagtgtatactccatacatccgatattggtaaatttttccaatgccttggagattacataaaacttatctaaggtgtaagtataccttatcgtcgattatcatgttagtctaaannnnnnnaactgacaaatcatgggaattagagtttggaacatatacaatcatgattatattccactgtgttaacgacactataattatgaagaaatatatatatatttttatatatgttctggatttaatattgttgggttttatgcc

SEQ ID NO: 106285 - DNA, 685 bp, Cannabis sativa
cgaaccagtaaacttttctaatatggaagacgaaaaaagattgactttctttgaaaacaaccatttatttcttatttttttgtgtctttccatacttaaaatctacaagttctatttgttcgagaacttgttcccctgacagtggcaaaggagtcatatctccctcttcagtaccatcgaatgctttcttcttccgtctattaggatgatttgtaggcaactatcgtctgtgacccatataacacatcttgtatccatttgccaagcaacgagcccatgtgttagtgcaacaaatcggacaaccttcgtaaccttttgtgcttaagcctgataaattaatgtaagctggaaaatcactaacagtccaagattaaagaattcttttttaaaaccatcataggcctgaacacaattctcatacaattctattaaatcgtcaatcaatggttccaaatatacatcgatattatgtccggattgctgcaagcctgatatcattaaagaaagcatattaaatttccccttcatcactaaccaaggaggaagattgtacataacaaggaagacatgccataaattatgatggctacttagtgatctatgtagatttactccatccgcagacagaccgagatgaatgtgtcatggttcagatttgaatccaggatttatgtagtttactttt

SEQ ID NO: 106286 - DNA, 531 bp, Cannabis sativa
ttcattttcacatatacttggctcgctcagcatttctaccgggaccagattaagttcatccagatcattctgcgaggccagttttgctaaggcatcggcgttggagttttgttctctcggaatttgttcgattttaaagtaatcgaatctttccaagttcttctgaactttctctaaatacttcgccattttcaagcctttggcctggtattccccgaggacctggtttacgatcaactgcgaatcactgtgacaaatgagatttttgactttcaaggcctctgctatctttaagccggcaatcaaggcttcatactcagcctcgttattagatgcgccaaattataacctcagagcatagtgaaacttaaagcctttcggcgatattaatatcacccctgcactcgaaccctactcgttggatgtgccatccacatataacttccaggttccgaatctcgctgatcagatgggatttcttcaggagttataccttttatcaagaagtcaactaaagcttgacccttgatg

SEQ ID NO: 106287 - DNA, 1714 bp, Cannabis sativa
  modified_base (60)..(60): a, c, t, g, unknown or other
acatggtcgtatcctagtatagaaagttcttacttatttgttaagccttgtaaataggtntatgggcgcctaaatacaagtcaatattatgtgatatgttatatgctttactgactgagtttgtcgactcacagttctactttcatgtgtaggtaaaggaaagacgaaggttgaacaggagtgagcctcgagctaaaatgatgttgtacatgtcatggccgtgcgacctagagtgttcagtctcgggacatctggggttttcattttatagtcgttgtgtgacctgattattgtattttggaatattttgtaaaaagtttagcaatggagtgttcggtctcggaacatctagggttttcattttatagtcgttgtgtgacctgattattgtattttggaatattttgtaaaaagtttagcaacgggatctcgaattttttaagtatttatataaagtttataaagtttcatagttaattctaaagttttaatttgacacgattttcaagaaaaattctttgattagcaaagatagcactgcaattgaaaaatcattgtagcgtgccttagtattagggcgttacaattaaggccttaacttccttgtggctaagattaggcagtaagtaagcttttctgttaatggataccgtccttcatcttcaacgagacttttgttgatatagtagactggatgttggatgttgttttcttctctaatcagcgcgacacttacagcgtattctgtaaaagctaagtatattcctattcttcttcgtccaggggttttgagagtacgagagattttgcaagttatctttttaattcttaggaagcattcttgcattcctccatccattcaaatttcttgttacctcgaaggatgttgaagaaaggaacacacttatctattgactttgaaacaaatctactgagtgcggctatccgaccagttaagctttggacttccttagtttttgttggcgatttcatatccacgagggcttgtattttctttggattggcttcgataccccaagcattaacaataaaactaagaaacttacccgagctgactctaaaggagcaccttaagggattgagtttcatgttatattttttgaggattttgaagcattcatctaggtcatctatataccccaaccttcctggatttgacgagcatgtcatccacgtatacttccacatttcatccaatctagtctttaaatattttattcaccaacctctggtaggtagctccaacattctttagaccaaacggcatgaccttgtaacagtacagacccatatttgttcggaaacttatatgttcttggtctagtaaatgcattctgatttgattataccccgaataggcattcatgaagcttaggatctcatgcccggctgttgcatccacaagttgatctattcttggaagtggaaaacagtccttggggcacaccttgttgagatcggtaaaatcaatgcatacttgccattttttattgggcttgggtactagtacggggttagctacccaagctgggtagaaagcttcaatgatgaatttgttattacatagcttttctacctcttcttttaatgcttgcacacgttctttgtccaatgtcttcttttttattgaacaaggcaaaagtttgggtcaatgtttagggcgttagatattacaaaatttacctgttacaaa

SEQ ID NO: 106288 - DNA, 647 bp, Cannabis sativa
  modified_base (58)..(58): a, c, t, g, unknown or other
taatttagttttttcattagtcttgtcttttgacatggttctttagtcttgtcttttnacatggttttttagtctttttcttttagtttaatctggttcgagtcttgtcttttagcatgggttgtgtagctcagaatcatcatggtgctatagtagaagcattcaacaagagaaagattggatgtgttcaactcgaaattgctgagataatatgcattaaaaaagcattgagttagattgaaactcattcgtgggatagagtcatgttggaaacagataacttggtgtgtgtccaagcgattcagagcggtattttatgccttcacaatttgtgttttgtaaaacgatctgcaaataagctggctcattgcttaggcaagagactcttgtttctctacaggtcgtatgcttcagttgtaggactgttcctctgaagtgcgttctattattttgaacaaatttattaattaatagatcttatgatttttattcaaaaaaaattaaaataaaatattaccaaagtgatcacttttgtgtagattaatttaattaaaaatattaagataaatatgtgtatgtaattcatgtgtttattaattgacctgaaggtaagttaatatttgacgagtttcatacatgtacatatg

SEQ ID NO: 106289 - DNA, 586 bp, Cannabis sativa
atataatatatattagtgagattaaatatgtacaaataattatttctatgtatttatatgagacatgcatatataatatataatatgtgtatataatatatgtcacgcatgtatattaaattttatatatatgttatatatgtgtacgatatgtaacatatatagttgtgtaataattaatatattatgtgtatgttacacatgatatggttgagagtaacatacataatttattaattagcataagattatttttggagttataattttatgtatgagagttatatattaattttatattgatatatgagttagatagtatgataataatattgatagtaatatccattcaaaaaaaaatattgatagtaatataatattgtttattactattaatgtgaagattattatcatctatattgttaacaaagagactttggaattccttttccaatattaattttgagaaaagaaattgtgacttgtgataagttacattctttgagaattaaaagtgataattatctcattttattagataagaaaagtgaactatgagaattacacctatgagaattatcttgtc

SEQ ID NO: 106290 - DNA, 1429 bp, Cannabis sativa
agagaacctaggagttgtgatacagttcattattagttgaatgaactttttaggaaagtttaagccttctagcatttcttccaaaaatccccattcaatagtgtcatatgccttttgaaggtcgagcttgatcatacaactcggtttatttgctttcctattataatgtctcaccaaatcctggcaaatcatgatattatgccctataaatcttcccttaataaatcctccttgagaaggagaaattatttcaggaagaatgtctcggattctagcactcaaaagctttgttgcaatcttataaataacatttcaacaagcaattggcctaaaatccttagcagtattaggacatttaattgttggaaccaaggtaataatagttgagttgatgtatttgagaatattacctgaatccaaaaaggagattgctgcttcacttatgtcatctcaaatagtctcccaattgtcttggaaaaaactactagagaatgcgtcaggacctggagctttgccactcgaaatactaaaagctgttgccttcacttcatctttagagaaaccccgaattagcaattttgattgctcaacagataccgctgctcctttagaaattacactgatctaaactttctttctattcatcattttagtcccaagcaggtcattgtagaacttgaggaatgcaacagttatgagctctagttcatgaacccggttcccatcttgtgcttctattgagagaatgtggttttgtcttaatctatgcttaatacaagcatggagcaaagcagtgttgttgtcaccattctcaatccacgccaatttagccttctgttgcagaaaaagaagagtactctttctgcaccttaattaagacttctcgagcctccttttctttgctatgaatttccccattcaaaggttgttgttgtagtgagtcttgccatttatccagatcagtttttgctttaatcggtgcactatgaagtttagagaagccctccttattaatctcctttagcttcactttaaactgcttcattttggacaccacttgatacatctttcagcctcttatcgaagtccttcagatttccgtgaaagctaattcatactttggatgtaacttccacattcaaaagtatttgaatggtttctttccactcaccaaaccaggatggagtgttaaaataccaggagaatggtcaaagataccttcattaaggaatacagcttctgcgtactcatatctatttatccaagcttgattggcaagaatcctatcaatcttggaatagattctatcctctccaggctatttattcgtccatgtaaaaaaattcccactagacttgacatcctctaacccacaagagttgacacactgaaaaagtcagaatcgggataggatttgactcttaaacca

SEQ ID NO: 106291 - DNA, 519 bp, Cannabis sativa
  modified_base (36)..(41): a, c, t, g, unknown or other
aattctctaatatgatgaaattaaacacataagagnnnnnnaaaccttacattgatgcagcataataataatgatttcttccgctcagatctctaacccttgtttctttatgtcgcatagtattaacaagatctgagcctggatctctttctctcatttgggttggttatcagtactatgattgagtacttgacaagctatgtgtgggcatggtactctatcactatagctcgaattggtgaagaacaataattaaggtgcgaaatcactatgaaatgagtgtctcatctactagttgtttgatatatagagtaagaaaactagatttggtaggttgaaaagagttggatgagaatgagagcatcatgttccctttatagtatttcaactagggtttaggatttaattatatgaattaaaaaagaataaaataatgggcaaaaaatcactaagtggtcgaccacactaataggcctcactagttataattttccactttatttcaaccacttattcttc

SEQ ID NO: 106292 - DNA, 827 bp, Cannabis sativa
catcattattagagttagaggtaatattacaatgacaatgtcattgtcatcaacatagattaatagggcgagaaaaatgcctttatcatttttgatgaacagtgtgtgatcagaaagagacgtggtgaaaccagtagatagaagataattgctgagttttgtgtaccattgtctagaggcttgtttcaagccataaagacttttggttaacttacaaacaacatttgggggaatttgtcccttgggtttatacccttttgggagtgtcatatagacagtttcatttaaatcgccatgaagaaagacattgtttatatcaagttggtacatagaccaattgttaatggccgcaatgccgagcataagttttaaggtattaaactttccgacaggggcaaaagtgtgaagataatcaataccttgtttttgattgaaacctttagcaaccaatcgagctttacatcgatcaacggagccatcaacattgtatttgattctgtatacccatttgcagccaatgacatggtgaccatcaggaagagtgacaacaatccaagtgtcattggcttcaagagcatcagtttcggtatccatagcttttttccatataggatcctttgctgccattttgtagctggtaggttgtacaaaggtatgggcagcgagagctgctgctcgaaagtgctgtgtcaacctattgaaagacaaatatttattaatagggtgagtagtagaagaatcagcaacagtattgcaaatataatcagaaagacgttttggtttagataaaagtcttcccattattgaagtgataggagaagtagttg

SEQ ID NO: 106293 - DNA, 5364 bp, Cannabis sativa
gtcaaagcattcccatatggagctctggaactgaaaggcgaaagccccgagacttttaaagtcaataggcagcatttgaagctctacttgggaggtcaattagaccaagccaagtctgccattattctggcgcctctttaagagaacaactcagcgtccggctagatgacgataaaggcaacgctcttgggaggcaacccaagtattttcctttactttttcagacttttgctattggttttagtttatgttttagttgtttttaacattttgaattttttttgtaaagtatcagacattgtatttcttcagttaaatcgtgaaaaaaacaaaaaataaaataaaataatttctcgagactcggaaaccagttgtcgcgaccaccaggttcctgggtcacgacccttttttgtggtcacaaccctagtcgcgacctagacgattacataaacattggaatttttctagttctagtagtcgcgaccaggctaaccccaagtcgcgaccctttttcttggtcgcgaccagggggtttaacaaaaaccctaaaattttgatttctaagctagtcgcgaccagcccatggggttgtcgcgaccagcgtacaaatttttttataaaatcccaatttttcacccataaaacctaaacctaaaacattatcttctcagccgaaacacccccttctcagccgaaaaaccaccaccaaatcaccccatcttcaattcttttcatctctataccaattcttcaatcccaaacctaaatttcactcatcaatcaccacttttcatcaaaattcacaccctaaatcatcaattttccccccaaatccgaaaataccatcactcatcatctacaacctcaagtttttcaaaaacattcaacaatgaaggtggagtagtggcttcttcggtttgtaagtatcattctttgtaatatttaagaagttgattgaaagatttagggatttttgtgaataagttgaatatttggaaatttttagttgataattgaattattgagtttatattctgcattgtagactgttattgttattatctgtgctgttttggtgattttttgaatttgggaaagcaagaaatttacggggaagtgctgcccaaatttttctagaattactttgtggtgaaaatttctgctattgtgctaatatggatccaaaaagaacaagaaacaatgaagaagggggttcatcattcaacccaccatctacgggttttgatcgaacccggtttggtagtgaagcgacacaaaatcggtttatgaggcttaaggctaggccatatatcgaagacaagggtattgaattccctgaaaatccttagaggcgtcaactgcggtttgagacgattcgagcccaaattgaacaaatgaaatggggcagttttgatgatgctagaggacgagcaaatgtcaccatggcatgtgaatttctagcaaattggcatgagcacagaaatggagaagttaaggtgcggggtaagaaagttcctgctacagccgacgccatcaatgccatgtacgttgtaccggactattcaagagaagatcagcgcctccgaattattgaggaggaagagcagtttgacatggtagatgtggtcgagactgtgggattcccggggctaaggttccacgataatgatgggcaagacgggtcgcccaatattctgccccgatgtaaaatcaacccgatggcaaaaatctggatatattttgtaagtactcggatggtaccgagcaaacatttctctgatgtccagatggataggcttaaatatgtgtacgccatcatgaaggggtacaatataaacattggacaagttatccgatgtagcattgaacagattgttcaaggagccacgggtggtggccttgttgttgctcatcagcgggtggttgtccataaggatgaggctccttgagcctgttgaccatactgacatccatctttctctgcggtaccacagtgccgtcatattccaattgaggcacatcataagtcccacaaaaatcagtgataattccagccaaaccaaggccaccaccatttaagtttctttacttgtttctttaagtttcttgaatttttattctgtttaaaatcttgaaaactatcgatttgccaaatagaatcataagtctagtttagtggtattcaatccaattccctgtggttcgacctcacctgcgtgagtttactacttgattacgtgcacttgcgtactgttttataattttcgtaacagctctagcttgagggtgagtgttaaaatattagttgtagattatttagaaaataaggtcaattgtaattacttcatttcctatttttctaatttagtttctctaaagttgtataaatatatgctatttagtattcacatgaataataaacacaatttcattcaccattttctacaaaaagtaatttataaaaataataaaaaataaatttatttctaattttctttgattttatttttttttcttttcttcttcttcctcttctcctaatccttgccaattcttcctccttccccaatcgcccaaaccccaacccaaatccaatcacccagaccccaacttaccaatagcccaaactcccaattacccaaaccccaataactccgatcaacccacaacactcctaagttcatggctaggcaccaaaggtctcacttcagtcctcgagtctccagccccgcctcctaaaggtccgacttgcccccgctgctcctgtctcattaagcctccaaatagcgcaaggtcctaatttatgaatcttcttggaaattctatttcttttttgctttcttctccattttagatggacacttattgtttcagatgcttctcatttggcaattgcagaaaaccagatacggtttcttcttctgagagcattccctggtgagtgtagccttctttgttttttttaggggttttatagtgttggacttgtggtttggtttttgggttttgttatgggattaaggtttttcaaatagggtaattgaaaattgaagcaaattgactttgagggctaccatcggtctaaggagagaagaagaggaggaagaaaaagaaaagaaaaaaatattactttaaattactttaaaaaatttaaataatttttgtaataatttaaattatgtggaccaatcagacataacacatctacaattgtatacatagactatccaacttagtattttactgtaacaatctaacaaaatggtaaaaatcacaacagaagtgaaatttagagtgtttcgccaatatcccttagataattatgttatttggcgttttgagtagaaataaagtgatgagatcatgagaaagtaagtaggaaaaatagcgtataatatatttttttatggtttggagtggagtgaagtggagggacttaaaccttcaacttcagtctatgatgtcgttatcaatcacgctgccagtttatataattttatacaagacacttggcctttgttaagccactatataagttaaatagttaacacatcgaatttttagtgttgtattgaattacacaatacggttctctattaaaaacaaatgaagtaatacaacgcagtgcgccatatgcatgcccataaaaaaagatgcaaatagaatacaatacttaccatctggaaaggtagatatatgagaagccaagacttttatgcccccggattcataaaatttcaggatcccgtcatcagaagtcgatgataccagatacaaaaactcgtaacactcttctataactaatgaaacagatctgtaaataaaaagtacagttattaaagctcaaatctatatcaagcaagaaatatgatatccctaaattgtccaaccacaaaatcacccctagaataaaaaatagatcaataacttgaacacaaaaaggagaacatatgagtgtggtaaaagcaaaacagcatattaaaacattagctttatgaagacaatacagtgtatgaccaatcatgagattgagaaccttactctttggataaaatttccagaataagaggaatcttagaaaccatatcttgagaagcagcaatatcagggactcggcaaaatgcagcaagaacagtaattgacaactgcaaataagcctcacgattgtcaccagcatttcctgtaactgttcctgctcctgcttactcccaaaaataaaataaataaataaaagatcgatttcttgagtagcacattcttcactcagctcaactggttagctttcttttttttcttttttttttaaaaaaaaaaaaaggtctcatattagataaatcaaattagaccaattgatcatctggttggctttcactaaggcaggtgttactgctttctataatcaagaataataaaaggattccaaaaatcaattttttagtttcgattcgttatgtaaagccttaacagccttctcactaagtttcagacagctattaagaaatttataaaccctaaatgcggactatgaagcttaaaattgcaccaaactcaaaaattccattagaaacttagaattaatgaacaaacctatcgggcgaggtaagcaaacaaaaatctcaattacatacatcctaaaatgaaacaaaacccatatgagagaaaacgataccagttctaagaaggcgatcaaggaatcgaacaccgacggcatcgtaaatcctacggagagaagaaaggtcatcccctttgcaaaatttggtgacgagaagtagaccagcgaggcgctgctcgtccctgtcgcctctcagtaacttcaagcaatcttcaagtgtcggagatggctgttcttcttgctgcggttcctgggaagcaggggaacgacgacgtttgaaagaatgaaagagggcaaacgacgaaaagagtgagaggggaaaagagtgctcaccatgggaaagtggagttgctggagcgagttgcctaccggcgagttcaaatggaatggattgagagccttaaggaggaagaggttggaagttttggagggtttttcgaacgttgggggtttataaactgaaaacatgtagactcttccatatgtcaattatgaaaggaaagtagtactactaagtactaaccgctacaggtgttcgcggtgcgtgtggtgcggtttttaactattttttcaaattaatttgcacatgtggtttgttcaattttttaaactgcactcacaccgcgatactaaaaaaccgcaaaagccgcatcgccaaaaataatatggtgcggtacgatttatgcagtttaaactatcacaatttttttttaaaatcatcataaaataattaaactatcattaatataatt

SEQ ID NO: 106294 - DNA, 616 bp, Cannabis sativa
attgtcgactgaatatcgacaggatgtcgatattttgttgacatgttgtgaaattgctgtctgattgaaattgtcgacagaatatcgacaggttgtcgattatattaccatattgattttaagtttgtattgtagactgaatatcgacaggatgtcgatattttgtcgacatgttgtgaaattgttgtctgattgaaattatcgacagaatatcgacaggttgtcgatattttgtcgacatgttgtttattttgttggctgttggatgatgtcgacaaaatatcgacatttgatattttgtcgaccatttttataatttgttggcagtaatattgatttgttatctgttatttgttttttctgatggctccgagactcataattccagcatccgagcattttactggctacgtgacttacagaggcaccagaacttttgtgaaaatcaagtctcggtttgaggagttcaacttgaataacatggcgaaggaaagccgtttcggtaacttttggaatgtcgttccccggacattctcctcggtgttatttcaccagctgatgctgcacaagatgaaggttgatgctcaggaggagttgaagatgcagttttacattg

SEQ ID NO: 106295 - DNA, 646 bp, Cannabis sativa
tgaaacccgaggctcagataatctagtcaatgtcttcagcctccatgttactacaataaagagcatttttattagcattcgggtataggccagatgttgttgagaaaagtttcatggcttgtatcatgtacatcacactctttgtctctcccttacaaaatagtaatacatcatctgcaaaacccagatgattaatcttcaattctccacacctgtcatgaaaaaagaaatcctctttttctccaatcttccccatgagcctagattagtattccatgcctattacaaagagtagaggcgatatcagatcaccttacgttagacccctcctagtttcaaagaatccatgaagtgtaccattaaacatcaatgaacgtctaggggttgatatgcattacatgattagcttcacaaactttgaagggaattgcaatccttctagcatttcttcaataaatccccattcaattgtagcataagccttctgaagatctagttttatcaagaaacttggtttgtttgctttcctcccataatgtcgaaccaagtcttgacaaatcataatgttgtggccaacgaacctccctttaataaatcctccttgtgaagaagaaataagtgaaggaagtatagcttttagcctgga

SEQ ID NO: 106296 - DNA, 847 bp, Cannabis sativa
aaaaaaaattgtctacaattgaaatacaaaatcacatctattacatttcaaaaaaaaaaaaacatctattacattacaaaaaaaaaaatcacatctattaaaatagtaataacaaaaacaatgataatgacgacgattcagtttttgcttctagaataccattgaaaacataaaccacatactaaataaactagcccaaaacacatatgaatagcaaagagttttacaaggagaaaaaaccttaagctatgttgattggcgaaaactatctaactgaataaacattgagcattgaatattaatgacctagaaaagaaaaactagctaatgagaagctgatgaaaatacaaattaatttgatgatacaagtttcttgactaaaataaactatgaactgtgggactgcagtagaagtgaataactaaatcgaggctgacctagtacattgaatacaccgagtcataacagttttcaccaaaggaccaagattcttatcaacaacggatctcttcatatcagtgaagcgaccgcgatcagatccaaatgccatggattgatcctgtaggtcacattctccaccctggtcacaaattggacagtctaatgggtgattcatcagtaaaaactccattaccccttctcgagccttctttgctactggagtatccgtctttattttcatccctggaaaatatattatcaatgaaattacaaacacgagcaaacaaattaagcaaaactaaaaattcaaatagcaacacgccagcagcgctgttaaacaatatatgaaacgagagagattctcttctctaaaccaaaagcctctcatacaacaaattgtgatcaa

SEQ ID NO: 106297 - DNA, 696 bp, Cannabis sativa
acaaataggacaaaaatcttttatgtcattgtcttcccaaaacaagacacagtgatacttgcatacatcaatggattcataacctaaaccaatgttatgcaacttcatcttcgactcgtaatgggatttgggtaattttgtaccctctagaaataactcaatcaatatggagagtaacatatcaaaagaatggttactccacttattgagaactttgtagtgcatcagcttcaccaatgcattgattgttgattttttgcaatccgagtacaattcagtttccatatccttgaacaaatcgtcgtacttaccactaccatttagaaggggctcgctgaaggaagcaatggtagaacttgtatcgtcaaattagggtcttttcttaaactatcaaccatcacattcgccatttcttcttcatcgttgtctactatttctacagccgattgcatgaacgactccccataaaaataccagatcatgtacgatcattgcttaccattcataaacaaatgtactctaatattatcgggagtctcgaagttcacatttagacatctaatgtaagggcatcgtgtgacttcggcagaatttatttgcactcaagcaactccaacaaactcatccacatccctatgaaaatctacaaaatgtctattaaagtcatccaacttctggcgctcaccatatttctac

SEQ ID NO: 106298 - DNA, 606 bp, Cannabis sativa
aaattagtgacaacttgtatcttaatattatgttttagtcacaagtaaatttttattgtgactaaaaattacatttagtaacaaaaatttatgttgtcaacgaagttcaacaagaatttgtaacactacaatacaattactaaaatattaaacattcatttttaaccttggtaggtgcaagactttctgttgtgccccttggcaccacacttgcttacaaacagttcagtttgacttaattcttccaaccttttccttcttgggttgccctattagtttcttctcaacagacactccaactgttatgttctatatgtcatcaggcaattcccaatcatcctcattacaaattggcataattgtgtcttcatatgtattcctccaatattctattgtgtaatatggtgaacacagtgcgtacatactaatactttgttgctgatcgctgcaacacatgcatgaggataaggaaacttcataatctgaaaaaagccggaagtgtcagtctgttcctgcaagtccactacaacatcggtctcaactaatcctccagggtggacattcaacgggtaagatccacgcgtgtcaacgttcaaataccgagat

SEQ ID NO: 106299 - DNA, 905 bp, Cannabis sativa
aacataaatgacttctaatcttttattgataacaaatcagattagattgaaatgggttttatttagggcataaaatccgaacaaagagaacaaaatttttcactgataacgacaaggaaattgccgaaaagatagtaagtatatattaatcattaattgagtactaataatgacttagtatatataattcatatactaattgcttgaaaatgtgcattagactcaattagaggagcaacttactcagggacaaattcaggtccatggccaaaataatatcctaacgcaggcgcttgggacaccagagcatcttggacgtgtcaaggctgttgggtatgctagtacatgaaatgttgtttccttagttatacaaaaaaatcatagctaactttatttcatgatttgtaggttcctgaccaaggtatctaaactgttcggcaggaagaaaagggaagtttctaatgttgtggctcggcaacagaaggagattgataaattaaaagccaaaatccaatcccttaaatagaacaaaaacactgcccaacaagaggaagaaggagaggtggttgatcaggcgtatgttccacaacaatacgctagtgagtatgagggtcgaccacaaatctatgttgaggagtttatttccctcaatgagccacctctcctgtataatttcgatgaccagagggcccttgatcagcaagtatatctctgctctgacaatatcgacaacattgtgcctcgagcgtatctgtacgagcatcagggtccaatcactgtacgagcgtatctgatttcgaaaatgctggaaaaggatgctaaaatcccaatctcaataaaagggtgcatatatattagggaagtagcaaacatgttccttccttggcctaaatatctaattgcaa

SEQ ID NO: 106300 - DNA, 2012 bp, Cannabis sativa
aattattaaaggtgtaattattttcttagaaatatgttcaatatttattttgtataagaataatacaatatgaattctatgtaaattgtgggtgagtattatgtaaacttaaatgctaaaagtgctcaacattataaataaatgttataatattgttattgtgttatcatattatatctaacatatttttatttttttgataaaatgtttaaaggtacaatattgcttaatataacaaagtgtaacgttgttattggtttgatacaatataatatattgcacctaatgtgaatatatattttttatttgttaattaagatttttgccttttgaattttgaaactgttaaaaatttctttctacattattaagactattcgatttgtgaattttatctaattttagtaataaaatgaaagttcagagggcatgatttcacacatgtcaaaattcaagaggcatgatttagtaaatattaaaatttggggagcataaattagtaaaatttaatgaaattggataaaagtttttaaattaacgatctcaatagttcaaggagaatttttaacagtcaaaaaaatttcttagtacatgtcaaaattcaaagataaaaaataataaacagtgataaagtaccattctcaatttggaaaaaattagctgaaaaataaatcacaagttattattattattatttttttttttgaaatgaaatcacaagttattattttcacgtgattattgcagaaacaaacaggtgagatggggtaccattaattctcaactttcacttaattattagaactgttcatggatgggctctattttttattattaacacatgcccattttattatattatttttttttaggaatggcattattttattatgatattatatgtagatatttttttcttctaacttcaaaatcaatacattttatgagaaatttataaaatatattataatgctaaaattagtgttcacaatatattatatgtgtatggtaaaatatttaaactgtattttttgcatcttaaattaatccaaaaatacgaagtaatacactattcatgcatgataaattaacaccatctacctaatatgtacattatgaaataattaaagtgagtgttcattgtagcctaggaacaacatttttaattattgagaaaaacaaaattattaagcataaatagagaaactaataattaaagaagtagaagaagaaggcatagtttgaattattagtttatagaaaagatccaaattagtgtaattaagttaatcaaaaaaattaattattacacataaattaatattaaagtagtggagtggacctactccatgtcctttacctccatcaagaaacttcgaggaaatttccttgatttgaatttaatagatgaccctacatacatataattcaagtggtcctatactcctacacctagtgtaataaaatatataaatatatatatatatattttgatttaaacgtttatatattacatcaacgtatatatatatatagtcaattgagatttttgttttctaattaggtgattaatgtgttaaatgatactctttaaattttaatatctactaaatcatactccttaaattttaacatgtattaaattatactctatgaactttcatctatgttaaaatttttttattaaaattagacaaaagtcctcaaatctaacaatctcaagattcagagaaaatttttaataactttaaaagttgaaaaaatataatttaatacatgtggaaacaaaaattttaattagtcgaaatatatatgctgtaaggacagggccgatcctaggcataggcgggctaggctcgcgcttagggctcactcattttaggagcccaaattaaaaaaaatacattttaaaaaaatatacattttttttaataatttttaaaaatattatttatctttatactaagggcttaaaaattttcttttgcctatagtctattttaactcagggc

SEQ ID NO: 106301 - DNA, 574 bp, Cannabis sativa
taagccctctttaactatgtagtcccatacctacatagtctcaaaatcatcgcacatgaccttccccaagcgatgtgggattgtacagctcacccgatatttctccatacagattatgagaacactgactgtcacaatcacccccccttactgggtttgacgtcctcgtcgaccacacttctggctgggtcaaggcactgataccatttgtaacgtccccgttttaagccttcattgggctcttacatccaataaacgatggctcttatacacgagtatgtcactctggctgcttgatagactgacgactggccctacaggccaacacgagtgttttcagtgtgctttgtcttcactcgcacgcttcttcggaaaactttctaggaggtcacccatcctaaaattatcccaggtcaagcacacttaaatgtagaattcttttgtgatgggctgcagaaaacaagatgcaccttgttgataataggtagtgttgggttttatgccctaaataaaaatcatttcaatataatcagatttacttattaatatatgtcagaaataacatttaatgttg

SEQ ID NO: 106302 - DNA, 836 bp, Cannabis sativa
gtccgagtttgatcgaagtccaaaatattgattaagaaaaaaaactatttaaaaaaatattgaaagtatttttttttattattcttaaaattttgattctcaattaaaaaataaaaaagtaaaaacagttttatagatgtttttgaaaaatatttttacatttacaattttaaaaacacaaaactgatataaaaaagtgttaacaaacggcacgttagttttcttaaaaaaaaaaaatattgttatgatttgtgtatatatgtcccatattgccacatccacaaggcagaagtattgttattgtaatttttcttttaaatttttcatgcccataaagccttttaatgtcggtacctgtacaataaatagtcttcttctatgttctaacagctaccaaaagataatatattttttggacactaaatcccataactaaaatctcaactttcttttgtttcaatttgatttgtgtagcacgattagtttgactgattgttttaatatataataatgagatacggagatacacataatatgacatatgccaattaaattactagtaataactcatttattaaaaaatttataaggcacgtacacatggacaatattttattattattattattagattaaaatatattattcgattggattcattgttcaacactgttagaaggtggtggtcataaatatgcggtttcacatttttcttcctagaaaagtttctaatatccttttcccaatatcaaaaaataaaataaaaatactattagaaggtaacaccttgtcaatactaaatactttagggttttctcataaatatatatatatat

SEQ ID NO: 106303 - DNA, 942 bp, Cannabis sativa
atatatgaaagcattagagatattatgtgtcaattgttgaggcggagtttttattttattaaaaaaataaaaataataattatattaaccatatatcaatatatatattctatatgcataaagtaagaaaaataataagagcattctaattgagtttatgatgagacttatatttttaaagttaatcacctctgatcaagtcaaatacatatgaagtaaaaaaaaaactaaaataaaaacttattaataatattattagaaacaataagacatgcttaaaaaaaaagagaaaataatagtttatgcggtatttttacttattatgtatatacaaattaagcaagcacatattagtgtaattattttatttaaattaaattacaatatttcaatatgaaaatatagagtactacaggagagcaacataaaaaaatattcaataaatttatatatattacatgattgcaacattcaaaatttatacatcaaatatccaaaattattgaacaaaaccccccatctataccaaaagatatataacaatataaactcattttaattttaacatttatcattattattttcatacttgctagctccaattagttagaaagtgacctccaccaaagacatgctaattaccaaaagaagaattcttatctctgtattttttagcgtgaaattagctaaatgggatatatgtatatatatatatatatgaaagaattaatatgctatagggagaaattaaataattaaagaaaaactagaagtctcaaataaaataatttattaatatagtatgatgattaatgtatttgataattatgattagtcttgatgaaggcttctcttttatataggaactacattgtatactgagtattattaagtatttattttattttattgttatgtattattaataataagaagtttatt

SEQ ID NO: 106304 - DNA, 536 bp, Cannabis sativa
  modified_base (64)..(73): a, c, t, g, unknown or other
tttgcccgtgctgccataggccaataagggcaaggagatgctggcccactacatgaaccggctnnnnnnnnnngtcagtgagcaactggctggtgctgatagtaactcgtctctggacgtgttggtgggcggagtcctgaaggagctcaccagggtaagtcttttttgatacttcccttttaattttccatacttagctccagatgctgacttttttcctatgtgcaagccagtttgaagttggcttacacttactcccgggctaaatgctacttccaagagtgcggctcagtccgacaccttgagggcggaggcggacttggccaaaaaggaagctgagtaggccaaggcggaaaatggagctgttcggctggagctgggcgaggccaacaagaagttgtttgctgccgagaagaagatctccgtgctaataaaggacctcaaagctgttgatcgctttgaggagaccattgagagcttatctgctgaagttaacagtcttcaagatgagaggagttctctgcggcaagttcttc

SEQ ID NO: 106305 - DNA, 520 bp, Cannabis sativa
ttgataatgagggtatgaggcgcgactaggcatggcaaattggttatttttgcgggctgagttaggaccccgactcggatgtttggggtcgctatttggatctttggcccggcccggcccgtaaccttttcttttgaatcggcctaacccgacttagttttttttttctcttttgggtcaatgctacctatctcggttcaaataataattaaaaaaaaagaataattatataagtttctattttttgtaaaaaaaaaattacatttttacgtttaatttttttttacatttttacgattttccataaaaataacacgaaaacaataagaaaattacataaaagtaacacgaaaataaaaaaaaataacatacagataacaaaaaatcgacaacaaatttataaaagtacaacataaaaggccgtattttctgtaattaaaatcaaaaaaattgtagaaatatttaaaattctatgaaaccgtatttttataatttctttgttatttttgtgtatttgtga

SEQ ID NO: 106306 - DNA, 588 bp, Cannabis sativa
tgaggatatcagtgcggctgtgctatcttttttgtaatcaggtaatattctcaaagaaatcaactcaactataattaccttagttcctaaatgtaaatgtcctaactccgtgaaagattttagaccaattgcttgctgcaatgttatatttaagattacaacaaagcttttgagttctagaatcagtaacattcttcctattataatatctcactcccaaggaggttttataaaaggaagatttatagggcataacattatgatttgccaagatctggtaagacattatggaaggaaagcaaacaaacccagttgcatgatcaagcttgatctccagaaagcatatgatactattgaatgggaatttattgaggaaatgttaacaggcttgaatttccctcagagcttcatccgattagttatgaattgcatatctaaccctaacttctctcttatgttcaatggagccttacacagtttctttgagtctaagagagggctcaggcaaggggatcccatgtccccgttgctttttatccttggtatggaatacctgtctcgattaatggggaagattggagacaaaga

SEQ ID NO: 106307 - DNA, 645 bp, Cannabis sativa
aaatcaagtccaataatcaagttgagtccctacctctccaaagtcgttaaattttgtccaaaagatgatcttaagctctcaagccccaagctccaattgtttagttcaatcatagatattagtctcacctataccatcaaatagctaaataattatcatcattgcaatatacattcaaactgagtcctacgacatataatatgactatatttaaagtttagagtttcgaaacctcacctaagcaatgcacattaactatcggtggtggtaaaaattggtgtaccagaaacttcaccaaaaataggggtagtatataacaaaacgaccatctcgacgactagatcaccctcatgctaattatttatcgaaacaatacacgatatcgtcagaaaagggcagaactacaaaaacttactagaaaaggtagcgggttgggaaaaatggcttagtgtagattgttctcctcgatgagcttattccaatggtgaagatgactcgtcacacggacaccgaaggtggccacgttcaaagtttaaacctctaaactttgaccgatcccgagataataacgacaaaagggatgtcgtcgcttaggagttgaggtcagcggtaccgggggattcgaatggaccaacacgtggggtc

SEQ ID NO: 106308 - DNA, 762 bp, Cannabis sativa
agaatctcgaaaggtcctgtaaatctagggcataacttgcctcttttccttaaacgcttgatcccctctattagagacactcggaggaatacatgatcccctacttgaaactctacatttctgcgtttcggatctgcataactcttttgcctgctctgagaggcaagcattctggctttaatcttctcaattgcttcattagtccgttgcactgattctagacctaagtatttcctctcccctgtctcatcccagtgagtgggagatctacactttctgccatataacagttcatagggagtcatccctactgtactttgataactgttattgtacgagaactctatcaacggtaggtacttactccaagagccctcgaaatccataacacaggctcgtaacatatcttccaatatctgaattgtcctttcgaactgtccatcagtctgaggatggaaagctgtactgaacttcagtttggtaaccatagccccttgcaaaatttgccagaatttagaggtaaactttggatctctatccgaaattataaactttggtacaccgtgcaatcttactatctctttaacgtataaatctgcatactgatccattaaaaaggttatcttaactggtagaaaatgtgcagacttcaaataaactcgtggttctagataacccaaccacaaagtccattgtgatatcttcccacttccactcaggtagggttaaaggttgcaacaaacctgcaggtctctgatgttt

SEQ ID NO: 106309 - DNA, 1247 bp, Cannabis sativa
  modified_base (209)..(231): a, c, t, g, unknown or other
  modified_base (790)..(800): a, c, t, g, unknown or other
  modified_base (1205)..(1215): a, c, t, g, unknown or other
gtcttatgtaattattccttataaaaatactaatttttatatttagttaggtctaatatgtaaatgtccaatccaaaacccactaattattgtattattgaaacttaatttttttcggggttctttttttttttatttatttttacacttcaaaacagtttttttttgcatttttacaaaaattcacatagaaacccctattgcaactnnnnnnnnnnnnnnnnnnnnnnnaaaaaatcgtatagaaacccttattgcaattagcgctgcagccactttagaaacccgaaccgtaaatttgaaaaaaaaattaaaaaaatagtatatggggtaattccccatttttttttatatttattttcaagccttatgatatttttgacaagtgttgctcaagatttgttgtatttgcgatagttcaattattggtgatactctaaaacgcaaaagccgcaccgcaccaaaacatttttttgcggtgtggtttttgcggttttttaattttccagtgcaagtgcgatttgagaaattacaaaaacaacatatgcagactagtttaaaaaaatggtcaaaaaccacactacccacactgcgaacactcctactgcaaaattaggaaacctctacacccacgaggtgtagtaaatgatccactataaaatctggagggataagatattctctatcatatttatctaactagccaacataccgatcatttgtgcaattattttaaatatttattagacattttaatttttttaaaattatattttatttatttatttannnnnnnnnnntttttttttgagagaaagctgtatccatttataaatgaaaagacaaaatcaaagatacaaattacatttgaaatgaagaacttttccacaaagctttctgatttaagcctaaagctttgtggaaattaatataataaaattacacaaaattatattttattttatatttgttaattgttattaataaatgaagtattgtgaaaattaatataataaaataaaagctgtaaatagtatctattaaatgttgttaagttgaataaattttagttttcttatgttaatttataacagcaaacacattaaacaaaaaaattatttaattaataaaataaataacaatcaaacttcaaaactcattaaatataggaataattacataaggtaccattttttgtaaaatannnnnnnnnnnacgttcaaagaatgttttttttacctttttac

SEQ ID NO: 106310 - DNA, 540 bp, Cannabis sativa
cttacacaataaaggcaaggcaagggccgaagacgtcgtgtgatggtagtactttgcctgacaacggtggaggaagaggaaaaggaaatcaggggcaccttgaatcttgtcgaatgggtttgaaaatctaaaaattgaaaggcagtagaaatgacccagttgggggaagtgttgacttttataggccatttggggtgcgaggcagtgtcgagtgaacgccatcgtgcagtgagggtttacaacagttcagatccaatggatgggatgaaaaagcatgatgaagaaaaagggcggttaaaatgtttgagtacctctctgacaccggcattgatggaagggtctatcaataggcgggaaacgaatcgttgcctgctaaagagataaaggcaaatgatgatgatcattgatattgcccacgcgcctgaggcacgtgtcatcacatttattgaatccagagacagtgcacaagtctcatatatctacgactaaataagacttggatggtaaatattacctcaagtttctcccaatatacgtggc

SEQ ID NO: 106311 - DNA, 513 bp, Cannabis sativa
  modified_base (267)..(267): a, c, t, g, unknown or other
gtttcatcatcattatcaatctcttttcttttatgatttctagttttagcaatattgaaaagttaattgttaagtgtgattagtatttctggttttaaaacataaagcccttgttccatgtgagcaacacataattgaaatccattacgagaaattgtacaaatagaactagaaaaattcaatttataaaattttgtttgtaaacatgaaacactaatcaagtttctactaaaattagtaataaacaaaacattgtctaaaactaanaatttcttctgaaacttgaggcgggctctccctttcgcttggaccggtactaattccccatttccaactttgagcttcaactcctctagatttagataatcccaaaattcaagcacctgcaatgcacaacaaacatggttagcagatccaggatcaacaatccagaaggaattgtcattctttaaaacacatgattcaaaaacaaaagcattaccttcattcgaattgtttagaagtttgggacat

SEQ ID NO: 106312 - DNA, 659 bp, Cannabis sativa
ctctctctctctctctctctgttacgatctctctttatctctctctcgataatgttctctttctctctctttgtcccttctctttgtggatcttcaactgaaaggcttgctttggggttcgcggagttggctggagttcgaattacagaagcggttggtggggagatcgggatttgctgggcttgagtttggtttcgatttttttgttaatgctgctggttgaggctgccttgttcattattttctctattttgattagtctatgttgtattttttatttactcaattagtctttagtttctaaatttgagttttaattaagttttcgatatagatttggaaaattattgtatatttttttttgtacattttgtcatgtaatttgtttgtaacttattccacatttgatttacacttaataattttgtttaattttaccaatctgaaatgcatagattaacttgtaaaaatataaatgaaagtttttctgattttttttggtaccacactaagaatgaatcataagttgtttggaaaattggactagtatttcacattttagtatcaaagcaaaaaagaaataatctgattccctgaatattattatttaaaatttataattattaatttgattgaatatatttttttaaaaaataaat

SEQ ID NO: 106313 - DNA, 603 bp, Cannabis sativa
gagtagcttttgaacttaatgtagaatctctcaatgaaatgttaggagcacccaatagtggcattttgcttgaacccaaactctctcttaaaaatgatggcatatttaactttgatgagtgctctagaaatctttgtggagattgtcctattattatgaaaccaaaaggacaccaactcactttagaggccaaaattctccacaaattcattgtagctaaccttgaacctaggagtggacaccaagatgagataaattccattgaccaattactcatgcatctcatcctagccaaaactacacccatcaacctaggctatcttattttaaaattcatcattgatgtgaataaacccaatatgatcaaggcccttccctttggttttcttcttagctatctttttcctcgcttaggaatccccaccttacatgaaaagaaaaatgatcctacctctagtgacattctaggatccaaaactttcaaggttatgggttatacatttattaacaatgaatgggtgttcacaccaaagagaggccaaagaatgcaaattgatttggaaagagatgatgaagaccaagatgaggacattaacttgcccg

SEQ ID NO: 106314 - DNA, 1182 bp, Cannabis sativa
accaccacccacgacgacctcagccgcacctcaaccacgcagtcggacctccaaaagctttattttcctcacaaaaattttcatttttctcactccaaaggtaacgggtaagtgttttttatacaaaatattgttagtttttattatatttcatggatctacacattattcgttgtattatgtcatttttgtgatctgaaatgaaagtagagttcatacccaaacgctggtttttttctgggtttttcgaatttttgcgattttgtacactattgtgcaatgccaacagaaatcagagatcagggatgactttcattcttttttgcgacattaaacgatgtccttgcaattttgtgctattttaatggttttgcgatttgtgtgcgatatctttacatcattatacgataatatttttgtttttcttttattattttctcgttgtgttttttgtgcgacattgtgcgatattattttgtgcttgtgcgattattgtgcgatattgtttttttcttgtgcaacattatgcggttattgtgcgatattgtttcatttttttttatttttttcttgtccttgcttaaactgaatattttcttggaatcatcaatgcgatgctacttctaaattattttagcagtactatacattaatacagaatgaacgagacacatccaaaacccatatacacatgtgcatatatatattttaattatgtgataatttattaaacttatcggtatttaaagagtgaaactgtgaaagcaagtggcactattaagtcaaaagcacactgcttttggctatatttaatacttaaaacaatcaagtcgaagcttgatctaacaagttaaaaaacttttagcactttgtacatatttatatcacagaacccaataaattaaacaagaaattaatatcaatggagttatctcacatgtcaagatagtcattgatgacacaataaatatcaatgggagtaatgtctatgtttgggtcttagacattattattctacttagagatcattaatgcgatttcatgcaataaattagatgcacccttgatgttatcccacatggatgtccactcctggaaattgtgaaggctacctgtgaagtcagtgaaaagtccatcaactccaatatgatgattaagccagtaattgaactctacatatgg

SEQ ID NO: 106315 - DNA, 2347 bp, Cannabis sativa
  modified_base (556)..(565): a, c, t, g, unknown or other
  modified_base (2184)..(2189): a, c, t, g, unknown or other
atttttaattcttattacatgttacacaatcaagtactttaaaatgatgagaaactcatttccttttgaaataattccaatgtataaaaatgaaacaaaagaaaaaccactgctagaatttagacatgaaacacaacatggacaaccaacaaacacatatgataagtaactttattaagtctttttacagatctacaaaaaaatttctaaaccgaatgtcaatttatgctttgatatgaagtaatgttagtcaaatctaccatggtagctactctataagatctaaaaaaatatatttttcaacaaaattaaatgaataaagaccactacatataacaagagtgtgcaaatctattatcactaaatataaacaattatttagacaattttggttatgagtgactaatgtacctaattctccttgaccattgttaacgcaaatttttgttaaccaaatttgagcctcacgattatgattcaacacagaaaatataaaagctatagaaaaataaaatatgaacaccggggtttttacatggttttgcagttaaaattnnnnnnnnnncatgagtcaatcttattcagatttttgagtattttttcagggcctcttgtgtaagagttttttcgtcccttttttgagattgtttgccactatttataattgcatagtggtagttaattacaaggctgacaaaaatgtaattacaattattatcccttcaatcatgggatctgattacatattatgaaatgtaaatgcagtgtatgattttgaaaatcatttagctgtgattttcccgcttttactagatcagaaatatcatatattaaacacatctttaattgttgaatctggagatgtctcgacagaaacttgattgtagtgatcccaatggcaagctggagtcatccttctttctgaggtcgacttgacatcttttacgttgattgagggtatatggaaatattctgacttgttagggttatgagcctcgcttctgttggttggatggaactatacggagcttcctcgtagcgagatggtcatctcgcattcttgttcttcgagccgattcgaattttacacttagtttgcttattgtaagctagggtatgtgtaacttttctccggtgcctcgctattctcctttagcgatatatggtttctcgttatacattaagtaccagttcgtacattaattcctcgcctaagaccttacagtcaacgggttacaaatatactctgatacttacgcaattaatgagttattccataaaaaaatatgccaccgattcacattctctttaccttgacacgtgtcctccagccaaatttcgagtataacaattgccccttgaaaagttttttttttttagtaaaaagagctttttaataattacggagggctttttttgccgaaatattttcttggaaaggacgcctcctttgattctggcggttgtatggtttcgaagatcattatgaatcgcctattcatattctgcacgattcccagccgttagatttctcaatctttggctttcttatcactgtacttcgtgtataaaagggtgactcatgcttgtcatttttcacaaaccttttggctctttagggaaatccatttttagaatggatcacttccttactgccaaaatgtgtcttctgagtttagaagtttatcctcacagacctataatatcagatgcaccaacaaatttccattcattcttgaagatttcaagcctcaaccagagctagaaatgatggattcaatggctgaggagcttccgaccaatctaaaccaggggaaccccgtgaccgaccatggccaatcctcacaagtgatcccaaagggtatagatcgtgtgagcgatctcaaagatcctccttcgctagtgatgagttctagaggaagattggcatggtttcaggtggatttgggaaggaagttggcgtggtttctatcagagaaactagccaactcaagaccctaacttgtgtcggaagatctttgtgtcagcctctctctagtgttgagaaatttcctgaggctgggaaatagatctcggcttcaggaaatggtatgtgatgatgaggagaaggtggtctgtgcagagattaaggctctctgcatgcagaaggtttttctcgtctatgtgtagccgatctttctccannnnnngtgtagacggtctttctctctcattctctacttaggagaattacttaatggtttgcccctagtggcatttttgtataccaagtttgtaaccagtcttaggcttttcttatcttaaatgccttgtactgttttcatttgaacttaatacaattgtattt

SEQ ID NO: 106316 - DNA, 602 bp, Cannabis sativa
ggcggagtggtatagtgagcgaaacaccaacagacacaggcattttaaacaacattacactaaactagaagattgggagaaagttcttcaatttcccctgaccacttgaatttggagagtcggaagcctatctgcgaaatatttatcagcgaaattttttggaaccgctcaagtaaaaacaaagcgaataggcaatagataaaacatccaacgacgcaaggcacaagatcgttggcttcgatacgacacggatttgtaagtattaatcctttaattgtaaaatataatttatcttaaaatgtattataaattaattttatttgtttatgttcatattgggggggggggttgctcccggagagcatgcatttaatgcatggagggtggctcatacgaaacagccgtctggcaatttcgttaatgaagttgctgtagaagattatgtaagtgaataaaatattgtattattaaaatctaaattttatattaattatatattctaataatttttatttaaataggaggaaatgcgtaagaatcttgataggaaacgacttgaaagacaatcccagagcgatacatctggtactgaatctgatgct

SEQ ID NO: 106317 - DNA, 1041 bp, Cannabis sativa
gaccggggtctaatcttggatcccagtcccagtcctgggtcctgattttggttctaatttagagtttgggcccccaatctaggtcttggtactgggtccaagtctagtctccaatcccatccaatcccggtacgggtcttgggtccgagtctgggtccaagtccgcgtctggattcgggtttgtgtcccgagtcccgatctgagtttttattcgagtccgtgtcccggtccaggtttgggtctgggtcctattcaaattctagttcccggactcaaacctagactcggacttggacctaggtctggggtacgagtctgggtttgggtttggttctaggtccgagtctgggtctgggtttgagtccgggtatgggtcccaaatccaaacactgactatgagtcaggtgcaagccccgggtcccagtctagttccacttcgggtcccaggtcccattccgagtccaaggttagggtctgggtctgggattgggtctagggtctcagtcccaattctgatgcccgtttctcgagtccaggtccctcatctgggtctaagttttaggtctcggtccgagtctaagagccggttggggttaaactccttgtccgagtttgggttcaggttccgatatcggtctgggtcctgatttgggttcgagtcttggtccaggttcgggtttgagtctcgagttcttatctgggtctgggttcccgaggcgtaggtccaggtccgggtcctaggtcttagtctgggtccatgttcgggtttgggtcctagtcccaatttcgatttcgtttcagtgtttgggttcaggttttgttctgggtctgggtcggggtctgaatcctggtttgagtctgggtccgggtctgggtccgggtctgggtccaggccctgatcccggtctgggtcttggttcgggtgttggtccgagttcgagtcccgggggttggtccaggtctaggtctgggtcagggtctcggtccagatctaggtctgggtctgggttcgagtctaggttcatatccaaatccctatct

SEQ ID NO: 106318 - DNA, 579 bp, Cannabis sativa
  modified_base (39)..(43): a, c, t, g, unknown or other
agttcgcaagatctttaaagttttacccaattggttttnnnnnaatgctagaaattcctgaaacttttcaaaatatgaccatgtctagagtaatcgttgatgaatgtgacaaattactcataaccacctctagctttgacatttagtggtccataaagatctgaatatactatgcctagtggttccttggcacgctctccctttgtagagaaggaacgtttcgtcattttgcactactacaaaatcgacttttcctaacagtttataacggtcttttatactatttcccaacggttcctaaaatcgttggctatgtgggaaaaatcaatttaaatgacaatctacaaccgttgagaaaaatcacattaaatgattatttataactgttggcaaaagtattatctaaattaaatttaattactttttaatatatattttgtaaatattaaatatatataatagtattaattttcatagaaaagtattaactaaaatatataaaattaatatatttctaaatttaaatatcgcaattcatttatttcaaaaaaaaaaatatcataattcattaaaactgta

SEQ ID NO: 106319 - DNA, 1167 bp, Cannabis sativa
tatatttggatattgaagttgaagtttaaaatatatacaatattattttttatttttattttttttagttatttcatgtttactcaattatgtttatcttcttaaaatttatttcgacaattgcattttttaactttaaatataaataatgtatttttatttttttaaatctaatttttttaattagaaattaagaataataattatatatataaaaaagaacggtttggacgggttaacccgaccaaaccgataaaattattgggcgggtggacttctaatttttaattaagtgggttacaattaaatatttgcgacccgatatttatattggattggtaaaaaatatgttataacccgaccaaaccgacctacgtacactactactaaactctatacagcagggtcttatgcaaagcccctatgaggagggatgttttataatagctaataccataggggagtttatgccttcggttgttacaactcatttagcgatccctacactccataattacctctaaaaggtcgaacaagccaccagtaaaagattttttttttttatagtagtgatatctagactattccattgtaataaaaattctaatatatttgaatatgacgccgtaatcaatcaataatagtcattgcatatgcgccacggaaaattggtagaacacgaaaggcaacctgctgcttcgtgatcaaaatatgtcccagctagatcaccgtttcacatttaatcatataaattacacatatatatttgtctgaagcttagttgatgataaatggttttctatggattaatagatgctagttgtacatcttaattaatatgttgtccagctgtggttgactctatattaattatggtgtggaggagaatatatattactatttttcatcattttccaaccttttatttgctctcatggccgacccctcatgtgaattttccttatcctttccctcacatgtccttattgatttgatcactttgaattcgtcaatttttcacaccaaaaacatgtctcaaaagaaattataaggaaattaaaataagagtaatttgaatttttaccctctgaattttgacatgtaccaaatcatgccccttaattttttgaggtcgttaaaaattctccttaaactattgagattgtt

SEQ ID NO: 106320 - DNA, 525 bp, Cannabis sativa
tatatcctggtacatatagagcgtactatatcattaaaagtgcaattatgaatctatagtggcgcaaggaaaaattaataatttagagaatttacttgctaaatactaaatctacttattggaagcttgattatataggcccatggtcctcacactagttgagatgatactgcttgcagactcagttaattagtttaattaatcaattataattctaaaatcaaactatgttttatttatgagtttgcactaagcaatggcttaattgtgaagaaaagatgatttgagatttatttgttaattaagaaactttgtatgctctaattaataaataagttaaatgtcaattttatttgataattaattataattttaataattagttttcacatttataggattgaaattgaaaaatatggtattattaaaagaagaataactggttgaaataacttgacaaattgtaactagtgaagcccacattaagtggccgaccactaggttgatttttgcctaatattttat

SEQ ID NO: 106321 - DNA, 527 bp, Cannabis sativa
atcttttctttgacaattgtactccaactgtatacaagtatttctaaaatgtatacatgtcataaagtcagtttccaaccttatcacaactcaaaatatgtttgagaaataacttaggttagaacacaatctgatatgtacactcccatggaagagtaccaaccgacaatgatttaagaaaatttagagtttgctatgcagactccacctcatgtccaacaattcttagttttttaaatctgtcacacaccataatttaggtgtactagacatatgtattgagaaatgaacacgtacttttaaagaaactttacaaatgaactgagagtttatccatattcacgaattttaatgtagcattctctattttataattgatttcactatcttaatatgaaaaatacattacttctctaattaagatttaaatatccttaaaacatataaatctttacttttgtagaaatataatttatgtgagtaatcgttaataaatgagatgtaaaattttgtaaaatacgagtcca

SEQ ID NO: 106322 - DNA, 520 bp, Cannabis sativa
  modified_base (165)..(166): a, c, t, g, unknown or other
accgtacaagtattggtagtgtatgaatcacaacaagcatgcatataccttaacacatacatacatttgcatatccatatcacacattatattcgattcctacctcctttctaaattcaagtgagttggccgacctgaacggaaagtctcgtgctggatggatgnnctaatcacatattaaaaccgggtaaatcatatgtccgaaaccttaattcgggaaactagagtctacaactcaaggctctgttatactctctagggattatattaacctaggaaacagggaaacacccaactaaggcactaaaaaggacgagaattgagaaaaaaccggtttctcagtttgcaggtactggtaaaccggataattggtttctgccagttctccccaaaaaacctccaatattctcaaaagttgtccaaatgcctccaaactttcaagagtacctaaacaatgtatacacaacatattccaaccagaaaatcccagaaaaagtcactgaatcaaattatgccatta

SEQ ID NO: 106323 - DNA, 841 bp, Cannabis sativa
tttttttgtgaaaataggattcggatccgtgaatggagaagagattggcgtttcggatctggggaagaagatagttcgatggtccgactttatgggtccgatggtgtccgactgtatgggtccgatggggccgatggaggggtccgaatatggggtccgacgggtccgatggggccgatggggggtccgatggggtccgacgggtccgatgggtccaatgtatgtgcgggttgggaaaaaatggggttgagttatgtgagggttatttttgggtttttgataaaagtgtcatatattttttaatttgaaatgtattggtttaagaataatatattaagattttaaagtatattttttaaattttcctttgtaaattcccaaaaaaaaaaaacaaaataaataaagtgaagcgggcagagtctcagaaaggaggcccatagatctgggtgggctcttaccattatttgaggcccattcaaatgtctgaataattcactccataacaatgtgtgctctgctctctatctaatatctattcttaaagctttgaagaaaatttaaataataataataataataataaagaaaagaaatgaagataaaaatggtgaaaaataatatggcagataaaagagtttgggtcttctgctttttccttcccaaaaatggcaaaccacactctcctcctccacttgttttcttctttactccattattgacctctcatgcttcctctctttcttcttctttcacgtaagttttttttttcttgctcttcatcactttcttttttatatattattcttcatgtttgtttgtttctcttgaaaaaaattcctgg

SEQ ID NO: 106324 - DNA, 584 bp, Cannabis sativa
  modified_base (57)..(69): a, c, t, g, unknown or other
  modified_base (178)..(194): a, c, t, g, unknown or other
tataggcccaaggtccccatactaattgagacaaatactgcttgtaagactcagttnnnnnnnnnnnnntaatcaattataattcaaaaattagactacgtctagttcatgaatttttattaagttagggcttaattttgaagaaaagagtttctaggatttatttattaattaagannnnnnnnnnnnnnnnnttaataaatatattaaataacaattttatttgataattaatttgaatatgtaaataaatagttttggcatttaaatggttgaattggaaaatgtggcatttttgagaaaataagataaatatttgaaaaatagaaaaattgcaaagtggtagggcccacatccatggttggccacttaagttaatttcaccattaattttatcaatttttttaatgccaaataattcgaacctaaagctagttggattcctacaaatagatagtgatggcctcaaattaaaagatgatgaattcaattgcgttcagtcaaattttgagccatctcttctttctattttcgaacccttcctctctctttctctcttcaatatttcgaaccctatagtgata

SEQ ID NO: 106325 - DNA, 1029 bp, Cannabis sativa
aaaaaaaaaactaaacttcaactaaaattaatatttacgtgcctcggcacgtaactcctaactagtatatatatatatatatatataaacaacacaaatacaaagaatagtgtgacctttttattaagaatatccatgaaaaggtcaactcgataaaaattattgggcgggttacatttttttttatttttttattgaacggactaaaattaaatatttgcaacctgacatttatatatactataaactgactaaatcgaccgatgtagactcttaattactgccgaaattttcctagacgaccgcacctcatccattccatattttctcaatattcaatatttaatattttcttcctttttttttttcttttaatttatttttaaatttacaatgttgaagaaatcagcatattagctttttttcaaatgtatttagcaatttaataataagagaccataataaatttctttaaataaaaattattctcaaaagcaaaataactttataaataattacaaagaaaaatgtttgtatcactaccaaaaatactacttttagtggtattttttacttttagtcaaaacaaaattacttgttattaaaaagtattttctagtcaaaaaaaaaaaattgacaactatgcgagtcattgtaaacgactctctacttttttgttaagttgtaatttttcgtttatttttagaatttgtaattttttggttaatgtggtcaggtggacttatgctaacttaattgctagtatggtaaatctttcttcaataccggttgctatcttttgtaataaccataaaatctaatttttttctatctataaaatgcctttttttcaaaaaaagaaactgttatagcaaagttatttgtgaatacagatattttaaagatcacacattgcaacacatgctctgtcttgtttttgcattataagtcttttccatcaaaatattcacgagaaaataatacaaaaatttaaaaatatgatattcttaactttcataataaaagtat

SEQ ID NO: 106326 - DNA, 520 bp, Cannabis sativa
aacagttttgcaagaacaagattcgagaaacgaatcaaatgatatattctttgtctctctattcatctttggattcctatctaatgatccggggcgtaatcctggacgtgaagaataaaaaataaagaagattttttgttttttttgcttgattttattaaagaaaactaactttttgacatagtatgactttgaattaataaaatgtttattcacaaaacttataggaaatcgaataagctttaagaccatatatagatcattaaaaatggatgataattgagagagttattattttttaagtgaaaatactttttctgggaatatgaaaaaaaaatgaattacaacaatatcggaaatatgataatttttgacatattttatcaccgaatcggtgaatagtttcttcattaaaattgtagatcatcgaataagatttctaatgatataaaaatcactaaaaacagatcaatattgagagagatatgactattttactaagacaataattttcagaaaa

SEQ ID NO: 106327 - DNA, 513 bp, Cannabis sativa
gtctgtgtttgggatcgggtcccagatttgggtccaggtccgggtctcagttccggtatgggttaacgagttccagtctcagattgggttttaggctaggtctgtgttcggttctaggtttgggtcagggtcctagtcactgtcctaatcttgttctagggtcctggttcggcgattgttgttcaggttctaatttttgctatgaggtctacgtttaggttcgggtttgtttctaggttcgagttcgagtttgggcttgagttcgagtcagagttcgagtcctgttccgagtttcacttcgggtccagatttcagtctagttccagatcaggcttcatgtgtcggttcacgtcctgggacttggtctaggttgggtgcgagtcccaagttcaaatctaaatctgagtctggattcaatactgggtctaagtccttggttctgatttgggtctaggtccgcgtctagcttttggtctgattctaagtttgggtttgagttagatcggaagagcg

SEQ ID NO: 106328 - DNA, 2874 bp, Cannabis sativa
  modified_base (451)..(458): a, c, t, g, unknown or other
  modified_base (2841)..(2845): a, c, t, g, unknown or other
tagctggtgattatccaaacatgccaaagttttatagacctattatgaataaagtaaattttaatcacataacacatagaaagttgaatcataaacatggaaatctacaaataaaaattcatatgaaaatagaaaaaaataattaaataaactaagaaagaaatactaaatcttttaaagaagaaagtcatttgaaaaagatttctttatcttaatagaaatactgaaatttaattaaataaactaaaaaagaactactgaaaagatttaatcataaacgtgtatagcatttcattagaatttttttttgaaaaggaatttcattagagcatctccaacgacacaccaaatttagtgttgcactatcaccaaatttagtgtcaaaaaatatttttactccaaccacaacaccaaaaattacactaaaaaaatatttcttattattatattnnnnnnnnaataaaataaaaaaaattaataatatattaattaacaaaaattacaacaattattatatttaattaataatttaaataaatttactaattaaattaaagataataatacggtaaaattggcgaaaatctataaactaaaatatcatattacaataatataaatattaattagagaataaatattatattcgaaaaaaattaaatcaaattaaatcaaaccaataattacaaaaaaaaaaatattataatatgtttttataatgcatccctctaaataaaagagtcacgtgagagaaagtttgaattttattttcggtgtgttaaatttttctaaattttttaaaattttcaaaaatgacttaaataactttaatgtacacgaccataaaaaaaactaaaaaagtctctcgaatgctaaaacaggttggagtatatcagtgcgccacttttaaagaactgcattgttttcgacgtgttaaatttttctaaatttttcaaaattttttaaaatttcttaaataattataatatacacgactatataaaaaatatactaaaaaaatttgtcgggtaccgaaacaaataggaataaatttacacatcactttaaaaatatatattgtaaaattttttaaaaaataattcttaattttataaatataataatataaatatatataaatattaattaaattatatataatacatatgcagtgtctacagtgcacggtatatataccgtgcactgtaaacaaaactttaaaatgctgcgtgaaatgcagcttccttggaccataatcacggtatatatgaaaatataccgtctccttgcacatgctctaagattttgccaacaattacttcaaaacaaaatgtgggataaaacccactaatttttcatccacaaaacaaaatagttgactaagtcaacttttccaacccaaattactttgtaggtcattatatttcatacgtgatatatagccatgcatattcacacaatcgtcatcatcagtcgcattctttcactccttttctttgataaatatattattattattattattattattactattattattatatattttatacagtacttaggttgttccaataatttataagtgtagattactttgtaaattttaattgcgatttaaattattcggttagttattatatatgggttgctatataaatttcgagaaaatatcaaaaaactcttttgaagtgtaaaaaataatttttttttaattaagtagctaaattaaatatataaacttaaattttctttttattattgtattaaaatttaattgtataatatttctaaaattaatatttatagttatttatttagtagcctcatatatatatatatataatattcctaataattttaataaaagaaaattgtccattatatatgatgatcattttaaacatcagaaaaaaatcaaatattttgtcagcatatataataaattcatgagaaatgcttaacacccttttatatcaatattattatattggtgtagttaagtagagaaatgttaaatgacactcttagaaataattgttattggtgcaatttaatatcgagtgttacttattttaattaaataaatattatagagaaccgctaaccaattataagatatcatgtcatagctagaagtactagatactttagtgtctcgtaggaatgcttaattaattagtatttaatttcttatataatttaatgtaataatttttacgagacatcaccaaccaatcataaagtaacacatgtagaaattaataaacattactagtgcccaataccctaacttagcttaataatatggttcgaaaaggcattattttttcatttgggattagctatatgtatatatcaaaataaaacttattattacaaccttaaattaatatgcacacactttcatatttcatggcccataatggcctataatatatagctctctttgaataataataaaagaaatcgatggggacagtgatggtaattgcttccaccagatatagccacctaattatgatttggattagagattcatagcaaaccacacataatgtatataaagaaaaaaaaaaaatgtggattaataaataagatatatctatataaagaaaaaaaggtaaaaatatatatggttttataatgctattataaaaaaaaaaatacataagataaatttgatgatgttttgtaaaataatattccacatgattattgtgttgagtttcaacaagaaaaaaactattgaaagatataattgtgttcaactcttcttaatattctttttccttttatatcaaataagtgagattttttacctttcaaaaaaaaaaaaannnnntgaaagtgagatttttttttttttaaaaa

SEQ ID NO: 106329 - DNA, 4403 bp, Cannabis sativa
atgtccaaatcttttatttattaccattaattgtaatacattcttttttcttagtttcttaatatttaactcttgtgtttatataaatagagattcaccccattaaaataaaaactgagaaattcacattcactttttctttctctcatcttcttcttttcttcatatctattttatattattctatataattttataacaatattaactagtatctatatgtttgttttcctagttaataactttttgacatcatttctgaaaacataactttcaaaacaaaaatagaaaacaataccaacaatgtcttaattaataccataaaggctgcaagcaaatccatctctttctcaaatgacaagaaatagcaaacataaattataattcaattattaacgagataattgtattgtataatataaaatactgtagtaactctagcaggaagcatcgttgcaaagaaacgaggcagcaggcttcacatacgaaaagcccataaacacgttgccactagcaatggggcttgcgacaggtgaatccacaagaggcatgtcagtccagtgtttctcaaagttagcaacgcagtgtgtaccagccacttcaggtcgaaaacttggttggatttctcggccatccaatttcctccagtttatagccttgaaccatctgtgccttttaatttcttcactccctcccgctccactgcctaaccgcttactagcatccttctgaagcagacctttcagcagagaatgagcttcacttgataaatatgctggcaacttgatcttatccttcactatcttctgctgaattttctccctgtttccagtgaaaggaggctgcaaagcaacaaaaacacacacacaaatcatgtcacaacagaaacagcttatctatcacacctcacattagtagatataaatgcatgtagctttattctacaatgtccttaatgatgaatgataattgctaaatacaatatatattacactctctttgacacgtgtaatttactaatgatttataatatacaattgtataatttccacgtgtctatatatacctcacaaacttgtaggcagaatctgttttgttcatttacatgaaatccaaaatatttaaaaatataggaagagagtaggttaccaaacagcgttctcctacttgattatccaaacagcagaatacacacgcagatacattatataaagcaaggggaaacaatttctactagatgcgacttgatgagaaaaaactaattttcaacatccaaaggagcaatgtaattagtccaaagaactcacaaatagaaataagttgctacagtactgagaaaacaacaaatcccgaataagaagagtacaaaccttcccagtaagcatttcaaataaaaggattcctacactccaccagtctgcagccttattgtggccttttccaagaacaatttcaggtgacatgtactctacggttccgcacagagaattagatctcatgttctcatcaaattgcttagcaagcccaaaatcagtcaacatggcctgattaaataataacaggttcagttacagtaagtcttcactgatttgttattgcattataagtgagcacaaagagaaagaaggaaaaaagaagtacatggccatcggcatccaataatatattttcaggtttaagatccctatgcattatgccattagcatgtaggtgagaaaccgcagaaacaatctcagcagcatatatacgtgcaagatcctctctgaaaaaaggaaaaccttcgtgttaaagtccatatattaagcattgaaggcaaacaaacgtcaaaattttacaattaaaggttacctgaaaaggccttggtgataaagttgaaagaacagatggccaccgttgacaaaatccaacacaagatacagtttatatttagtctgcatgagtgagcttcaattagtactgcagtagtattaggatataaaagctaaattatacagcatcctcaatttttcctcaattctaactctattagaaagatgcccaaagattcatcacatttacgaatttgatggaaagaagaatataaagaaagtttacaaataaaggtaaaattcagagcaaataatcattgataattaagatagtagagtaagtaatttattacttgaaatgagtatctgagctggacaatgaagggatggtcaatttgagttaatatatccctctcagctttcatgtattcagcatgattcttctccattattttgtctttccgcataaccttcattgcatatatgtccaatgtcccttttttcctcacttgatatactttagcgaatgcaccctgcccaaccaccttaagcacctcaaaatcttcaatccccacagtttgtactggcgtgttatctttctcaaccattccatcctcaatgtaagcatcctggttctgaactttctcattctcaacagctttagtgtctctatcaacacattccaccacctcctctgtctcgcttatggtaagcttgttgagattcaaggattggctgacgaaagatgacggcccaaccagagaatgcgaacgattgtaaattactactgggtcatcatacacgagctcatttgaatcttcggaatcaccaaaattcgcttctatcggtgtcggtggtactggtagagggccaaatacatcagagaaatccagttcaagttgctctgagaccacagaatctgtgggattcctcggaagaagtaactgattctgaattgatttattcaaatggggctttgtcaaaccacagaactgagacgaaaccatttttgtaagcagaacaatgacgaagcagggagcaattagaagtcgtgtacgtcaaatcttagctatagtttaattccctgaaaatccccaaacaatgctactgccgagggacttcgatcaatggccttaatcaataggaagttcacgaatacaaaaggcgttcccaagaatttcggcagcaatgagaacaaaatccagaaaaagcaaaggtcgctcttgtttcccgatttacaggaaaccacggatgcttcagttgttgttgaattcatgaagatcaaactatcaaatctgcagacagccaaaagaacaccagaattgaacgatgaataaaaatcgcaaatgaattagggtttcgcctaggaaatttacgatgattaatttataatatgcacaattaaacgtttgaaggaaataagctttaatataattgaaattgcaatatctgataatgtattgtcgattcaagattcaaaactcaaagtgaaagattagggcatgaagcgcgacatatactttccacaattcttatcaccaaaccggatctctacaattcaaattagtttctgcaaattcaaacgagaaattataatgaagaattagaagaatgttacctgggaaggttgggaaaaggaggagccaggaaggagtgccgttgggggaagtgttaaatgagagagagaagagttctgcggtggaacgcctctttatatattttattcatatcaataataataacaaactactattacgcaacgtcagcacatcttgtggctgtgtgcgtggctattccaaattgataattttcagccatatttaacacgtggctatggcctacacgcaattttagtacaatgcttattaagtgatttctagtgggaaatttgtttccgtacttgaatgtaaatacagaagaacatccatctaatgagaagaaactgaaactttctctcttggcgggagtctccttgagagatgaaggaaataggaatgtttggaacaactttaaatatgaatgtttaccgatttattgttttaaatgtgatgttattcgccacatggaagatgactaatcaagtcgtaaaaggatggttataatagaatatgatagaataattcctttatatggctcgtggttaaaggacgaggctaagattaaaaatatcgttgtcatgttagaatttgaggatatccaagatcattgcagatgagagggtagattcgcctagtggcatggtgggtgtggttccgggtgatccttcttcgattgcgggtcaagtggcactggatggtcaggtgggggtgtcgtctgagggccctggtggtgttgatcgtactggaggttctagtggggttactagggttgagacagatggcatggaacatgtcgtttttcaaaaagttgattcttccttcaaagtggtgtatgacgattatgtggatttatctaaatgtccaactcaacatgttatttaagttgctaatttatttaaggagaagcttgggccagtcttttttagtgcttctagaattgtggaggcttcccctaatggtaaggtacatcaagcccaaaaattaaaaaaaaaaaaaa

SEQ ID NO: 106330 - DNA, 552 bp, Cannabis sativa
aattctcaaaataccaattaacccgagtactaagaactatctcatttggggacatagtccttcgggaaccctcactgtcatttcaatttaccatcttgtaaagtcaatccatcccaatccaaggtcctctaatcctcatgcctttaagcagtggtggaaatatttttggtctttgaatattcctcttaaaattaaacattttatttggagaacttgtaaccactttcttccttctaaagttaatattttctcaagaaagattctcgatgacccatactttcccattcccttttagagtgttatagggcaggtaaatgttggaagtacaatagtttctcaaattttttctataataataactatgatataaaagaattcttttaagaagatttgaaacttttcagaaagataatttcgctgtgttttttggtattttatggactatatggaatcaccgtaacaagtctctctttgcagatgaaaagtctatttacatggatgtagaaccttttattacatcttacttgtaggactacaagacagctaaagcaa

SEQ ID NO: 106331 - DNA, 743 bp, Cannabis sativa
ctaaaggacaaaacacaaatgggctaaaagaccattttgcccttcccacactaaaagtcataaaaggccatttagggctattttgagaagttctaaaatcccgactaatcctgacattccaatgtctaactttattgtctcgctatactaaaatactaggatgtgattctaatagccaaccaccacgttccaatattgtcgggcaacaaacatgcaaaattatgaaatattatatatgacatataaaatgcattttgaattcaaataaatcatcgtaaattaataattcaaaattaataaataatttatataattaaatcctgattatctgctaatttctaaattagaactaagcggtctttacaattatctccccctaaaaatgatttcgtcctcaaaatctaacttgaacaactttggatattgagttctcatatcggattctaactgccatgtggcttcctccacctttctatttctccagagtactttgactagagccatggtcttgtttcgaagaaccttatcctttctgtcaaggatctgaactggctattcctcatatgacatatccggttgcagctcaatattttcatagctaaatgagtaaggtctgaaacgtacttccttagcatagagacatggaatacgttttgaactgctaaaagagttggaggtaaagctaatcgatatgccacttgtccaaccttcttataagaatctcgaaaggtcctgtaaatcta

SEQ ID NO: 106332 - DNA, 914 bp, Cannabis sativa
taatagtttgaggagaacttttaagggcctgaaaaaattaatttttttttttgaaaataagatgttgcatagataaagaaaattatgcctcgcggtcatcacaaaggatagaaacaggtatggagggtgactccataactcctataaagttctgggcaaaagcctatctagccacattatgggcagcaaaattacaaacacgggatataaaagcaaaattacaagaaagaaaataataagagagttgattacacaaagatacataattatcaatattccaaatatagtgcattcctttcagtgctttgataaccacttctgaatcactctccactaagacgtagtcatgcttcctgagcctcgctgtgtccaacgcaagctgacacgtcgccgcctcaccaatcagagggtccctgaagttaagacaagacgtagcagcccacacaaccgctcctgagtgatctctggccagggtcgcaatgcacatggagtctccaccaactttaacatcacagttaattttgatcaagtccttcggcggaggcgtccaagaaggcgtgaccacaggaagaaccggggggaataggtatgaggcataatctgtataacaatgggagatagagttaattacattcacaaaattaccctgagtcgagttatgtaccttgtcattgcgggttttccaaatcatgtccacagcgattgaagcataaagaaacaacttttctgcatcatccccatttaactttaagttccaaaggaatttaacccaatcccagaaccctaccaccagaaccatttaacagggtataccccccaaggggaggacctccagatgtggtatgcaaaattgcaatagagaaaaaggtggtcaatggactccgcctcctccccacacaacgggcaagtctcgt

SEQ ID NO: 106333 - DNA, 541 bp, Cannabis sativa
ttttttctgggggggtgtgcaaagcatcccccgcctattccatgtccgtagaagcaaatgaagactcctcctccctatcaccagctcgagctctcttcaattgtgacctgacagagccaccaataatcacctgctgaggagtgaaagatgggcgtttaactccagaagtagaggccagccctttcccacgaaccaaagaatcaggttggccagcttcagcctgggcctcaacaacagtagcagggctagcagagacagcctcaacagtagaatgaatcgaagtacccataacaacagatgccacgacatccgtacaagcagtggtagcaatcaccaaagaatatgtggagtaggaggtgaatgctgacagcctcgaagagtggcttccaaatgggttatgaccagcagggaaaacatgagcactattaggattaagaggagtaggaatcatgacagtagatgaggtataaggacttaagaagttaggcccagaaataccagttgcagccagaaatgaagggaaagagataatgttatccaa

SEQ ID NO: 106334 - DNA, 771 bp, Cannabis sativa
  modified_base (45)..(45): a, c, t, g, unknown or other
ttatatatatatattatatatttagctataaataattgtcatggngaaattgagattgtgttcttttctttgtgcagagaatcaaatgaaggaggctgtggaagtgaaggaattttcaattgggccaaagaattaagtttggggtggcagaatgctatccagattgctatagcaaaggcttagcaagaggtgttttggtactaggctgatcaaatgaattggggtttgaaaaaaaataaagtgagtggtctgtcaaagaaaaacatgtgattgaaatgttgttcatgatgcaatcattggatatgtctatttttgttcagataaatcatttggggttgtacttaattttgaattgagtgagcccaagttgattttggagatacaaagaccccatttcacattagtttaatcagtcttgggcccaattatttggtcaactgggccccagtaagtgttgacccatccacttaatggtcaacccaacatcaaccctaccaccatcactttcatcttcttcacaaacccagccgtctccttcctcaatactcagttcaccatcaccatcttaatctcagccgcaccttcgaaccaccaactcacccaagcatttgaccttcaccaaaaatcaaaccaacccgtaaccccatttgaccagcaacccagcccaagccgaaattaacaacatcacctccgttcacttcacaccaatccgaccaaaatcgcccccagctactaacccataacctccgttcgaacctccaagcaccaacc

SEQ ID NO: 106335 - DNA, 1230 bp, Cannabis sativa
aagaacatcagtgagttcaatgaaagagctcaagtgttcgtatggaaagagaaagcgaggagcgatatgaaattgttaaagactagctcggaaagtaaacccagcactgtctcgacaagcaccgtctcgacaaaggctgacaatccaggtggctctaacaccaagagaaaagatgactctagggaatcagccaaagataagaagaaacataaaaggcacgataagtatgagccaatttacactatttataccgagcttaatgaaactcaggagaataactttctcgcgaatgagcatagggttgcgttttgcaagcctgagtccatgagacatgcgagaaatagaagggatccaacgaaattttgtcaatttcacaaggatatagggcatacaatggaagaatgtcattagttgaacgacgagatagagggccttatctcaagtggttattttcaacagtatgtaaggtgataaggtaatggacaaaaccaacccaatctacccaataacctagacaaccaaagattactaccccctcctgtagaaggagagaatattttggtcatcacaggagggtcgcatctcgctgaagaaagcagtaatgcctataagagatatgtcaatgaaattaaaaatgagcgatcagtttttgctctggaatcatctaagaaagtcaagactgaagaataaaaagggtgctagtggataatgaagctcagtgaatatcctttacaaggatacactaaagaaaatgggacaaaatacaaaattaagaccttgcatggtaaatttctgtggatttatcggagatagtgttgccagttaaggcatcattgaactcccattaaccgtaggcgagccacctatatccacaatattaatgcaatattttctagttttcgacctaccatcgggctataacatactattgggttaccctgcactaattggactaggggcaattagttcaattaaacacttatctttaaaatttcagacattggcatgtgtaggtgtagtgcgaggtgatcaactactagctcgcaaatgctaccgtatagaactacaaaatggaaaagctaggcatcagctaatggtagtcataatagaggaaggcaagaaacaggacgaggatctagatcctcaaattcaagaagaaaagaaccagttgaaaccaatcgaggaacaagaagaagttttttttggtccagaaaatcccactaaatgtgt

SEQ ID NO: 106336 - DNA, 654 bp, Cannabis sativa
ggtatgtccatgatccttgtaaactatatctcgtcctggtgctcctttcaagtaacataaaatttgctctagtaccacccaatgatgaattattgtagaagacataaactgactaatgacactaactgggaatgcaatatctggaggagtcatagttagataattcaactttccaactaatttgtgatatttctcaggatcttcaaatggtttcctgtcacgtgtaagatgcacaactagattcattagagcaatacaaggttttactcctaattttcctactcagttaacaaatcaagtacatacttcctttgagaatgaaaaatatcttatttactccgagtaacttcaatacctaagaaatacttgagctcccctcagtccttcgtgtgaagctgggtatgaatgaaagacatagggtgcatttgtttttattaagatccagacatctaaatctgaatactgaaatatatagaatgtttgtttttttcacatctgaatgcatttttcagagttgttaattatataatgttaataaatttattatattatatctaattttaaaaaaatatatttaaatatttagagacaaaatattaattaattttaagaaatttaaagtatcaattgtttcctcttctttgcattagcttt

SEQ ID NO: 106337 - DNA, 521 bp, Cannabis sativa
tctcccccatggataattttctttcattgttttacctccatggcaaaccttttagaaagaagaatatgccatcgaaaagacttttagattgttagaaaagttctcatgacaacagagaataggaggattacaatcaaaatactcaaaataaaaatagaagtatttcatcaagattacaagaaagctagagaagaataagaagaataataacacacacaaagcttgaacaaggctcaaggacctttgtcttaaaagtcatttcctccctaatatggacacaggggcggagccagaatgagaaattagggggggccaaactattttctaaatttaagtgacaaaagtttgagaaacattttattaacttcataattaaaatctttcaaaaaaaaaaacttcataaataaaattaaaatgcaaaatctttttcttgcatatcacaaaaattatatactatttttttttgacgatttttcttttttaatatacaatactaacaaataactacttaaatatttatt

SEQ ID NO: 106338 - DNA, 523 bp, Cannabis sativa
gttggaagaccttctggagcccatgggctcttttccaggacggtgatgagtttcttcatgtgatgtgctaacgttctccgtgttgtcacccatgaaggagattgttttgtatatgtaaggagggttttctctgagcttttacacgaaggctcttaatgcaagtaccaaactgttaatgcaaatttttgttaactagatatgagcctaaacagtaataaacttgcacagaaaaactaaagacagtaaagaaaagaaaagtatgaacacaaaggatattttacgtggttttgcagttaaaactctgcatagtccacgagtcaattttattagatttctaatattgttctaggatcttttctcttatgaatttttcgtccttttttcagtgtgacttgctcctatttataattacataagagggcaattaattacatagttgacagatatctttataacaattatccccagaaatcgtggggtttaattatatatcacgtaagataattgcggttaatatttgaat

SEQ ID NO: 106339 - DNA, 621 bp, Cannabis sativa
  modified_base (505)..(516): a, c, t, g, unknown or other
gctattggtccaactcagtatcgattctcatatagtttaatataataattttagggaatatcgctagtcaatcgcaacgcaacatgtcgagaaggtgctaactggtgcctaataacaatgctcttatgttaactagactacacaattgctcatatctatatatctatctactatatagatgttacgtgctaagtcacgtatgttaattttattttagttttcagttttttttaatatcataattttaaaattaataatattcaatgtagtgataattattgaaatttgaaagcataatagtgatttaaataaaaacacaaattactattatactttataatagtaaataaaaaaaattattattcgtcataaattaatgaaaatgctcatctcgttaaactatcaaaacattcaaatttaataactacatggatgttgaccctttacatggcaacatttaataattttttatttttttaattttttttaaaaaaaaatcacccannnnnnnnnnnnaaaccaagaattctgttatatatatacataataatactagcaaaaaactacgtgcgaggcacgtatactaaatttatgctagttttttttttatgttatttgaaa

SEQ ID NO: 106340 - DNA, 582 bp, Cannabis sativa
actccattattcgaatgcacaaagggattctgagttgaattcatcatctatggagaagattgactctatgtcgttttccttaagcgacatcccaatcgttcgttgcatatgtgatataagattgactgtttttccttttgggcactgttttgcataatgccccttttttccacacacaaaacatcgatcagattttttataaaagttgcgcttctttcgcaaaatttttattttacgtcccttgtgctttgagaacttgaatgtcttgaacttgtttttgttctttggggttttgcaagaacatgaagattcagaagggcatttgatgagtaaatctcgtctgctacaaactttgcctagttttttagattgctttataaattcttggagaaatctcttctgggagcatattttttcaagggcctttaagactagttggaaaatttctccaattgcagcatctgttaggctttttcctgatccagagagtagcctgaaagtttcttcgccaagaggctctggaatagaggaaaggaaggcttgctttagatttggataatcaattccatctatttggtagaa

SEQ ID NO: 106341 - DNA, 552 bp, Cannabis sativa
tatagtaacaagtcctctccaagaactggcttcgacaggattggaggtttggccatgtgttcttttaattttatgaatgcttctttgcattcttttgtccattcaaatttttggcatttcttcagaatgttgaagaagggaatgcacttatccgtggatcgagaaataaaccgattcagggcagcaacctttccggttaggctttgcacatctttgtgcttcttgggagaaggcatgttcaggagggcttgaattttcctcgagtttgcctctatccccctttggctgacgataaatcctagaaactttcctgatttgatcccgaaagtgcacttcttcaggttaagtttcattccatacctctggaccacttccaagcattctgcgaggtcgtctacatgacttccacatgcttttgatctgaccaacatgtcgcccacgtaaatctccatgttccgtcgcaagaggcctttaaacatccagttaaccattctctaatacgttgcacctgcattttttagctcgaagggcatgactaggtagcagtatacc

SEQ ID NO: 106342 - DNA, 914 bp, Cannabis sativa
  modified_base (370)..(373): a, c, t, g, unknown or other
tcctgttaaggcctagacttcttttggttttgttggtgatggtacttctatcaaagccttaattttctcaggatttgcttcaatgctcctcgtgttgaccatgaatcccaaaaattttcttgaagagactccaaaggaacacatttttgggttaagcttcatattgtactttctcagtatctcaaagcactccgcgaggtcttttgtgtgatctccactttttatcgacttcaccaacatatcatcgacgtagacctccatgtttcttcctatctattttgtaaacatttcatttactagtcgttgatacgttatcccagcattattcaaaccaaatggcatgactttataacaataaagtcccatgttnnnnacgaagcttgtatgttcttgatcagggacatgcattttaatcaggttatatctagaatatgcatccatgaacgtcataagctcgtgtccagcagtagcatccactaactggtcgatccttggtagcagaaagcaatcctttggacacgccttgtttaaatttgagaagtcgatacaagttctccaagtttcatttggttttgggacaaggacatggttggatatccacgagggataaaatgcctcgcgtataaagtcattactcaacaacttatccacttcctgcttgagtgccccttatctctcagaatccaagggccgtctcttttttctcttggctggatgatttgggtcaatattcaagtggtgaaaaataatcttagggtcaatccctatcatatctgagtggctccaggcgaactgatccttgtttgccctcaaaaaacatattagttgctattttagtttttcatctaggtttttcccaatgaatacaaactttgtgggatattttggatctaaaataacttcttccaattcct

SEQ ID NO: 106343 - DNA, 1377 bp, Cannabis sativa
gagagctcatcattcacacaaggggatcttgtgtctccaatcaagggtcttggttggtatgggtatagattcactgtattttgtaaatgagtgtattgtttacactattgttggtctttgtaaggtacatctttgaatatagtgaaagttattaccctagttcgggaaacctaagcactagccgcctagaatgagtttttagggtaggtgaagcttgtaaaattctggtattgaatcttcgattttgtttttaatattcaagcataaatcaaggtaaatcaatctaaatatgaaaaagataggttagacaagaacttagggtttataatattggtgccaggatatggtatgggcttgcctaattaggcaatgcgatacatgggtgccaggtgttggcacgagctcacctgattaggtgatacagtggtgcaatatatgggtgctaggctatgacatgggcttacctgattaggtaatgtaatacataattatcatattaaagtatcgacttgcctgattaggcaatgtgatgtaataaagctagttttttttatgaggtaacagatgtaaattatattattaaatgaatatgacttctattattagtatgatgattttgtattactgaatatctatattgacgtttaattgtgatagatgttaatagtaatttggatttcatcttatgaggaatgagtgatcgttcctattttgattgtctgagtataaatgatgatatttgaataatatattatatgattgttgttattacttttcttgatgagtccttgtgactcacgggtgctatgtggtgtaggtaataggtagaggcatttggataaccatgagtcaagaatcttttctagcaaatgtacatatcagcttatccagcaagtggaattgagtgctcaggaactgtatgttaaatgttctgaactttaaaatgtattttacaatattattgtgatggcatgtcttgtaatattttatataggagatccccaatcataaaaagagactatgccacgattttatggtttaaattagttggtaaaatttttattagatcacattttgtttaaattgctagtttatgattataaactagtttattaatgcagacatgtggtgtccctaaggattagggcattacaacatggtatcagagtagcaacgattttaaagatcctaaagactggttgggtatgtaaatttgcagtgaaaacaagctcgactcatggatagtaagtattatttaccggttatatgattaattgttatctgatgtcgttagcaatatacatagaataagcatgagttaggttaattatagtatgggatattggcggctaaaccacctgaactttacggtttgta

SEQ ID NO: 106344 - DNA, 1647 bp, Cannabis sativa
atataaattggtcaaatttaaatgtgccatatttataagaacctttaaaattctataataagtgtaattttctcttaatttaattatcttctttggcagaataataattttaaatatatatatatgataattggcggtcaaatcttcttattttttaattatatataattaacttttttatctttttatattattttattttttatggcaacactctgtacttacttttgtctataaatttgagacaccagttaaattttatagttaaatatcaattagattgccaatatttatatttgtgtatatgtaacatgttttcattaggttcaaagttttagtatcacgtgtacactagtgttcaaagttgctcccaattggcatttagcagtgaaatttaactgatgtcttaaatttgcaaataaaaataaacttgagaaaatattgcctaaaaaaaggagtttttttaaaaatatgagaaaatttaatagagtttacttttctatgtcataaataaataatacaaaaatgtatgagattgaacaataatcaaagtttaaaatatgggaaactaaaaaaatataataaataaatttaataaaatttctaaaaataagtatcgccagaatagtcacaagaaagtcatcggtgtcgaaaaagccaccagaaaagtcatcggtgctaaaaaaccacctaaaaaatcatcggcaccgaaaaaattgacgaaaaagttgctgaaaaagtcatcagtccgggaaatcatcgtcgtcaaaagagtcaccggagttagatgtctcaaatatagattaaaatagaaccgattctataacataagaataaaaataaataacacaaaataactcaatccaattataattaaaatagaactggttctataataatgttataataaataaaaacaaataataagaaataactcaaaaaccgattataattaaaatagaatcggttttgtaacagcgttataatgactaaaaataaatatatatatttaattatatatatttaatttttttaattcatatttttaaaaaatatatataataaataaaaataaattatatttcaaatattatagcaaaaaaaataaaataaaaaattatgtaaagttttattaaaaaaaataaaaaaaattgtacacgatttaaaaaaataaatgtaaattaaaataagtattaaaattaatacaaaacaatatgagtaaaaattaaaaaaaaaaaaaaagaataatgtttaaaaattattttaagcttaatatttttaaatatttggagtgtactctgtgtggggtgtaaatatttttttttatttaaaaaacaaacttcttctaaaatgacgaatatatccataaatttgcctgaaaattgatcacgtgtgattattgtgggcaagattggcgagttcatcggtgaatgggcttgaataaaagaaaaatatccattgaaaatataattattataagagaaatgctaaagtgcaccagtagtgtctagtacccgtatcgctagtcaatcgtaagacgataaatttgaaaatgttaaacactactggtactcaatgagtaataacaatgctcttaaggcaagttcaatggggtggtttttaagggaaaatttgattttctatact

SEQ ID NO: 106345 - DNA, 516 bp, Cannabis sativa
tggttcctatccagttcctcaaagagcttagcattactggcatggaagagatcgaaatgattgatacttccccaaactggatgacactgatagcggcctacctcgacactggggaactccctgataatcgaaatgaagctcgaaagatgaggaggaaggcagcacggtatatcatagtagagggaattatgtacagaagaggattctctatgccattgctcagatgtgttactcaagaagaagctggacgacttctgtctgaggtggaagatggattttgtggaaatcatgatgccgagccgagtttatctaagaaaattctaaggcaaggttatttcaggcctacaatgattgaagattcaaaggcctatgttaagaaatgtgacaaatgccagagattttcgaatatacctcgacctccgcccaacgagttaactcagatgcaaagtccgtggcctttcgccatttggggaatcgacctgatcggacaattacccaaaggcaaaggaggagtgc

SEQ ID NO: 106346 - DNA, 548 bp, Cannabis sativa
ctataccctgttataggcgacaattttaaaccgtcgggaatgtaaaaaaaaagagaaaaaaatattgatttttctgtcattaatggcagaaaaatctgtattttcccacatttttttttcttgcattagctttataattttacttaaattaaaataaaacaattaattaattttgttacaataagaactaactttaaaacacattaaatttatacaataacaaaataaatatgtataataaataaaaagtacataaataaataaatatatttataccgagctcagagagagagaaagatagagaaggagacggacgagaggtggtggtggtgcgacgtatgagatggagatgagagggataccgacgggaggtggtggtggtccgacgtatgcgatggagagtagagggagaccgacgggaggagagtgggtggagatcgatggctgagagagatgagaagaaagggggatcgagagagggaggaagacggcaagagaggagggcgatggtgcggatgcgtgggtggggttttggagagttaagattt

SEQ ID NO: 106347 - DNA, 642 bp, Cannabis sativa
tggatgacgccaatagcagcctaaactcctagataaccgaaatgaagcttggaaaatgagaagaaagggggcacggtacatcatagttgaagcggtcatgtacagaagaggattctcgatgccattactcagatgtgtcacacaagatgaagctgcaccgcttctatttgaagttgacgacagattctgtgaaaatcatgcagccggacagagcttatcaaagaaaattctaaggcaaggctatttctggccaacgatgattgaagattcgagagcgtatgttaagaagtgggacaagtgccagagatttgcaaagataccaagagctccgcccaacgagctaacatagatgcaaagtccgtggccctttgccatttggggaattgacctaatcgggaaattacctaaaggtaaaggcggagtgcagtacgcaatgatagcagtcgactactttactaagtggactgaagccgaaccacttgcaaccattacatcaaagaaagctcaagactttatggtgaagaacattgtatgttgcttcagactaccgtacagaatagtctcggataatggcaaacagttcgacagccaatctttcactgatttctgtgcgaacgatggtatcatcaaaagtttctcagc

SEQ ID NO: 106348 - DNA, 784 bp, Cannabis sativa
  modified_base (320)..(340): a, c, t, g, unknown or other
  modified_base (487)..(516): a, c, t, g, unknown or other
tgtaaggataaaatacattgaggggtgaaacggtaaatttttccctactcggtgtaaatcatctatagaggatctttaatttttgggattagaacgatagctaaaattttcatagcgtatctatatcgtggaacatataaagcgttctatataattgagagtgcaatttcaaatctatagtggtgcaaggaggaattaatgagttagggaattcacttggtaaattctagatctacttattggaagctggttatataggcccatggtccccatactagttgagacaatactactggtaagactcagttaattaattttannnnnnnnnnnnnnnnnnnnnaattagactatgtcttatttataaattttcactaagctcggcttaattgtgaagaaaagagatgctgaagtttatttattaattaagagactttattaagtctgattaataaatatattaaatagtaattttatttgataattaatnnnnnnnnnnnnnnnnnnnnnnnnnnnnnntaagtggttgaattggaaaaatggaaaaaattacaagtggtgagcccacatcctatggatggccactaaagcatatttttatcatttatttatcaatttttaatgccaaataattcaaccctaaacctagaaggattcttataaataaatactgatggactcaaattgaaagaggataacaattgatgcacttaagcctttcagtcaaatttgagccatctctttctctctctaattttcgaatccttctctctctttctctcttcaa

SEQ ID NO: 106349 - DNA, 797 bp, Cannabis sativa
agggtcgcaaatgttctacgttccagtagttctttattagcgagccattaagactagccaatttatagactctgactccaactactgcttcgatgacatatggaccctcccaattcgggttgaacactcctgcagatgcatctctcgtatttgcaaagactcgtcttaacaccaagtctccaacattgaatagtcttttcttgaattttttgttgaagtatcttgtaactcgatgttggtatgttgtgttgatgatttgtgactcagttcgtttttcctcaagtagatccaaggccaattttaaaatttccttgtttttttcttgattataaaactccgttctgtgagtcgatatgttcacttcaataggaagcattgcttccgagccaaatgctagcgagaaaggagtgtgtcccatagctgtcttcttggtagtttcgtgggcccagagcacctgaggtagctcgtcaacccatctacctttggcaacgtctagcttcttcttaatagtatcctttagggttttattaacggcttccacttgtccattttcctgaggcttggatactgacaagaagcttttgataattttattcctctcgcagaattaagtgaacaagtcgccatcaaattgggttccattatcggatactatcttcatgggaattcaaatcctacagataatgttcttgacaacaaagtcaaggactttcttattggttatagaggcgaggggctcgacctccgtccatttagtgaagaagtcgactgcaactaccgcatacttagctcctcct

SEQ ID NO: 106350 - DNA, 1291 bp, Cannabis sativa
agtagtcaaattaaatcaaaactctttttcccttaaatcttttgtaaatacttaaaagagaatgacagataatgttgacttacgctttggctgtgccaagaaggacctttatgcgggcttcccaagtgagatatccatgctgacgcatggctccatgaagccactgctctaaatttccattgttgacatactcataaacaagcatcctgaattattttaaacaaaaatgaaactagaaactgtcaactaagatattcttaatcattgagcaacaacaacttgaacttaagctaaacatgttgttcttcttctactaatagaaaatcaagatatgaacatcaaaatgcgagcggtacctatgaatgccttcaacgcagtatccaagaagacgaaccagattcttatggcggacatgaccaatagcttcaacttcaactctgaattctttctcagcttggcccctgcaatggtaacaaggagtttaagccactagacaatgtagcaataaatatgaaatcaaacacaaaaaactaaaagccatcaaactcacacattatttaggatctttttaactgctactggagttccattgatcagataaccccggtaaacaactccatatccaccttcaccaaggatattttcctttgaaaatcggttagtagcaagctctagatctcttaatgtaaaccaatggccccaacccaagtgggaaaattcaggcaagccactcaatggagatggtgcagttatgggatatgaagaagatggcttattatagccagtaaagttaccagaaccaccttcttctcctgattgtgaacctccacaatctttatcaaaacgattaaatgagccagattgactgctaatctctccattctttgacttccccattcctcctacatgaagcagaaccttatctgattctctttcacttgacttgtcatgaatggtgagaagtattccatctcgtggaacaaactcacttgcagcaacttgctcaactcgaacttctttaatttcttttgaaacagttgggatttggctatgaggattcctgtccctagctctttgggaccttttccgggaagtgaggcatagagacaacacagagagaataattacaataaatagtgcaacagcaataccaattacttcccaaaccttaagaccaaagatagcagttttcttggataattcagcattgaggtcagaacccatttttcttttctttcagatttctgggtgcctgtaaagtttaatcaagaatctcatattaagctctaaa

SEQ ID NO: 106351 - DNA, 701 bp, Cannabis sativa
ttcttttttataaatgaaaaatagatattcatgatagtattgtttaatacttgaatactaatactattgttaaggtggctctagctacaaatatactgttgtaccgaattttcttttaactagtttcattttaggttcaccattgtatttatgacttggtgattttgatttcgtgatatataatcatatttttgcagtttaattctcaaaatctatatgttccttttcaagctaatctaatccatttacattaatttttttatgctatatgttattaaccaggcaatttgatttaagtttacagattatgtatgtttatttgtttttgcttaataatttattgggaaaataatattataattgttaatttatctaatgcttagtaaaaaaaaaattgatctatgtcttatactcgttctctttatatgtatatattatatgcatgtataattatagttaatattttttattttttattttacagtttaagtcagatactctctacagtaacgaggagttcaatgcagtacgtgttaagtgggtcgaatttgtaaagcctttaattattgattgagtacaatattatcactttttattatgatacatgggaaataagttttataattgttgttattaattcttttgcattatgcaattagtttataatttttttttgatgaaatataattagtttatactca

SEQ ID NO: 106352 - DNA, 639 bp, Cannabis sativa
  modified_base (66)..(67): a, c, t, g, unknown or other
gcttcaacatgtacaatctcatccgagctcaggttcactcctattcagctttcgcctttcctttanntacacatgaaagtagaactatgagtcaacagactcactaagaaaatcatacaacaatcatataattttcgacttgtacttaggcgcccatacacctatttacaaggcttaacagatgagtacgaacgttcaatactagttgtgctattgaccatgatatcacccactatcagtactatgatcgtactgtaggaccggcactatgatcgtgtcgctatgatagcataaatagcatctaaaggtataattggccatgatatcactcttaaccagtacgatgcctgtactgttgaaccgacacaatggttgtgccgctatgatagcaccaattcataccttatggggtgagtatctcccaaacatatacaatcatacataaaacatgcacatatctcataccacacgttatataaaattcttacctgttttcctaattcaagtgtgctggccgacctgaacggaaatgcttgcgctagatggattgtaacacagatgagtgatttgctgaatcactttccagggacttaaatgaaaattaaaggtttccctatcgataaaccacatggaaatacc

SEQ ID NO: 106353 - DNA, 1258 bp, Cannabis sativa
ttaaaaaaatagtttaaatatactaataagaaaatgacacgtggataatgacttaaaatttaatgatcaagtacctacagagttccagaaatataacttagcactgcataatataaaagaattttttaaaattaaatgcagtatataggtaaaaagttgcataatatttttgtaaaaaataaaatgtagcaataaatgtaaaaaaaatttaaaaatcaagtataatgtaaattttctaaaattttaatatatacatgtatactttatgcataatatagagtctaattattcatccaaattaaatgaaaatattaattagtttgattagatgttgggtgtattaaatttttggacaccccatccaacatccgatctaattagatatttaaaaataatatccaatctaatctaatcataattaaatatttaatatttagtgatgggttgtaattagatcagttgattgtcattaaattagatcaatttatacacacctagtgtaaaataaaaaaaaaaataaaaatttggtaatgtattttaaagaataaagtggagatgttgttgggagcgctcagttaatataaataaaagaatattatgattttgaaactaaataaaagttaatataaatatataaagagaaaaaagagttgattatctttatacttctgaatgaacagtatgatgttagataaaaggtaagaagacagaaatccccaaataattgacaaacgacacagtagggccatatgttattgaaacattaattatcaaatatccatccatacatacatctacatattaataaagagcactttaaaaatcttgagttactagctaaggtcaatacaaccaatatatataatagaagtccctcttgaaatatttacatcagaacgttatgcaaaatcactagtcatgacctgatattgcacactgagaaaaacttcaccaaagctaagccaatgatcctatcaccctctcaatccatcaccgaaaattcgagtttcttcactgaatttttcataaataacctcgaggcatattattttgtaactcgaaagaaggatcttgtctgaatcggtaacatacacttcgaaaagaaagagctctctcactccatgtattgtggagaaaaagcattacagctcgttcataactctaagagaacagcatcttcaattcctctaatcgagcactacgaacttcttgatcggttaaggcaccagaaatcattctctgtttacgggcttgtact

SEQ ID NO: 106354 - DNA, 754 bp, Cannabis sativa
taaaaacagacattataacggcaataaaaaggagttccggggatccctgttataaaagatttatccaaaagacgatatacaacaacaattcaaaataaaattcaaaatatagcagacatagccagtctaaaacaactcttggaaactcaacacgcaggctggtggggtcaatacgtatattgctagagaagaccgccatctcatggttgttctaactttgccttgcccttacctacaccacaaagcacccctgagtcacatagactcagcaagaaaagtaataaagaaggatacattaaataactaattatacattttattatcacaaaattattaaactataacattcaatagtatgtaatataaccattcatatgcatagaaatagatatgctcatatatttgcattgcctaatcaggcaagccagtgtcataatgcaatatcatatataatatcattgcgccacctaattaggtgagcccgtgccacaacttgacactaatatattgcattcgtctaatcaaacgatctcgtacctacgctcggtacttatcatatgtcactgacgcccgtacccttgcctattatgtcaccaggtatattgcatcacccaatcaggtgagcccatataatgtgtccatagtattattacattatcattgcctaattagacaatcgataatttcagaacatgtcatgccatgtggtacattatacttttcttacctcaagttctggatcaggtatgttggc

SEQ ID NO: 106355 - DNA, 3337 bp, Cannabis sativa
aaaaaaaaaaaaaaaagaatgtctcctagcaaaggtagacacaattgctaaggggtaaaagtcaacaagaacaacaaattttgaaggaaaattcctatctaacgtcattaaattgccaaaaaaatatgcttgaaatgctagaaatctccatcttccacacctaaattttcagttggtgcttgttctactccgtccaaatgttctaaatgaaaataagatgatccagctgcataaaatacaaagaaaattagcaactaatataaatcacaaaaaaaaaattctaatgagactgaatgtaccaaagaaaacttatctgctaaaaatgttgttctctagcgaagcaagcatatcatttgaagtcgcaaaactcgactagtgacaaaactttttacaaaaattgaatttttattttaatatatatttttttaaaatatctaaatgaattttttaataaaaaataattttttttttaaattacttaactagttttaaaattttaatttcttttttagttttcttaatcattcaaaataatttttttaggatctaaattaattttttaaaatttaccgaaaaaaacgttgaatcggaggtactatttgataattgccaaagtttatggaacaaaattacttacatcaacattcaaacagaataataggttgaaacctaagactaaatttctataaatgtaaaagttcaagggattcttaaaaatgtgtatattttaagagaaaaaatcaatattgccgaaaattcgaggagataaattgctaattattctaaaatgaaagaaagaagaaaccccaccccaccccacctcacatcacatatgttaggatccatttgtaaattgtaggtttacctttcatgccaattacataagccaagtctatatggatcacttttctacaggctgaacaaggataaaagcaactgaaagataattacattttgttaaaaactagggtattcgggctggtatgccaagtcgtagttgccacttccactccccatgggagtctgggaataatgtgaagactggatagaagacgaagaaccgtagtgttggaactgaggactaaaatttggttgcatgaattcacgtgacgaaggattttgattcctctgcatgacaggagtgtatttatgttgagcatttatttgtattccactctgataggatttctggccagaatggtaggtgtaggtgaagttgccagtgtacccttgagatggcatatccatattcggccacccgtagttaccaagttgggcgcttagctcgtatctatgctgcatttctgcaacagaaggataactggtctgggaagtttgcttccttactgtgtcaatgggataacttgtctgcaaagtttgcttcctttctgtgtcgatgggataactggtctgagaacattgcttccttttccattctgtgtcattaagataaccgatctgggaactttgcttcctttctgtgtcaatagggtagtcggtctggtaattttgcttcctttctgattcaatgggataacttgtctgggaactttgcttcctttttgtgtcaatgggattactggtctggaatttcccactttccaaaccaggtggaaaatcttgtccaagagttttttctttgtcttggcaggccttttctttgttttcgtcttctggtgatccaaagacttcaggcgatgcaaagacttcatgcagtgcttgggttggtgaataacttggggaagacaactccatatcaatgctcacatcagaaggtgttgagccttccaaatccccctgaatcaacctctctatttctccttgtccatcatagtccatcttaatgaggttgctcttgctaccagtatcaatgtcatcatgatgaatatagctttgattgacttttatgggagtatttgatccagcttcttgtggttcagcctcatagttaacatccgcaacaccattgaataggcaagacatgtcaccgggtgcacacagataggagtagtcctgataaaaatcataaccttcttcctcgggatggttccttaccttgtttcctaccagatgcagctgttgcaggacaatatgaccatgttgtattgctatctcattgtgtctaagagtccagtcacggcgactccaaagatacaaaggtggcgccttcaggttccaatcctctaactgcttatcgtgcatgtcaatagatccagggagataaaaagactgaaaaaaatgggagagaaaaaacaaatcaaaatgcacaatcatgattaattctacaaatcctattaaattaaattatcacaactggtagctgggaaatgtatttactagcaaagaaagaatactaaattacctttcctgagagtactttttcatcctcccaaattaaatcataagggttgaagattgtgtcaagtctggaaaagcagcaaacaaatgtgagaaacgagaaatggtggagaataagttaactttaagaactcaccgtttggtttcctttggggtaattagaataaggagttttggtctgaactccagggccttaaaaatgaacctgtgagctaaagaagcttttactccaaaaggaggattgagtcctatgacctacttttagaattagttcagaagtataagaaatacaagcatctagattatttggtacatggtcaaaggggaaaacaaaactctcaccagctgagaaccatcaggcagttcttctaactttacactcatccagtctcttttctcgaaactgaagtcattctacaggaatgaatggtgaaggtatttagtttaacttttcttttacatttacatttgagagtcaagacaaataaatgatgaagagacacactggcaactaacaacaaagtccctttaggctttagcactcaaatccaagagtgcccagaaatacagtaagagaatatgttcatacagaatcaaatcaccaaggtttagtgttgtggagactaaagtcgcagtataataacaataactaataacgataataaatacttatctctaattgagcccttgtcctatgattttgataccacaaagtatcatctgtcacatttggctatcacataccaatgaactgatgttattcttttgccatttgcttctatttggcgttactttctcttgtttaaccttgttattagagtgtttactataattatataaagggaatatactcactaccttcagtttttataaaaaaagatatttggtatactgtattttcaataatacttaattggtacctcttattttttttgtacatatttagtaccctaaataaaatttaatcaatataatttta

SEQ ID NO: 106356 - DNA, 2261 bp, Cannabis sativa
  modified_base (30)..(40): a, c, t, g, unknown or other
actttgtctttcgaatcatataatcacaannnnnnnnnnntgtgttgacatcactgtaattgtaaatgactatgtgttctggacttaacagagtttctatatatattaaaccataaacatgaaaataacatgtaaacataaatgacttctaatcttttattgataacaaatcatattagattgtaatgagttttatttagggcataaaatcccaacacgtttagccaatttggcttcaggtatagtacccatggacttcaataaaaaagagaaatatcttacgagtttaaatgccaagatgaaacatgatttagtgattactacaaatgatacaataacctatgctgaaatggttgagaacggttttaagctgagggtgccgtgaaatttcttcaagagtcccgagagactccaactttttgtggaaccaccactcttcctacttctggatatggtagggacagtagagattccactgctgatcagaagaggaagaatttcctgacatctggtggtttagagcaccacaaaaggttccgagggaactaaggtagaggttgatgccagggttattcttaccctgagtgccctcgttgtaagaaacaccatcctggagagtgtaatcaaaagacatgcttctattgtggcatggttgggcaatttaaggaagattgccctcaaacaaagaaagaaaaatagatcaaaaggcaaagcccgtacctacttgggtgtttactattactcaagctgatgttgcacacagtctttctatggtaattggttagcttcttgtgaacaacacttattttagtgtattttttgactctggggaaacacattcatatgtggcgtcaagagtagtaattaatcaattgggtaggccttatgatttcattgagatagggtttggaatcttactgcttagcagagaattagttatctccaaaaggtggattaggtctatgccgattaggattgaaaatggggagttgagtgttgacctagaagagttggaactaacagagttagatattatacttgggatggattttctgtccatgtattcagccagcattgactgtaaacggaagatggtaactttcaagctggagggcgaagatccattcgtttatgttaggtctgttcaaggttctcgaatcccaattatctcagttttaaaggctgaggatttattacatagtggatgtgtagaatttttaccggttatcattgactccagcagacatgaaacatttaggcttaaggatgttagagttgtaaaagactttcttgatgtatttctagaggtgttaccaggatgaccgccacagcgagagatatattttataatttatctggcactcggtgtagaacctatttctaaggcaccatataggatggctccagcggaacttaaagagctaaaaagcaaattcaagggatgtttgatttaggatttactcgacccagtgtatcgccctagggagctccagttttgtttgtgaaaaagaaggatggatccctttgaatgtgtattgattatcgtgaattaaataagttgatgatcaaaaacaattatccattgcctaagattaatgatttgttcgatcaattccaagataaaactgtgtcctctaagattgacttgcattcgggttatcatgagttgagaatttgggaagaaggcattcaaaagattgcctttcaaaccaggtatggtcattatgagtttttagtgaagtcgtttgggttaacgaatgctccagcgacctttatggatctcatgaatagagtgttcaaggattttctcaataattgttttatagtgtttatcgatgatattcttgtatactcttatatagaagcgcagcatgagcgacacctgctaatggttttgtaatgactcaaagatcataagttttatgcaaagcttaaaaagtgtgaatttgggttgtcagaagtgtccttcttgtggcatattatcagaaagtatggaattatggtcgatccatgaaatattgacttagttaaaaattggctgaggcgaagaacagttactgaagtttgtagttttatcggatttgtaaggtattatcgattctttttcaaaggtttttctaagatgtgaatgccactgacagtttgactaagaagaactagcggtttgtatggtccgacaagtgtgaaataagttttcaagagttgaagaaccggctgatgacagctccggtgttagcttttccatcagatcaagagaaatt

SEQ ID NO: 106357 - DNA, 533 bp, Cannabis sativa
cttagcattagtcaaatttgtgaccagggttatactgtgagctttgatcgtaatcattgttatgtgtataatattcttgatgaaattgtcttgtaagggctcagatctaatgacaattgttatactctcagtacatatgctacttgtcattctatcagtgataatattactgatttatggcatgaaaaacttggtcatattcattttaaaaatctaaggagattgtctaatgcaggaatcgttcgaggattacctaaattaggtaaggagtccttggaaaaatgtggaccatgtcagcttgataagcaattgaaaatttcccacaagagtgtttctaatgtgaatacttccagtgttctcgaactcctacatatggacttaattggtctaatcccggttgaaagcttgaatcgtaagaggtatatttttgtgggtgttgatgatttttctcgtttttcatgggtggattttttgagagaaaaatctgatacttttgaggcttttaaatttttgtgtttgaaattaagagttga

SEQ ID NO: 106358 - DNA, 574 bp, Cannabis sativa
gtgtttatttcattgttttagataattcatatttaggatgtgaatgaaacatacttgttaataaatctatatcctggtaaaacattcccaacagtcacctatggccaagaagaacaaagctagcccaaagtccaaggacaagaaggctaaaggcaagtgtttctattgtgatgtaatgggacactggaagagaaattgtaacaagtatctctccagcttaagaaaggtaaatatgatttatttgttcttgaagctaacttagtggaggatgataaatccttatggcttgttgattctagatccacttatcatatttattcttttatgcagatacttgattcgtcaagggagctggctaatgtaaaggtgaccataccggttgggaacggatcacaagtatcagttaaaagtgttggcgatgtctaattgaactttaaaaataagtttttattgttgaacaatgtttatttcattcttgattgtagcaagaatattatttctttatcacttttgcatgagcaatcttttaaaattgaacatttaaataataagattattattttaaagtttggaa

SEQ ID NO: 106359 - DNA, 919 bp, Cannabis sativa
taccaaatcatgcccctaaactttagccgttaaaaattccccttgaactatagagattgttagattcaatgacttttgtttaattttattcaattttactaattatgttagtgtccatgtactaaatcatgctccataaactttgatatctaccaaactatgtcccttgaactttaacatgtaccaaatcaagcccctgaactttcatccatattagacttttcttactaaaattagaaaaaagtccttaaatctaacaatctcaatagtttatggagaatttttaacagctaaaaaaatttaagaagcatgatttgatacatatcaaagttcagagagcaaaaatgtcaattagccaaaattttacaatatttttgttcttcagtctatttctacattcactttggtctcttaaaacattctcgtcaaggttaatttaatttatcattacacctatttatcaatgcgtataaatttatgtatatacagttttatgtatacacactcttactctcatacatgtatataggcttatgtgaagagaagagatgttattttccgcattctccatcttcttgtctcaagtatatgcaatttttttttttgacaaagtgattaaaatcactcataaatttacgacgcagacgtttaccaccgatactagaacctcctcgaaccagaatagctcatcgtctaaccgcagagcatgctttgccaaaccatgggccgctaaatatccaaactgagccacataagacaaaactgcccccggaaatttagacaataaagctataacatcttcaaacaccgctcctagctcattgaaaaacacctgaaaaaagtagaaaaccagaataaaacttttattagacaattatcaaattgaccaaaatctaccaaacaacaagaactaagcaac

SEQ ID NO: 106360 - DNA, 661 bp, Cannabis sativa
  modified_base (597)..(601): a, c, t, g, unknown or other
attcctccgcctcgaaaggaatcctggagtcatggctcggggccacagtgtccaccctgcggggccgcttagaaggctcctcctccaccatctttctctttcgcttgcactcgagggcggctggctcctcttcttcaccttcttcaatttcctcaaaaacctcctcctcgtccaccaagacaatagtgcccgaaggggcactggaggaagacctcccgggagtgaccaacagagaagaagcaggaggtggggaagcatcaggactgtgggctccagcaagagtggccaagattttgtccatgggtctggctgctgcacatgaaaataagtcaagtgttagatcattcgcgaaaacagtatacacttagcaaaaaaaagggggtaatgaagccagtcctatcatgactctctaattcggccctagcaaagtcacgaatcatagcactggcttcatcatccccgagaaagctgcctgagggaaggaaccaactagaggacaaatgggctgaatggtccaagggaatgggccccggaggtccagaacccatatgggaccgacctaaataattacctaagtgggagaaataatactccttnnnnngattcccccaccgagtggaaggcatccaaaacctacggagatgttcatcgaaccctatag

SEQ ID NO: 106361 - DNA, 660 bp, Cannabis sativa
tttatggaaatagactaatctaggcaacaaatcaatgaagcatacaattcatttaacctaggttctattcttcatcataattaaatttacaaatttgtcacaaacacttagaatcctagactattaggtgaatagtaatcttaagatgacagtagattaaagtagaacataatttagtggccatctaaacaagattaaaacagtaatcatagcattgatatacaaaaatagaagcaatttgatatggtggaaactagaaattaacattcaataatgaaattaagaattcatgttttgggttttgaaataatccttaactataagaaaactacttagaacaagacattataacaaaaatcataataattagtaagagtagaaggagaagaaaagaagtagaataaagaacacttcgaagtcgatctccgtctgttccttgctctctctcactctgagtttctctctctaatttgtagcttttagaattcttaaatttgtagcctaagaggtcctatttattgtgcttgaaaagataggtgaattccctttgaattaagattctatttatagtgcttcaaaagatagatgaatctgtaatctctcaaaaaatccaagataattgtgcatgaatttttcttctagatatggaagtccaacaaa

SEQ ID NO: 106362 - DNA, 860 bp, Cannabis sativa
  modified_base (252)..(256): a, c, t, g, unknown or other
ttaataaaaataaatagtacaatagtacaattactaattacttaattacttaaaaaaaatatgaataattataaattctacttaaaccgtggtttcgaaccattcttggtttggtttgagaaatttattggtctggttttgtttttaatattcgaaaaatcgttatactggtttggctcaaaaactataaaaattgagaccaaaccaatccgtgaacacccctatcgttacccatgttaatgctctgcattnnnnntgaggtgaaagttagaattttatcaattttgcctaaaaatgaaataaaaaagacttggaatggtttgagtaattgtaaatctacaacacaattaattttacaggattctacaaaatatagattgtaaaggtcgtaatggtgctattaagttgtaaatttgagtttatggaatacaatgattttaatttctcaaaataataataataaaaaaaaatattcagcactgcactaaacttcaactataaacgtaaagacatcatgtgtgtatatatatattttagagtaatttacggcaaaaccccccaactatcaatttacctgcaaaaaccatccaaaaaaaaccatccaactttggatggttttttgcaagtaaattgatagttgggggattttgctgcaaattactctaagtttttatttttattttaattactcattttaatttttattttgtaaaatatggtcacgtaggataattttttagtgacttgtcattgtcacgtgggcaaaatctggacttaacgaggctggacagacgacaccttaaaaatgtaaacggaacagtactttagagggttttcccaccaaaatatgaagttggatg

SEQ ID NO: 106363 - DNA, 574 bp, Cannabis sativa
ttatcttacacacatttaagttatatttccttaagtatttgaacatcaatttttattttatttttggattaatttaagaacatatttaaattataagttttcttaaatattattatatttctaataataatctcacctaataattaataatattttttctttaatttttaatttcacttttaaataaagtaaaaaatacctagcataaaatttaatatacgtgcctagcacgtaaatttttgctagtatatatatataagagaaacgtggatgtcatctctatatatgcaaatataatatataataatatttagtgaaaataaataataataataatttacataaagtttgcatatatatatgttgggtgagaagataagttattatagtttagatttggttatgtttttattaggagaaaaaaaagggtcacgtgatagggacaaacaagaatggaattgccaagttggggaaaccaatttgatctattttgaattctactctttgtacacattattattattattattattgggattttttattttccacttttactttttttttttttttt

SEQ ID NO: 106364 - DNA, 708 bp, Cannabis sativa
caagttatttatttttctgcaaatattttatattctgcttgttctgttttgtcgctacaaaacgagttgctgctgtagcagaattattttctgcttctgcagacgcatacaattttatattttcttatatataactgacatttgcaaaaacacggtttttcatatttaaaatatattgattaataatttatattaaaaaaaaacattagaggcggactggccccccgctaataatagtgtcagtttacgaatctgacattataattatcggtaggtgtgttagtctgctgttaatacatgctattagcgactaagtattaccggtggattaagagcagcgggctccaccactattaacctttactggtggattttgctatcattagcggcggaaggctccgcctctaatgtggatagagtaaatttataaacaaattaataatatattttataaaataaaatatatataaaaataaataaaatacttcatatatcattttttaatttgagagaattacttcatattttaaatatttttatatacattagtattcatatataaaaaataattttaaaatgtaaaagtttgtatcagactccagtagcattggaaactcaattgcaagttaagtgaaaaccacatttttattgggttttccttgccagccaaactaaagcccaaccactttcacttagccaacattaaaa

SEQ ID NO: 106365 - DNA, 881 bp, Cannabis sativa
tgtagaattttaacagcaaaaccatgtaaaaaaccctatgttcatatatttttctctatagatttttttttttttgtggaattattaccgtgaggctcaaatttggttaacgaaaatctacgttaacaaaagttatgctgaatttcatagcggcaaacttttgggtttcactaagaaaggctaaaggtgctcaacaatttctgacaatgactttgctttcaaaagctggagggtgaaacatcattgggtgtgtggtagacttcaagtagtccttttattccgagaaggagggttgaagacgtgtcatacccctagtgatctttcttgcatgaaaaataatgtggcatgcgagagtcatgttgaatttttatgaagcaagcttcggcttctacgaaggaaggctaaagttgtataaaaattcaagcgatgacttcgcttgaaaagatcaaagggtgaaagcatcacggggagtaagacagacttcaagcaatccttccgatctgggaaggatggttaaagacgcgccatacccccagtgatttttcttgcacgaaaaacaatgtgcatgcgagagtcatgtttaatttttatgaagcaagcttggacttccgtgaaggaaggctaaagttgtataaaaattcaagtgatgactttgcttgaaaagatcaaagggtgaaagcaccacggggagtaagacagacttcaagcagtccttccattctgagaaggagggttgaagacgtgccatacccctagtgatctttcttgcataaaaaacaatgtgcatgcgatagtcatgttgaatttttatgaagcaagcttcggcttccgcgaaggaaagctaaagttgcataaaaattcaagcgatgactttgcttgaa

SEQ ID NO: 106366 - DNA, 589 bp, Cannabis sativa
agaaatatggtaaaaaaaaacaaaaaaaaaaggaggaagaagaagaagaagcgagtcagactcggtcgtatgactcagctgagttggcgaattgcgagttggttccgctgagtttacttttttactaacatatttttcttttttccttttttttttttatatataaattcatttttgaatttattataattatttatattattattaactaattgatgataaaagaattagggtggtagtgagtttgaccgagtcgtcccgagttgaatcggagttgtggtgagatggctcaggctagcttgtaatttgagctattgtaaatttctgagattatcaatatatacaatcaaatgcttttattaatatcactattaatttgttaattaatacatatttccattttcctcacgttttattatttattttaattacaatttaatgtaccagtcctgcaattttttattattattattggaaattaattttttttaattttttgaaattaagtatttttttctgccacaccatttaaagatatttcactacatatatgagaagaaacaactaatgtagttttatatataaaaaa

SEQ ID NO: 106367 - DNA, 533 bp, Cannabis sativa
gaatccaatattacattctagagccaagcatattgacataaggcaccacttccttagagaccatatccaaagaggtgatattatgctagactttgtgagcacccaattccaataagcggatatattcaccaagcctcttagtgatgagagatttagtttcattagaagagagctaggcatgaccaacttaagtgaaatataaggtttgctagctatgaaaatttcatatctcgttacttatttattcatacatattcatttcaaacatgagatttatgtgatctatatgcatagatgagaaaaattcttaacacttgacctatataaactatacttgctgaaaactcaaaattataggtcattatgtgaatttttggtgaactttggagttgattttaaacaagtgaacatgtgaatttttttcatacttgattatcttgtgtgtctatatgtttgaacatgtgaaattgaatgtatttagtatgcctataggtttgtcttgactgaagtacgcatgaaacaaatttttggcg

SEQ ID NO: 106368 - DNA, 1018 bp, Cannabis sativa
ttcatttcccaagtaattacatatttaataaaatatgtctatttaaatattatttattttctgagatattacaattggtgtcatccagttcaaagctacctcaatcattttaatttcttctgcacaagtgatgctgggttctttaaggaatttaattcggattagattagcctcatcaactatgttgcttcttgcaagttgggccaaagcatcagcatttgtattttcttctcttggaattttcttgagaacgtagcttttgaattgtgcatgcatgtcatgcattttgctgaaataagctatcatttttcccctcgggccttgtactctctagacacatgatttactaccaattgtgagtcactacagatctcgatgtgttcagcatgtagctcccgagcaagttttagaccggcaatgaggcttcgtactctgcttcattattggaagctctgaacccaaatttgaccgccccatgtaggtgtttccaacaaggtttaacaagggcaatctctgcaccacatagttgatatatagccgacccatccacgtgtaatttccaggtaggtttgtcttcattattgctcggttgaggttcttgtactgactccgggttgccttttgaaaggctttcttctttcctcatgcactcaactacaaattttgctaaagcctatcctttgattgctatttggggtggaaagatcattttgtattgacctaattcaactgcctatttgagtaacaatccagaagcgttgggtttttataatatttggcgtagtggttgtggtcagtgtgtatactacccaaacaacaggatgatgagcctgaaaataggggcttaacttccttgttgctaagattaggcagtaagtaagtttttctatcagtggataccatccttcagcttgaacgagtcttttgctgatgtaatagatcggatgttggacgctgttttcttccctgatcagcatgacactccaacatgtactgtaatagctaggtatattcctaa

SEQ ID NO: 106369 - DNA, 627 bp, Cannabis sativa
gcatatgaggcttgataaatccttaagagcatttctagagtttccctaagtgtccatatgagggaggaaatgacttttaggacaaaggtccttgagccttttggtcaagctttgtgtgtattattattcttcttattcttctctagctttcttgtaattttgatgaaatacttcaatttgtattttgagtattttgattgtaatcctcctattctctcttgtaatgagaattttccaacatattcaacaatatttttcaagtgaacaatatgacctctatttataaagtttctactctcatttgaacataaataactaccataaaacctttagttgttaccaatattaaattgagtgtgtatagatttaaatggtaatttggaggttatgggattgggagctgttagattcgagcacaacgttaaaaaatggtcaaaagacatgtcacctctcagttagcgacatgtcgcctgtagtgtaaaatcttaaaatctggtaactaataattagtaaccaattttttctagtattttagtaaaataactccaaacggttcaaaactttccacattgactttatatcatttatataccctataaatgatagaaataggtctataataattat

SEQ ID NO: 106370 - DNA, 597 bp, Cannabis sativa
ataaaagtaacctttctctttcttttataaattattaacaaagaagtaactaaatattatatttgaacaaaataagtataccatctaattttatggtttgctacaataaaatattataatacatgttttccatatgttaaaacgatcctcttgaaaagtagattgcggtgatataatttttgagctcaaataattatcggtgttaccaaaaaaaactttttaactttttttaaaaaaacaaaaaggagattcatcggtgaataattcaaatagaacatacataaaaaaacaacaaattagttacttatggtaattaaaatgtaatgttcttatttatgtagtagttgtatgaaacccacagatcccaacggcgacaccgacggcagcgaacagtgggtaaacctaaatacaaaacccaaacccataaataattaggaaaacaaaagaaaagtacagactttatcagaaagatgaaaaaaaagacaaaggagaaataagcctaaattgaaagcctacctcaggcctgagccatcaactggaagccattgattgttgtagcagagaagattgaagagagagagcttcagaattttacag

SEQ ID NO: 106371 - DNA, 1112 bp, Cannabis sativa
aaaataattaaatatttgatatcattaaaaaggagaaaattatggaccaaaatttaattactcacttattttgatgataaacaaatatttaattattatttgttattgatagttttttggctattttacaagcagttcacataggaaaaatatttgctcggtacaaaagcgcaaaataaagtgaatccaaatcaacaataattcaataacctcaacatccataacagcaaaggatacaatccaaaataagacttcgagattataaattcaaaagtcaaatcgaaactcaaagtcaactctaaaaaaaatggtacaagtttaatttaagtgttcctagagtaatatacatagcacaattaatttataagttcaaagtttggtccactaacatctgcaacaagctctttctaaatcacttaactaaaagaaccacatttagaatttcataaaacttaatatttagctaaaagaaaaatgtgtttcaagttggaaaaataaagttttcaatcatcctaaaaattgattaaattatggccatttcggttaactcgttggcctttttggttatccagtttccaatctagttggtcaattttgtgtttatcgattgtacctagtgctatatcaatttttgtgcacatcggctagtttacatttgggctctataaacaacaatttttctcacattaattatggttatgtatgcttctattcatcttaaaaaattcttctaagtgttctaagttaaaattctatcattattttataaacatactaactacacgcacttgaggaaaacttattcttaatttctagtgtactacattctctctaggtttctaagttgtacttcatcatattagagagagtttgccttaatcaaaaaagcttatttctattgtattaggtgagattgacaacaattttgcaaaaaaactcgattagagtgagattggaatttcaacattatggttaagaagttgatagtcctttgaaaactattggttgaggtgaagttggcattggtattgaaaacaatctgatttggtgagattgacacttcaacaatccaatgagaagattgatagtccttagaaaaaaaaaaaaaaaaa

SEQ ID NO: 106372 - DNA, 921 bp, Cannabis sativa
cattgggcgaggaggagctaagtatgcggtagtagcactcgacttttttattaaatggacggaggccgagcccctcgtatctataacctgcaagaaagtccttgactttgtcatcaagaacattatttgtaggtttggaattcacatgaagatagtatccgataatggaaccctgtttgatggcgacttgttcactgaattttgcgagaggaataaaattatcaaaagcttcttgtcaatatcaaggcctcaggcaaatggacaagtggaagctgttaataaagtcttaaaggatactatcaagaagaagtagatgggttgacgagctacctcggatactctgggcccatagaactactgagaagacagctacgtgacacactcccttctcgctagcatttggctcggaagcaatgctgcatgttgaagtgaacatatcgactcacaaaagagagttttataatcaagaaaaaaactaggaacttttaaaattatccttggatctacttgaggaaaaacaaactgagtcgcaaatcaccaacgcagcataccaacaccgagttacaaaatacttcaacaaaaaagtcaagaaagactattcaatgttggagacttggtgcaaagacaagtctttgcaaatacaagagatgcatctgcatgagtgttcaactcgaattgggagggtccatatgtcatcgaagtagtagttggagttggagtttataaattggctcgactcggcggctcgttaataaagaactataggaatgtggaacatttacgaccctactaccaataaataaattgggactagaacttctgctaaggtgttgcagagtggattcttttggccaacactatttaaagatgctagtacttttgtaaaggcatgtgatcgctgtcaacgtacaggtaatatct

SEQ ID NO: 106373 - DNA, 2235 bp, Cannabis sativa
  modified_base (1360)..(1367): a, c, t, g, unknown or other
  modified_base (2165)..(2172): a, c, t, g, unknown or other
aagtgatcatatttcatatcttatgcacttaactctcttgcatatcctaggctgcttgaccctggtcaaatgaatataattgagtttttttttttaattaaaataagaatctctatttctttttcataactcaggaatgactattcacagaagttcagccaatttagaatagaatgaaaaatcaaaattcaaaaagtgtgtatatcttattgagtgtctgtccaaataaaaaacaagaacaaaaaaatggttcttacgatttttctaatcaattcttaattagctgaatgcgttatcctaaaattttagtttacccttgtatcctatatttcaagtttcaacaatatctggaaaaaatgactcatgcataaaagaacatattaaaaaattcttgtttcaaaaagaataaacacagaagaaaatatggaaggctaataaaacttaattatagatttaatctcaattttctagttgcgttatggagattataaatcgtaaatgagaaagaaaaaatgtgaggagagtaactaaccagatctttaaagataagaaaagcgatgacgaaaaaaaggacaaagaggatctcaaactcagccatttttacaaatccaaagacagaattcaccacacgagtaattgctgattccttctggtttctgctcccaagtcttcctggccctgccatcttatcttctactgatttctctgtttcaatgattttccttgtttggttaatcactcatacattcttttctatcttctatccattaaaaagataactatgcaattctacataagccctcattaggatacctaacaatctatcctatttcttatgaagcaagtttctttcttgtgttaaatttttgtactaacaataacaatagcaccagcaagcaacaatcaaaaaaagaaaatcaagatcaagtgttatacaaagtattgcaatcttaatatttatagacatattacataaatatatgctgtcgtgatcataagatgggttttgtaaaaatatttcttggctgttcttgattattgattgacagtaattgtaaaaggattgattttgtagataaatatgtctaacaaaagagtttaagttagcttaattgaatttctgggatgttgttacaactaaaaccaaaaccctaaataccaatcaaatatcactaagatccagagcgatctatctttccagagctaatcaaaatcacgaagagtacctgttatgttctaagatggagagttaactgatttgaggccgaaatgaagagtgttgccgctcgctgctatgctcgccggcggtgttgccgtcgccgagaaagaaaggtcgaggaatgagagagagagagagagnnnnnnnngagagagagagagagagcgtgttttggtggcttttacaaagtaggattttggtaactaatgataaaataataataatttagatttttgccctttaaatttaacttttattaaattatgccccaaaattttgatatatattaaaggctaatttaaatttttctccccttaattttaacatatactgaattatgtcccttgaattttttcaagtcgttaaacatttttctcgaactattaagattgttaaatttaaaaatttttgttcaatattaaagaaagtttgacattgatgcaattgattatcttacgaaatgggttgaagtagaagcgctcactaccataactacggtcaaactctacgagtttgtgtcccaagctataatatatgtcgatttggtatttcttacaaactgatttctgataatggtaaacagttcgattgtaaagaatgagatctctatgcaacgaagtaggaatccgaaaggtatttcctacagttgcttatccttagagcaatggacaaaccaagacaattaataatcagataataaaacatattgttaaagggaagctcgagaaaagaaaaggtgtttggctagaagagtttccagatgtgttgtaatcgtacaatacgacaccacgatcaacgactgatgaaactcccttctcattattttattgatgtgaagccatagtcccgactgaggtaggcacatgatcccttagttgtgatgttttcaacattaacaatgacgagctaggacaatgtcccagggggcgtttggtatgaggtgttnnnnnnnntttgattatagggaatattatgaaggagaatatgattatagggaaatgtgtaaattgtgtttg

SEQ ID NO: 106374 - DNA, 707 bp, Cannabis sativa
attttaattttttatattttgtttattttcatttttttatacacatattaaattataaattaataactatacatgtcacaaatttgagaaaattataagcgtacgagtatttcttttcttatgtactgctattgatagatgacatagatatattttcaaaaaaaaaataaaaataaaaaataagttatatgtaaatatgtgcacattaatgttatatatatatagatatattatatattgcactaaaaacaatcaacaataatataactttatatacatattgcaatactaattatatgtttatatagatagtatactcatgtgagatgtggcataaggtgtttaattttttttgaaaaggctcttttttattaattaagatgaattaacaaaatatatgtaacaataaaaaacttatatatgtgtattgtgtttatttatttatttcttttttttttttatgacttgctttctttaaaatatttaatttacaataagtcaaaaattatttgagtaaattagtgaaaatggcatagttgtaataaaaggataatattatgactagttattaagtaaaatttaaccttattaaaaagatgacatttgtcattaaattaagtagaaagtgcaaaagagagtgtgatagagagtgtccttagcactcctctttccctattggagatttcaacttgaccactagtttgagg

SEQ ID NO: 106375 - DNA, 1101 bp, Cannabis sativa
aggcgcgagcttagggaggccaaggaggcagttgaagattttactgccaagctgaagtccctagaggagctgcatcaggctgattttcagacgacggccaacctaatccttgaggtgaaggagatcagggacttcaaggatcaagccttaaagaaggcgaaaagagatgagctcttgacccccgttacctgccagcattgcaccaaacgcttcgatgatggcgtctttatgacctggcagactaacggccaaaaccttaagctccacttctatccaaagcctgaggaggttctcgtccgcttctgagagaagaagaaaagactcgatgccttgctggaggagcgcagggggcctcgtcttccgccccgattgattaagccaatcgttgatcgcttcttatctctttttttatatatatatatttactccttcttcccccctctaagataatttattatatattttcttaaggggagacacttaaggcccgtccccaggcccttatcttttttagagcttttctctgggtttgaacactttacatttatgcttgaatatatattctgctttttaactttgttaaacttttggcctgttttacatttgtccgtgtgatatgccttactacccccatgagtgacatgaaaattggttttaggtcactcagttttacacacattaatttagaggttgcatatacttgtcgggtacaaatttactttacagagcataaacttttattttttcgactattagtaatacttttagaggtgatcagcattccaggccctaggcaccatggttccatccattctttttagcttgtaggtcccagagccgatttcatcctcaaattcatacggtccttcccaattaggtccaagtagccccactccgggttcttgagtagctgggaagacccttgttaggactagatcaccaatagtgaattttctatttttgaccttcaagttgaagtgtttagccaccttcttttgatgagctaccatctgtatttgatactcatcccggagttcgtcaatttaatccagcacttcttgtaataaagccttgtttgttgctggatcgtaagtcgttctc

SEQ ID NO: 106376 - DNA, 2712 bp, Cannabis sativa
aaattgagagaattaaggaaagaaaaaaaaaatagctttggagagattttagaccgccacatcaccgcctcatacttctcttttatatagatatatagataattttatggtagagatattatgtaacgccctaatttataacgaggacgctacgtgtgtaattttataaattattttagtattaatagatcaattaattattaaaaactctactaaaaaaggacattataacgatactaaaattgtgtgtcgggaatccctttcataaaagttttataaaaggattatatataatgacaagtcaaaataccaatcaaaatacacagcacatacaatccaaaataactcctagcaactcggcacacaggccggtagggtcgatatgtatattgttggagaagactatcacctcatggttgctctaacttttctttacccttacctgcaccatggagcactcgtgattcacagggactcagcaagaaaagtaataaaaaaaatacatgtaataattaattatccatcttactattataaaataatcaaacaataatattctaaagagtaagtaatataatcaatcgtatacatggaaataagaagttatcaaatattgcattattgcctaatgtcataacctgacaccatacatcatatgaccgcatcacgaaatcaggtgagctcgtgccataatctaacaccatacataatatcactgcatcacctaatcaggtgagcccgtgctacatcctggcactaatgtattgcatcacctaataaggtgagctcgtgtcataatttggcactatacataatatctccgtatcacctaatcaggtgagcccgtgccacaacctaacaccaatgtatcatatcacctaattaggtgagcccgtaccataagttggcactaatgtatcgcatcacctaaccagacgagcccgtgccatatcttggaacccatatgtcactgtcgctacctatacaggattgtcgacaaggaaaaacctaacaacaatttcagtttagagtcatgactttatcatggtcacctaggaacaacccaaatacatgtattcacatatcacatttcctactcaggcaagctcatgtcatagcctgacattcatatatcgcatcaccttattaggtgagcctatgccatagcctagcatccatatgccacattgcctaatcaagcaagcctatgccctagcctggcatccataaattgcattgcccaatcaggcaagctcatgccatagcctagcattcatataccgcatcccctaatcaagcaagctcatgctatagcctgccatttatatactgcattgaataatcatgaaagactatgaagactatgtcatagcctggcatccattcataccattgcctaatcaggcaagctcatactatatgctggcattcatatattgcattgtctaatccggcaagttcatgccatagcctagcattcatataccgcattgcctaatcaggaaagtcgatgccagagcctggtatccatacattacattgcctaatcagggaagcctatgtttctcagtcatcgtctaataaaacaatcataactataatctttttaatggtaatcaccatttcattacctcaatcataattgagtcgtaacgataataatcatacattaacatgttatgtggtacatgtatacttttcttacctcaagtttaagttcaggtatattggctcacctacttggagaacgattgacgatctcaggccttatgtcataacaacataataacggtcaaccaagcaatctcaccttataggtcactagggtatccttacttcaatttccaagaaaataggtcactaggtcactaggatatccttacttcaatttccaaggatcccctataggtcactagggtatccttacttcaatttccaagaaaatatttaaaaaaaaaattcaaaaataccaacaaaaatggcgtgccattttttgtaagtttcttgacaaaaaatggccttgacagaaaacgactagctgttttctcaaaaatggcagacctttttctgcaggaacataaatccccagttttgcactcttcaaacaccactgaaacttatccaaatcaatctaaactttacaaggcaaaaatataccatatatacaacaatccttacgtaacagaaattaaaattagcctaaacaaaaatgccattaaagctcggactttgagctttaaaagctcaaactcgatttctaactcaaaactacatcaaattcaatatataaacatcaaaactagtcccatgactacccaaaaatagtttcatgaagtcaaaatccccataactactctaaaccacaaggtcaacatataaaactaatcatttcaacttaaaacgaaaccaatccttaccttaagctttccctcttcaatgaattactatcgcgttactactagggcttgaatcactaggtattggatggaaaataataaaaaaaaatagattaaaggggaaaaatttcattgcaccgagtagaggaggatttcgttcgtactgtttatgtgtttttttttttgtaaaacataatatatataaacttaaactgataagttttggttgggttttgtgcccaaaataaaattcatttcaatataatcatatttactaatcaataaaagattagaaaccagatgcttctggaagatt

SEQ ID NO: 106377 - DNA, 717 bp, Cannabis sativa
tgccatgaaaagcttgtaaagacatttttaattattaaataaagagtaaacttttgatatatgtgtgtgaatgttgaattattaatatttattgttgaatattcatatatgaggttgtggcttgtagttgtgcagagaactaagaccacttagctatgaataaaacagtcagcgacttattaaagttacagaatcattaatcaatggttgctagtacggttcactaatgaccgttcttcagtgcaattaatcttggttcagattacggatgtagtgagacatcaaagtgaaggtactgtatataatataaattatacatgacaagtaccgatatgaatatagttatctttattaacatgcattttatcataaagacttaattcatatcataacgataatcaatagtagatagacctaaatcttgagttatcatgaactcctgttcatgtacaattatgaaatcttgactttcctaacgtatcgaatgttgtttatgtttaagtgttaattctggaactggaatgtctgtgcacaaatttagatgagatcttgaataatacttctactagtaaattaatgatactaaaggataaagaagtaattaaaaaagataaaacggtactttgactaaaattaattatgaaccaacatatggagggctaattactagaattgattatatcaaaggacaccgcagttaaacttactaaatataat

SEQ ID NO: 106378 - DNA, 643 bp, Cannabis sativa
ttttagtgacactccacacgtgtcactgaaacctattgcactcgttttttgcgcgtcactatagggatatattgtcaggttttgccaaactaaaaaggtaacaaccacacacatggagtgtcactatatcctatttttctgttttttttttcttttttattaatatttttagagatatagtgacacacaaaaagttccactatattaaatatttttctacaaaaaataatattttattgtttttttttttccaaattttgatttttatttattacctaatgttattattgtgcattaatatatgaattttttgaatttaattttattttactttttaatgaaaaagacaataaacttaactacaaaataatataaaaaaaatatttaataatttgcacagtttactgtatatacaattcaacaagctatttctagcaaaaaaaaaaaatacaaaacaaaaacaaaatacacaacaatcattcaatggtatgaacgttaattctaatcataataattcaaaaataagatctaaaattcggaacaactactaagtaaatccatgaaaaaaaccaaaaaaacttccaattaatttttcccatcaaacaccgaaggcacaaccccagtcaaccaagatttgaaacta

SEQ ID NO: 106379 - DNA, 1042 bp, Cannabis sativa
aaaacaatatgaatcgttattgaataaatacagagtataagataataataaaaaaaaatcttttatttaatatgttttaatttataccctatactttattattattttttatttaaggacacaagggtagaaaaggttaggggtatttattttatatttaattgatcaataactaattatatgtactgagacattattttttcaacactaaataaaattgattataacataagaattacatttatgtaaatattatattttaatttttaagggtatatttaacaagtaatatatgtttggagtatcattttgtagtgtcataataatttagataatatcaatcttcttttgaatatatgtaaaccctttttcattaattttttccttaagagcactcaccacaagttttttacagtaaagactctttaattttatttttttgaattaaatgtaataaacgtaagatatgtataataaaaatatacttaaattaatacaacttgctttacatgaatgatctattcatgttttgtgcttattttaataatatataatgtttatataaagattatatatatgttaaaaaaatattattttaatattgtagaatgttaaagtatatatattttgatagtgcagataaaaatattaaaaagctaatacatagcctaatgtaaaattttaatataaaatataataaaaaaaataaaattttagtaatatattttaaataatagaatagaatagttgttgagagtgctctcaatcaaaatatctctgtaggtaataaatttatgcttcccctttggtcaatttttactttcttgagttaggattcttagagcaaaaatcactctcaatagattctcacagttgagattttttttaaaagtcttcacgaggaggaaaatgatggtgtaactctttcattagctatagcatctctgaaagacttttttttagcttttattattgattgcgtgaataaaaaagagagagctatccaatttctccattctcttatttttttttccgggagtat

SEQ ID NO: 106380 - DNA, 841 bp, Cannabis sativa
  modified_base (809)..(812): a, c, t, g, unknown or other
ccctttacctatctagggtttcgtcctccacacgctactaaggcctatactgccgaaggacgatctgattatccactaggggggaccttcttcatcgtgcgttgtagagcgactagtgaagacttttgtacgatcttggacacgtgtcgtgcaaaggtcactcctttacaaaatagtctctacacaggccattgggcaaaaagtaagctcaagggtgcgtacgtgcactaccatgatctggcacaggggacaagatctgatcctgtgtcagaaaaaggtataaccatcttcggagtgttattttgcaaggaggtgacatgtccaacatcttcagaacctgtactgctctcagagttcctcagtgaaggatgctgcttctgggagccattgcctcttagtgccttatgtaaaaactgtgttccctctctgatcgtgccacatgtctgattagtgaaaacttggataacattcacccccaagcgttcgagattctctggatcacggaagcttgctattgtcttgaatgttgatcgcgcacacgtattgtaatctgaggtcatggacacctccccaaatgaactgtatttttcggaggatatttatggcatttacttccctttgcatggtaaccacgtggtatgtcaggaggtgttttctgctcctattcgtgtatttataaatcaaataaataactagatgatcacatgaaccaaataacacattaaataagtaataaaaaaaattgtttctttattgataaatgaatataaaagattacattaaaatatagttttatttagggcacaaannnnaacaaactcccacttgcactaacagaaaa

SEQ ID NO: 106381 - DNA, 853 bp, Cannabis sativa
  modified_base (155)..(155): a, c, t, g, unknown or other
  modified_base (222)..(238): a, c, t, g, unknown or other
tattctcttcaccttcctactttcgagtccactcgagtccctctactttttaaaaaaactgttaattttagtgataaatttttagtcacaacataattttttttgtgactaaatgtaatttttagtcacaataaaaacttacttgtgactaaaanatagtatttagatacaagttgtcagtaatttaattttagccacaacaagtattgtgactaaaaatannnnnnnnnnnnnnnnnttgtaatttttgtgactaatacatttaaccacggactttttattcacaacatatgtaattaatcacaacttttgttgtgagtaaaaataaaatttgttgtagtgactcgtcacttttctccattcctataattcactcaaacctaaaaatagagtctatgttgggtccgttaagggttctcagttttcaattatttaagttttaagggctaagaatttaatgcacagtggatgtgtaagatttatagtagttgcgattgactcaagcagacccaaaatatttgggtctgagtcgttaaagttgtaaaagaattcctggatgtatttcccaagaagttaccgagattaccaccacaacaggaaatagatttcatcattgatttggcacttggagcagagcctatttcaaaagcaccatatcgaatggctccagcagaattcaaggagttgaaaaatacaacttcaagagatgctggatttaggatttacccgacccagtgtgtgtcgccttagggagttctagttttgtttatgaaaaagaaggatagaatctttcagatgtgtattgattactggaaattgaacaaattgatgacgaccaagaacaagtatccac

SEQ ID NO: 106382 - DNA, 1090 bp, Cannabis sativa
actcatggttgacctagctcaatccttttacccaccacaaagcacccatgagtcacaagaaaagcagaagcatcaatagtatatatcaacacgtaaattttattcacataaacttgtcaagtcataaccatgtaattatatattcaatccataatttagaaaaaatcataatatttaacataaacaatcatcattaacaaatatttatctaataagataaactaaagttattgcttaataaagtaaccattacccgctattgcctaatgaggcaaccaaggcaccgttccctaatgagaaaatccaatgtcactatcgttgtgtaatgagacgatcgataagtaagaaacttagttttagatttgagtattgactctctcttactttgtttcctaatgagacaaccaaaatagagtaacaactccttcttatagatggtaattatagaatcatatattgccatgctagtcaacttgagtgaaaaatgctcgatgatctcagtcctatgtcacaatgacggttataggtaaaaaactcattttaatccgttctataacttaaactcaaaacttgaagttttcctatcaattaatagcatggcaattgatagttttatggaactaattaggtattcagtggaagaattgtatatatgattataagtgtaccatagccccaaggatctccagatgtatatatattaaatctaaaatataatttgcatgaaaaaaataaatacctcttgatgactatcagggtatccttaattcttttcgtaatttgtattctttcaggttgattagaaactcacaccgtagtcttccagatcgatccaccacacacaagaaatagtgtgtgctactaggataacgtgtatatgtagttcttgtataaacttcaacacatgagcaagagaaatttcttatgtgatacacagtaaaggatttttggtaaacctcatttaggcttttagaaaaattacatacaaaatctcatcaaaaactttgttatgcgatatattcaaataaacccaataaatgttttatttaattaattatttaaattcaaatatatttattaaatcatattt

SEQ ID NO: 106383 - DNA, 674 bp, Cannabis sativa
ttcagacccaactcatgtacttagttatgagaatcttgagctgcaaccagatatgtcctatgaggaacaaccagttcaaatccttgacagaaaggataaagttcctcggactaagaccatagctctggtcaaagtactctggagaaatagcaaggtggaggaagccacctgggagttagaatcagacatgaaagctcaatatccaaatttgttcaggttagattttgaggacgaaatcgttttaagggggggataattgtaaagaccgcttagctttaatttgaaaattagcagataattagggctttgttatgaaagctaattattaatagtgaattaattatttatgatgatttatttgaatttagaatgcattttcatgtcacatatagaaatttcataattttgcatattttggtgcccgacaacattggaacgtggtgtatggcttcttgaatcacatcttagtatttttagtatagaatgacaatagttagacatttgggatgtcgggaatagaagggactttagagtttcccaaaatacccctaagtgccccttttatgccttttagtgttggaatggcaaaatggtctttttgcccattcttgttgtgacagtcagtagtcttgggatccgtaaggggaaacactgggtaagctgtgcaatcccac

SEQ ID NO: 106384 - DNA, 721 bp, Cannabis sativa
  modified_base (210)..(226): a, c, t, g, unknown or other
cactgtgctgacaacactataatagctaacaaattcatatgttcttgacttaatagaatttatacattaaacaatcatgatataaatcatgtgaaccatgcaacataaaatcttatttctgatctttattaactagtaaatctaattttattgaaatgggttttatttagggcacaaaacccaacaccactcgcaaccattacatcaaannnnnnnnnnnnnnnnnttgtgaagaacataatctaccagttcggattgccatacaaaatagtttcagataatggcaagcagttcgacaaaagtttctccgcagtggcacatcctcaagcgaatggtcaagttgaagcagtcaacaagaccttgaaggacacactaaggaaaagactcgaagatgccaaaggaaattggctggaagaatttcctgaagttttatggtcatatcgaacaactgagaaaacggcaaccggacagactccatttgctatggcatatggacatgaagctatgctgcctgtagaactcgagccaccatcccacaggagattgacgtacaaccaagataccaatcacataatcctggtcgaatcacttgatgaaatagaagagaagcgaaccacatcaaactaaaaggttatagcccgtcaacaaaaagtagctcggtatttcaataaacaagtaaaggctccaaaattttttatcggagatatggtcctaagaagag

SEQ ID NO: 106385 - DNA, 553 bp, Cannabis sativa
ctagagaaagttcgaaacaacatagaaaagtttgactatttcaaaattgagcaaatccaaagagaacaaaactctaacatcgatgccttagcaaaactagccttgcagaatgacttggatgaactatactttctttcggtggaaatgttcaacgagccaagtatatgcaaaaaggaagatgtggagatgatagatagctcgcccacgtggatgactcccataatcaattatctactcaacggacaacttccaactaacaagaacgaggcacacaaactcttgtatttagtgcctttctgcacgatagttgatgtcaagttgaatagtgttcttcctgcagaagcaaacgagatcatcagggaaattcatgaaggcttttgtggggatcatgcatgttggcaaagtctatcaataatgatcattagacaaagatattatggccaaccatcaacaaggacaccaatgaatttgttaaaaagtgtgataagtgtcagagattctcgcatatacctagcgtaccaccaacggaactgagaatgatgacctcgcctta

SEQ ID NO: 106386 - DNA, 557 bp, Cannabis sativa
tcaggtttgacacctcctgataataagcggacaagttctgctcgcctaccgcttggcccatgagcggaactcgtaaccggggattgggaggctgaccattagtagtctgcgaagtattcatcgttgggtcatcttccgtttctcccaggggaatgacgttcggcgattgctaacctacagtttggtaggctcttcgtattagcacggtagcttgccgactacaatcttcgatctctgcatggtgacctcttaatgcctgcatctctttatctctccatgtagcaaacatacgcctttgttcgtcaaacgcgagatttactgcagcacgtagttcatcctgatcatgatgcagagtattgttatgactctgcatgagtctgagcgcgtcacggagatttgcaattcggttgcgtctccaatggtcatctgggtgttggttccaggtggaacaatcgtattacagatgccctggttgtgtgcggaactgttattcccagtctcttgcacaccatgcgcaattccagtaacaggagttgtttcaccattcaccacgcttc

SEQ ID NO: 106387 - DNA, 515 bp, Cannabis sativa
  modified_base (82)..(108): a, c, t, g, unknown or other
attccgtttgttatttttaaatttactacacattaaaaatttattgatccacattataaatattatttaaaaattaaaaaannnnnnnnnnnnnnnnnnnnnnnnnnntctctcttttttttttttaattttttttcttcttcttctcgcttaatgcccatccccgtgtgctaaaccggttaccaaaaatccaccaccaccacttagggctgagaatcggtcggtttggtcagtttttttctatataaaaattcagaattcggttttcagtctgaattggtgcaatccaaaaactgaccgaccaatctagaacctatcttaaaatcgaccattttaagccacagtttggtcaatttaaactgcccaaaccgaactttttttttttaaaaaaaaaaattaattcaatttattctataaacacaatattttacattttacaactacaaacatacaaattaattgtttaaaaactaattatcttattcttttaactttaatattagtaaaataataat

SEQ ID NO: 106388 - DNA, 523 bp, Cannabis sativa
gccaattagttttgagatagaattgtattcaccttatcccaaattctaacatggtatcagagccacttgtgatccgttgtgagcccaaagtaccaccggtccaaaaagtcgtttaaggtttcaatacaaccaagctttcaattgagcaagacaatactcactaaagcacactatttcaaaaaagttagaattcatgacaattctaaaaatgctatctttagggactgtcgttaataaatttaaataagtattttaaagagtcgaaaaaaattaaatattttcgatagtttagaacactttttatagaaatagacgacgattttaagttaaagtaggaatttttaattgaggttatacctgacgatttaaaatcgccgggtataaccaagtcctataaaaccttacacactccactttataagtcatttctctcgatcccagcagcaaccaccaccaaccacgctcgtctccacactacaagaaatatcacttttaccagcatatttttgtgctggcaaaagtt

SEQ ID NO: 106389 - DNA, 686 bp, Cannabis sativa
  modified_base (466)..(468): a, c, t, g, unknown or other
aaaattgtaaaagtatttaaaatttcgtaaatatttaaaatttcgtaaaactgtttaaaatttcgtaaaactgtatttaaaatttcgtaaaactgtatttttataatttttttgttgtttttgtatatttgtgaaataattccttatattctttttaaatttatattttttaaggaataattacataagacaccattttttttgtaaaataattacattttcacgttcaaagaatgttttttttttacatttttacggtttccaaaaaataacacgtaaacaacataaaatcaacaagaaaactacataaaagtaatatgaaaataacaacaagaaataacatacagataacaaaaaatcaacaacaaattaacaagattacaacataaaaaaactgtattttctgtaaaaataaaaaaatcgtaaaaatatttaaaattccgtaaaaccgtatttttgtaatttnnnttgttgtttttatgtttttgtgaaataatcccattttttaaaccatggtgtactggcatctcttgggcttgtaccatgccgaatagcggcccatgtgtaaacaataggtaaatacgaaagagaaagagaaagatttttatattatctttttttatttttatcctcttttttaaattctatcatttttatctcgttttttaaatattatactaattttg

SEQ ID NO: 106390 - DNA, 1688 bp, Cannabis sativa
tgctgccttattacataaagacttagcaaataatttgaatgctaagctgtttgatccacgtgtccttgtctggttggtccatgtatattgggcaaaatcaggggcaacagacccaaatatcacgactaggaaactcaaaattggtaagggtttgttgctcaaagtaaaattagctttaataaaattttggagagcaaacctggacgtttttgcttggtcacatgaggatatggtcggcattggtcccactgtaatgtctcacgccctaaacattgacctaaacttttgtcctgtctagtaaaagagaagactactggacaaagaataggcctaagcactgaaagaagaggtaaaaaagactacgtgaaaacaagttcatttataaagccttctactcggcttgggtagctaaccccatactagtacccaagttgaataaaaaatggcgagtatgtattgatttcatcgacctcaacaaggtgtacccaacagactattttccacttccaagaatcgatcagcttgtggatgcaacagccaggcatgaaatcctaagctgtatggatgcctatttggggtataatcaaatcagaatgcatccaccagaccaagaacataaaagtttctaaacaaatatgggtttctactgtcacaaggttatgatgttttgtctaaagaatgcaggagctacctaccagagattcataaacaaaatgtttaaagaccagatcaaacgaaatatggaggtatatgtggatgatatgctcgtcaaacctaggaaggctagggggcacatagaggatctcgatgaatgcttcaaaatcctcaagaaatacaacatgaagctcaattccttaaagtgttcctttggggtcagcttgggtaagtttcttggttttattgtcaatgctcagggaatagaggctagtccagcaaaaatacaagaactcctggacgtgaaatttccaacaaaaacaaaggaggtccaaagcttgagtggttggatagccgcactcagcagattcatttcaaaatcaacagataagtgtgttcattttttcgacatcctacaaggtaataaatagtttgaatggatagaggaatgtgagaacactttccaagaattgaaaagacaacttgaaaagccttccgtactctcaatacccctagttcgagaagaattaggaatatacctggctgtcaccgaatatggggtaagcgtcgtgctgataagagaagaaaagaacgtctagcatccagtctattttattaaaaaaaagactcgttgaagctgaaggatgcaatcctttaattgaaaagctcacttactgcctaatcttagcaatgaggaagttaaggctccatttccaagctcatcctatccgggtatataccaaccaaccattacatcaagaattacaaaagcctgatgcctctaggcggttacttaaatgggcgatagagttttgtcagtacaaaataatctttcaaccccaaacaatagtaaggaacaagccttagtagactttgtggttgagtgcatgggcaaagaataaagcaacataagggacaacccggagccaaaacaagaacccctgctagataacaacaaagaccatcctacctagaaattacacgtggacggatcagccacagacaagctttctggtgcaggaattgcccttgtc

SEQ ID NO: 106391 - DNA, 548 bp, Cannabis sativa
ctgtgacatttctcaatgtcgtcctctacctctgatcctggtgccaccattggtgctaccactgctactccaacaactccatggaatccgttctcgcactcacttacatccactctcacgatcaagctcgactgaaacaactatctttcatgcaaatctcaagtcataccaactgtgattggtcatgaacttgatgaaatcttgttcactggtcaaccaccacccaagaatcttgtcaatggtgatccaaatcctcagtactctcaatggaaaaagaaggaccagttactcctttcttggttaagatcatccatgactgaagtcattcttgcttcggttgccacctacacttcctcctcttctgtttggcgtgccctggagcagaaattttcgagccaaaccaaagcaagattgcttcaattaaaaggccaattctctcgtgttcataaaggtaatctctccatttctgaatacattgaaaaggtccaatctatttcagatgctctaacagtggcaggttcacctgtccaagatcaagatttagtcct

SEQ ID NO: 106392 - DNA, 956 bp, Cannabis sativa
taattaaagggtttattaaaaaatttgaataattaaaattttcataattaaattttaattttaaatatataaatactttatatagtttgagatcccgttttaaagttacaaccgttttcaaaatactatagttacaaaagttgtcacctagtgacttatcaaaatgaagcatgctatcttgaagatctaacagtacttcaggtataaccgccccaatattcagcatttgctatgcctttacctacacgtgtaaacaatatttgtgaatcgtaagacttagtaagaaaagtataatcataacataaacataaaccagatcataactagacgcccatacactcaattacaattctatcctgcatcccatgcgtaccgagtttggaacgtttcatatacgataatatgattgaccataatatcaatctatactcgatactctagtcataccgatatgatagtgtcaatcatactttgccaaacatatattcatcgatattcagtgaaactctatgtacactaatatagctcttactgatatgttatctattaggcaatcataaaacatgcacgctaaacatatatacatatatgcaactattatactagtcttaccttgatttcaaattcaggtgtgtcggtcaatgtaagtagaaactgctgctcgatgatttataggtccctaagtcacaacatacataaaactagtaagtgatacgctaaataacttttcgggaacttaaacttaaaaataaaagtttccctattgatcaatagcgtgacaatactctaaatatcgagaaaatactgaaaacgtaattttgggaaaaatacccccaaaaatgacaaaacgattcttaaaaatggcagaccatatttcctggtatctacctactaaaaacgacaaaccattttaactacaaaattcgaaaatatctcatctctcttagaaacaattg

SEQ ID NO: 106393 - DNA, 630 bp, Cannabis sativa
tctaatataatgacttttagagaacattgctaggaaaaaaaaaaaagcttgttgatgtggaggttaatattagacatctagatgcacatggtcttggagttgagagaaatttaggtagcgtttagttaggaggaatgaaaatataggaataagaatgtgaatgataacaggaatgggaatataatggaataaaatttaaattgcataaaaaaattgataaaaaaaaatcattaaattttttctcatgttacattggaatgatcgttccttctatttcaaaatagaatagtcagtccaccaaaatagtaaaaataatattctatttaaatgacattccaatattttcaaatgcttccagacaaataaatgaaataaaaattattttctttgcattctattctatttcattacatccaaccaaacgccacctaaagattttcaagctccgattaacactgtccataagagcaccaaatacgttgtctctcgtctgaacaacaacatatggacatcgttaatacagtatattattatcaatttctattttacacaaatagattaattacacataatctaattttttttattatttccaaaaaaatacttatatataattatatatacatatta

SEQ ID NO: 106394 - DNA, 1203 bp, Cannabis sativa
  modified_base (361)..(371): a, c, t, g, unknown or other
agttcaacccgcccaatgattttatcggtttggtcgggttaacccgtccaaaccgttcttcacttttttttttataattattattcttattttgtaatttaaaaaattagatttgaaaaaaataaaaatatattatttatatttcaagtgaaaattttttataatttaaattaattttaaaaattttaaaataagataaatataactgagtaaaaatgaaataattgaataaaataataaaaaaataataatattgtatagattttaaactttaacttcaatatctaaatacaataaaaattataaagtctagattttaaggtaaacactaaaatatccaaattttaaatacaaaatagtnnnnnnnnnnnatataatttatgtaatatattatacacttttataattaagaaatatattaatcgatttaatttggtttattcgagttaattaggcggtttagaataatttgtaaaccacccaatatattcattgggcggtttgaatttttattgtattattttaggttgtattttttgtcagtttatttagtttggtttggacagtttattcgggttgagcggtttgtaaattttattgaacaccccaaggttctactgtaaatttctgtagctgagaaaatggagctaatgggccaagttgtcttacagttgagctaagccactgataaatgaaagggcccatatcattcatttgattacagatttatattcgaaacagcccaccagaagaggaacgtacgaatgaaaatcattcatttcatttttcttctttagtgaaacaaaaatataataaagtaagattgaaaaaaatttaataaattaacgtataatccatgacttctctaagttatttacaagattaagcatgcaatcaatattatattttagaaggtctcttaattatactataaaattaattttaatttaatgttgttgataatattcatatatctatttctattctatataaaatgtggctatataataaaattcttagtttataaaaaattattaggtgatttttttttaatataaaaaaaatgttgcacgtaaagggtcagcatccatgtttaatccacgtaaagtgttcaattaataataaatttgttcatattgtttatttttttttattaaaaattattttcaaattttgatatttagaattagttaaattttaaat

SEQ ID NO: 106395 - DNA, 618 bp, Cannabis sativa
taggttgttaatccaacatactttttagtaaatctagatcttggtaaaataattcccaacaggtcgatcccacaagtttttagcaccgttgccgggaattgttagttaatattaataaaaattaaattttattctaatttagttttcttcaattttagtactaattttgttggtttcaaattttctcctttctcaggttcaactagtttatgagacgtcaagtagggctgcacatttagacccgcaaactcgaaaaacccaaccacccgccccgacccgctgccaaaaaaatcgaccacctaaaaacccatatagtcgggtcggggtcaacccgaaaaagactataaacgggttttgggttcgggtcagcttaattgatttttttctggtcgggttataacccgtaacccgaaatattaaaatgtttttttttattaaaaaatcaataattcaaataattaattactaatttaatatcataaaatttttagtaaatgcctattcgtattcttcttctgtaataaatactattcgtattaattatgataaaactcctataatgcctattcctattctttttgtgtagtaaatgttattttaatcattttcaatttcaaa

SEQ ID NO: 106396 - DNA, 1273 bp, Cannabis sativa
ctaagacaattaattttccttttggttgtagtacataaaattgagagtttttatcttatatttagctgaggcagattaaactatctgattccaattgataggttaggaaattagaagcacattaattagctttgaacaagtacttggttaaccgttacgaaaacactggccggaatggccacattggactcaataacaactcgattgtctgacgaattgcgaaggacatggttagggaatccagcattgggtgtgcttaaagtgtattgaacatgcctaatttgattaggaaaaagaagaactccactgaagtctactgtccatgatgttccattcccttcagcagctcccttagcaactgtggccttgagcttcattcccttcacattgttcctgtccacaaaaacttgatcaatgtccttaaatttccctctagattggtccaactgaacaatctcaactccttttccagacccactaaacatattgtccacaatgttgaccccattagcaaccccatttactgatttcaggataatataagcatccccaaggaagaaactgttggagaccaaaagctgaaccggatcttcagcaatgattcctgtgtaatccaagtaacaattcacaatcctggtttgtgctaagccgggaagtttcaagtaaatcccagtgccaccaaaaccagtggccttattatacaaatggactccagagagtacatttgcctggccagagatcaaaattcctgtggctgcagaaaatatgacaacatcagtgacagcattgtcattcccatccagagtgatggctgtgccagagaagttgcgctcccctggatcgccacccgccgtgatgtgctggccgaggtacgagtttcgaatgtaggtttcatggccttgtcttacttcgattccattagttgtgaaatgcgtaatgtaacagttgtctatgctggttcttaatgagtttatgactgaaatggctcctcctctgtagtttgagtctaacattacatcttttatggtaatgtactcgtaattataggatgaagaagaagcaagttcagcatttagtgtttcgttactctgtttagctttcgatgatgatgacaaatcaatcaagtatccgtctagtgggaaatcattagaagctttcaatgttcccccgtgaatctgttttgttaaattaaagtcacaattttaatctacattcattcattcatatatgacacaaaataaatcatataaaaataatttgactcttcaaaaga

SEQ ID NO: 106397 - DNA, 682 bp, Cannabis sativa
ctagcaacaacaataggcaggggagtgggaagaagggaaagttcactagcaagactgaacaaaccccccgggagaatcaagccaagtacactgcatttaccatcttgactgaagatataaaaagtgtttacatggccactcagtcattgccccgtacaagaagcctgcgcccatgaaaaaagacgtcagcaagagagacatgaccaaattttttcgatttcatggagactacggtcacgacaccaatgaatgtaataatctgaagcgcgaaattgaattccttataaggaaaaataacccgcatttacaaaagtatgtcaagaccgatcaaaatcagagaggtgataataaccaagacttgctacctccaccggtagatggacatctgcaagtcatcattggagggccacacatagctggagattcgggaaaagctcgggagaggtatgcccgaacagcacaatatgagcaagaagaagtgatcatggccgtagaagaaaggaagccctaaatcccacgggcaggagggcccaccataacattcaatgatgaagatgccatcaagatcaggttttcgcacaacgacgcgctggtcatagaggtccagatagcaaagaagatggtggccagaaccatgatagataatggagcctcttccaacatcttattcaaaactgcctat

SEQ ID NO: 106398 - DNA, 1089 bp, Cannabis sativa
  modified_base (683)..(695): a, c, t, g, unknown or other
atatgtattttaaattttatttcacactatttttattcttatttttattttcattatcttctcattctcatgttttcattttcccacctgcataatgttattcagcgaattttggtgtgcatatggacaagaaacgtacacagaaatgtatttgaaaatagaagagcacatgatattatacgtaacacatttaaatggtactttaaatctcgctaaaagagaataagttttgtatccatatagcttccatattatttatcaagcactatgtattaaaaaaattggatgagttagtagtagtgcttaatacttgaatatatatatatatataggtgcattcttaatagttattatttatgaatgggtaatattagaaaaaaaataagtttttatagttaatttttttatttaattagattttttattattatttttacgttatatggaatgagattgttccatcagctaaaaaaataataaaaaaaaagttttcagcaagaaaaatagtaaaaaaaaattgagtttgacttaaatatttttcatataaatatatttttgatatagtgtaaaaagaagtatttttttgatattttctttaattaagtagctaaatcaagcatagaaatttaaatttctgttttattattcgctatcagactaaaatttaatggtttaatattttnnnnnnnnnnnnntatagttaaatttgtttagtacccatcaatgggtaatacccattaagaagtatatatgggtccactcttaatgaatattactcatgaatgggtaaaattagaaaaatttgagtttttatgcttaatttttctatctaatataagaaatttatcatttttacatcatatgagctgagattgttccatcggttgaaaaaaaaattaaaaaaaaaaattttaccaaagaaaaatataagtgaaagttgagtttgacttatatatttttatatgagcatattgttaatataatatgaaaagatattttttaatattttttttattaagtagttaaattaagcatagaaattcaaatgtttcttttattattcgatattagattaaaatttgatggttt

SEQ ID NO: 106399 - DNA, 581 bp, Cannabis sativa
  modified_base (117)..(117): a, c, t, g, unknown or other
ttggcaccatccaagaggaagcccgcatgaaggacatgatcatcgagggtgtaacatcctactagtttaggcgtgttaacgtgatttttaatttaattgtgcagctcgttgctaatnaacgagtttattgaaaatcgtgattaaataaaacgttatttaaatatttataaatatcaaacattatacttatatatagtactgggatcccgtttacaaaatatttacaaaagtttcataatacataatacaaaagttgtcgcctagcgactatacaaaatacgctcagctgtcccaaagaccgtacaatccaagcctaactgcgctgacatgtacaatcttcatccgctcgctctcacagttgttcatcccaagccttgcccttacctacacatgcaaccaataattgtgagtcgacagattcagtaagaaaagcataatcataaacataaaaatatattcaaaccgcaaccacccgcccatacacctaatcacaatttactaactgagttaggaacgttctcgacaaagtatgactaactgcgaatccagcctatactcaatactctagtcgtactgatgtg

SEQ ID NO: 106400 - DNA, 679 bp, Cannabis sativa
ttaaacaaaatcttaataattgttttaagaatttaacaattattcataaacattgaattttaaattctaagtatttatgtggtatgatctctttgccgtgatgaatataccatagatttcgtatcaataataaaacacaaacacatacaaacatgataaacatttaaatataattggtattgacatacacaagataaagaaaaatatgaagctcaattcataaatgcaattcataactaaaagtgaaaactttattaatattaaaaaaaaaaaactgaattgtctgcataaatatgaaatagggaataaaatcttaaaccaataattgaaactaaattgttcataaattgaaacaattaaatcaaaaatataaaagtagatttcgagcttcatcttcaatcttggataatctccacccttctgtccaaccatccgactcaactcgctaggatagcaatccaagtttaagcagttggagctgaaataagaagaaaacaaacatggttagtagatctagaattaatatccagggggataataattctctaaaacacatcagtttatagcatagatagaaataccttgttttgtctctagaaacttagagcattggggtttcaagtggcccttttcattgcaatagaagtattttcctttttgctttgcctcgggattagca

SEQ ID NO: 106401 - DNA, 666 bp, Cannabis sativa
tggctagtttaattttagcaaaggaatttatttcctaagccttatgtaattaagaaaaaccaaaggaaatagaaagctctctctttccttccctctctctcttcgaacccagctagaacaagagggtttgctgctgaacttttgtaatttcagcaagggattcaagagaagtcatgccaaagtaatccctagcatctctaccccttagttcttgaagttttttacttggtttaaatatgtgattttgagtattagtggctgttagggttaggttgagttgtagttcgaattgtagggttaatttgagttggctttagcttctaacagctggttttgatgtttggattaggttttctgaaagtttgagctttgagttcaaagctttgatcactaatggcatgttgtgtttcattgggattttctatgtaatactggttggaaaatgttgtttgtgcattgtttaggaactctggaaggttcagttgttttggtagaggattgagcaagaaatgaaaagtttggggtgaactggtacaaaccggctagccggttttaccggtacttgtaaaaccgtctaacagggtccccaaatgcttcatttttctcgattctcatccatttcgtgtgccatagttgggtgtttccctatttccagagttagagtaa

SEQ ID NO: 106402 - DNA, 500 bp, Cannabis sativa
ttaaaaattaaaataatcaattttcaaatttaaacctcaaaatatcaaaaaataataataatctattaaaaaataaatattattaatttagaatattttttttttaagaaaaatttagagtattgatatttaagtttaaatgataaaattaatattttaattagatattagggtttgaaaattcaaaaatttgaaatttgaggaaaaatcccacaaaattcgggttttggggtgtggctcccgaggaggctgccagatgcccagacgcgcgcgtggagaggggttgtagcaaggtcccgtgtgcgggaaacatcagcgcctgcaacatgcacacgggcggcattgcagggtcctgggcgtgtctgaaggcacctgaccgaggatttcagacaattcttgtctgaatccgcgcgtgcatcacctcggctcgtctgagttcctaatgcgattgagcacccactcgacagccatggcacccaatcttccaaaattcataactt

SEQ ID NO: 106403 - DNA, 1422 bp, Cannabis sativa
ccaacaaatctcttggggagagtgtgtaatgaccacatatttagatatggaacttagtggtatttttatgattgatagttaattaatgttgattatgcatgctttaatgaaaatggggcctattgtcaaaaataggtgttttgagaaatattttctcaattttggtaattttgttgagttttagatgtattatatataatatatattaattatgttatttgtatattttatgcccagtaacagtagaatgtgacgatttggctattggtgtagtgatacgattgtgttgatgcggttttttgtcaactgatctaagaagatcgtaaaaaaataagaggactacgatgagttaatttggataaataaaactataataaataaaatggacacccaggatttatagtacttcaccaccatgtcgtgatggtaatggggttacgtctactttatttttattaattggatccgacataccagatttatgttctcaagagtgtgtagaaaataatacaaaaatagatttccaggtgaaatctgtatcgagacttatgaacacaagactcatgggagactcaatattcacaaatttgataaagatggtggttgtaaggctcttgtgaacaataaactaatagaagtaagaaaagagaatagtctctattcttgaaaactctgtatgttaatggcatttgagttatggatacttggtgtcgacaaagtatggaggagtaaatgaagggatgtaattttcttagtagtcgtccagtaagcaagcgattcatcctccataaccagaagatcacctcgcgatcctaatgccaataaaaggatacggcgagatgaattatcttctaacacgtagcttttttttttaatcaagatggacaagaaggagcaatcttgtctatcgagacacaaccttccaagtcagcataaccatctaattgataaaaataaagagcggttgggtggttattagatattatcccatgtctggttaaatgagacgtgtggattatccacgtttcatgaacacttatatatgaatcaatcccaaaaagaataacggccaacctatattcctataaataggggcaaaatccatgggaaaagggacggaaaatttgagagaaaaatattattattcaaatactgatattgtattctatactcaacaaatattcctaataataaggacttgtagagtatgtaaattttaactacaaacccacgtaaaatatctggcattatttcatcatttattacttatttatttttgtagtgaatttattacgaaaaggctatttaatttggttaacgaaaatctcgttaacaataacaatcattgatcttctacagacggtttacattaagtagggacaaaaactgccattttaccattcaatatattttatccttaaa

SEQ ID NO: 106404 - DNA, 1998 bp, Cannabis sativa
  modified_base (1805)..(1813): a, c, t, g, unknown or other
  modified_base (1936)..(1964): a, c, t, g, unknown or other
gtaaaaacaaaggctttgccacagtaataaaggacacgctcgatggttctggccagctgcttctcgcaagaatcggcgtttgccttcggagatttcttgcaagaaacgcctgtagcgactagcaatatcttcctgttcggttctcactacgtgttccctaaccctagcatcgttcaactctaacttgggggtgggttttgaaaggttgggtttatacgggatggttatttctttaggaaactcaaactctaaaacttctggatgataaattcctgaaccagagtgggacattgctgcaagcaaaaagtagtcccaatccctggagagaattttatcaaaccggaaggtaatgagttagacatcttaaaataacctacatactgcctgaaccctagtatgaacctagataccgtttaaatcctaaaaactaccaaaacccgatgagatgacaacgatacaaacaaactaagtaacaaatccacacaatgtaacaaacatgagaaagaagaatgcaacttacagtttaaagttatggcttggggcaatgacttgttactccgtctgcaaatcttcgaacaaagcaaaaagttcaagggcaggaaactcgcaggaaaaagttcaagggcagagatggcatgcaagcccttgcacaaacttgttcgtgatccttgacaaagaaggttaagagtttttttagactttttaaaatggagaaaataatgcaaaggctgttccttttctcttactttatacccatgataatggcttagttagatcagagaatcatttgatcctacggacattatttaaagcagaagtggaaaagatggtcttttaagtatgatgtacctcaaaactgcacaaccgccaaaatcaaaggacatgcgtcttttcaaaaagaggaacatgacgaaaataccctttataatcattaaaaagctcttttaaaaaaataactttttaagcggcaattgttatacccaaaattcggtgagcacatcataggaagaaacgtgtcgagctaggaagaacgaagaactcaaacacacaatcgtaagtacacttggcatggaacaactcgttcgaaacacaatttgcagagtacgtttataactcggctggctgaatagtcttctgcgagacagaaacgtacaaactgctaacttatgtatcaacgagaaaccatgtgagtgcaactgtgaatgacgatgcctcaacctcatcacgtggaagagaaataataacgataaaaacacttagcgtagattatatggtatacaaacaaagtataaacagcttggtggatcaagatgacagacagcgaggcgtctatctcgcttgaacatggcatgcatacgagaaagatcatctcgacactagaaaatttagttattagaattaaagcaatattgatttcgggaagtcatatgacgagccacagctcgccatcaaagttaacttggctcaatacctagcgaagcatccccatgagataatgcttaccgtatatccctaaatatgcattcatctcagcccaatgaaagcaggatactcacagttgtgtggattataaataaaatctgcatttacttagcctaatttgtaataaaatcccatgatttaagggaataattgctgtaaaaattattgtcaacttttgtaatttactggccactatttaattttaaataatggcaaacaagatgaaaaaggggaaaaaaactcatacacgagaggccttaaaaatcaatcaaaattatgaataagattgactcgtggactatgcaaaattttaactgcaaaannnnnnnnnaaaccctgtgttcatatttttattcctacaacttttatttttcagtatgaaatcattactgagaggctgaagtttggttaacaaaaatctacgttgacacttacattgattgcagcggaatannnnnnnnnnnnnnnnnnnnnnnnnnnnncccttgattcctttttgtagcatagcattatcaa

SEQ ID NO: 106405 - DNA, 1059 bp, Cannabis sativa
gccctgtcttttcacgtactgttttgtcttttcacgtactgtttaaaacttttcacgtactgtttaaaatggtctcgagcgatgattaaaatggtctcgagcgatgagactttctatctcatctttcaattggtgacatttgtcgaccgtgtgcccaatatccttgtggaatttacaatacctgttaggatctcttttgctcctcgcattcctcatgggctcaggcttgccgaaggcaaccttttgctcatgtgcgaggtaaatattctcccaagtttcattaagctccacattaatagtatacactggcacgtacttatcgtgcttcttttgtttctttttatcctttgacggttccttggaactgtcctttctctttgagccagaagcccccaagttatcgattcttattgaaacactacttgtcgaaacgtttttgggtttgtctctcgagcctgttttcaaaaaattcatttcttttcagacttcttgttttcgaacgaatacctgagccctttcgttgaactcagtgatgtttcttactggacgaccctgtaagttgtcccacaactcgccctcagtgattgatggattcgtagagatccctgcctgtagggctgtaagttgtgtattatcatccaaattcataaccctagctgcagccgtgctaaaacgacttaagtacgccttaagtgtctcactgggttgttgctttatattggttagcgaggtcgctttgggtcgtctatccctagcaacctggaactatttcttaaaatccctggatatctactcccaggaagttattgaatggtgagtaaacttgttaaaccagctgcttgcggctccaataagcgaggtgggggaacaagatacagcgtaaattattcgtcacattactctctcgcattattgtattgaagttgttcaaatgcgagatcagatcagtggtttcgtcatacgacgagacatgcggggtttttgaatcccgaagaaaaaggggtattcataatatctgggtgatacggctcaagctcctcgtctgagtcgtatccagat

SEQ ID NO: 106406 - DNA, 694 bp, Cannabis sativa
  modified_base (174)..(176): a, c, t, g, unknown or other
  modified_base (303)..(304): a, c, t, g, unknown or other
gttcagaacatttgacttacatgcaattgcctctgaacgttccttggtcgcttcttgggtcggcgaggaggtttgtgacctaatagagagatgaaatcttcttcaatctctttctttgcgagcttctccggtggcaataccctctgagatgtagcaaaggagtttaagaacccnnnaaagaactaataagaacacaaaaaatgataataaaagcactaaaataccttggtgatgatcttcaaacaataaaagagaactgaaaagtgatttgtggcctgtttggagcttctttttgattttttnnagctgaaagtgagtttttgtttgtgaaagtgaagttctttagagctgaaaaagtttccttcactttactaaatgagcgcaaaaaccaaaatgtttgcaaccggttacaaccggttgtacttcctattttcaagtcaaatacccctctatttatcaaattaaatattatataaaaatgatatatgagatatctaatatcagcctttagatcaaaatcaagacaatctaatggctattaatggtgtgcgacactagtcactcaaaaaacccatgtgtgacaacagccagcccctgtgtgtatatatatgtacatatatgtgtatatgtaaatgtatatattacatatataatatatatacatagtactatacttttaattttatttagttaa

SEQ ID NO: 106407 - DNA, 670 bp, Cannabis sativa
tatgtttctttttcaagtgtgttctgacatgtgggcgcggtatagtcacaaccgggtattacgggtcgaaccgaattcagggccgaaatacaattctgggattatttattggcattataattatatgtgaataatctgaatttttatttgagaagatttatgttgtaagtgaccattttgcccttgtattggtgcttatgtgtgttagggccctaagggcattacggtaaattggcttatttatgttaatggtagtaactgggattatttgcaaattaaaagattcattttttggtttttgcacctcaaactcgattccccctctctttacctctttctctcaaaacctatttcaaaattggtgagttttggtgagaaattgcttgaggtgaagcttgatagttgtggatcttggtgcttggttttgagattgaatttgaggtaacttttcatagccttaatatgtaatttgtagctgtagtaaaaattgaaaaaaatgtttttctaagctttgaatattcttgatttcatgtgtgataatggtgctagatgtgtggaaattgtgttgtgtgaacttgctcatgtggggactttcacatctctccttgttggtgtttttctaaggctattgttagagattaaattcgatctttggctctaattttagttg

SEQ ID NO: 106408 - DNA, 507 bp, Cannabis sativa
ttctccggccaaggagtcgcacctttaggacaaattcgtctacccctcactgttggacaagctccaacaagcatgactatcatggcacaattccttgtattagatgttcctttagccttccacgtaatgctaggccgactagccttgtatgacttaaaggctatcacatcaatattcaactcgtgcctaaagtttccaacaaagaatggggtagggtgtctgagaggaaaccaggagactgctcgggaatgttataaccttgcagtggccaaggctaagaaggaaatatcctccatccagagcacagacaagggaaaaaacacttccaagtagggagtttcccaatgcggggatgaagatgtggatcctcgacttggtgacccaagcagcaatgttggacctgtggaagagttagaagagattgaaatcgatcttgatatcttggccagaaagctaaagatcgaaaaaggtctgacaacaaacctagacgttttttcctggtcacat

SEQ ID NO: 106409 - DNA, 1295 bp, Cannabis sativa
atcaagaattatttgtaactcatttctaatacaagtattgcatatgtaatttactataaaaatttacattaaactaaaagtacaatagttatatttcataaatataataattaatcgaatttaacactttgaaattcaacttcaaaaatttattttgtttaacgtctcttttatacatatattttttttatgtaacaaattaattttgtaacacactatataaacatattttttctaaattaattgtactataaacctttttatatgcatctatataaatatttttgaacttattaacaaagtataacttatacaagttttttctaatgaacttgtactataaacttttttatatgcatctctaaaaatatttttaaaaatataataaagtgataagtatgtatatattgttttttttaaaaaaatatattgttgttaccctatatattatattatttttctaactatataatatgaaatttatagatttaaatagtatactacaatacatattttagaatttacaaaatttatattaaattttaattccaatatgcacacactaataaattcaaaaaaattataactaattggacaagattgagatattcaattttaatcatccatggcaaaagaatgtgaatgtaagagtactttatttataggttagaaatacaatacacacatcatttgcaaaccatgtgggacttttgttaaaaaaaaaaaaatcacaaaattatactaaattcaataattttaataaaatagatatatttatacattttatattttaaaaaaagttaataatgttatacttatatgtatataaaattatacaccacccaaaataatttcataaacttattattttattctgcccaatatttggtattaagaatgtgagaatatcacaatctaatttatttttttctaacttttatcttatatgataagcacatgatacagttataataaataatatcatgtaaatgattttaattttctttagtatcttgaacttattaacaaagtaaaacttacacatattttttctaacgaacttaattgtactataaacttttttatatgcgtctccaaaaatatttttaaaaatataataaaagtgataagtatgtatatagtgttttcaaaaaatatatattgttgttacactatattatttttctaactatattgtaacgcccgtatttataatttactaagctcaaaagataattttaatatattataactttatagacatatgggtcgggatcccgagtatcaaaatatga

SEQ ID NO: 106410 - DNA, 1060 bp, Cannabis sativa
gctaggattttatgccttagtggttggtcaaaccccaagacccagtctagtggtcagccaggaaccctaattccaggcatagactagccagtctaggggtacagccccttggccgggcagtgcccttgatagccttctttggccagtcaaccctcaaacaaggcctccttgggcagacaggatctgcatggatcagaacttgtgtgttttcaagaactcaaacatgatcttcatgttcttcatgactcaaagagccaacgatcaaaacaaaagtcaaattcagatttttttcgtctagaaatcacacattatgtatcctaaggctatcatgcagatcaaaataccgaaatgataacaatctaatgtgagaatcaaagcattttcaaagcaaggaatagtgttcatgaatccatagcaaaatcaaccaaatcaagtgaaatatcagcaatggaaagcttatccactacaagatgttgttgaagaagaaggtgggaagctcgaattgtcgaaatggcgcaaaaattccagtaagatgacacttatgggttcggccctctggagagaaggatgagttttttctaatgcaaatttctagtgagagaaagtaaaaagtaaaaaagcgagaagtgaaaaaaggtttccctccaaaaagcacttatgtaatgcatgtgggcccctttcttcacctacttccactacacaacaaaaaggaaactaaaggagttatttttctacagcaatgagatcaaacattcaatacaaagtgtttcaaaaggctaaaaatgcatcaacttttatttagtgaaggctactgatgtcgaccaattaattacactgcagtcgcggtagtaaacaggctatatgtcgtatcacaaagggaggaaaaatacacttaaaaggacagttagtaattttacaaaaataaggatcttgaatgtgataagaatattgagaaaataatttttgaaaattaaagaagtaattaaaatgagaagttctcagaaaatgattatggaagacacaagcttcgtacatgcaattatgttttcctaataaaatt

SEQ ID NO: 106411 - DNA, 532 bp, Cannabis sativa
aatacttatactttttgtagtgatgttttatgtatggacaatgtttgatcttattaattaaaaaattatattgtaaggtttttttttttataaattatgattatatagtttttttaaaattaaaattttcatgtgattatataggttttttttaaaaaaaatatatgtcaggttttgtaaagaagtaatattttatagtaaattcaataaatataaatctatatatattaaatttttttaaataaatattaatgttttttaatacatatgagttttctttttttaaaaaaaaaatatatatcaatttttttaaaaaaatatatataaattgaatatatttaatttaattttttaatcatattttaaaaataatggtatttttgttcaaaataatttattccattatatagtcaaccaaacataagaatatgtattcaattattgattccataaatctaaccaaacaatctaatcctatattcctattcttattccattccattaccattcctattcttattcctattcctat

SEQ ID NO: 106412 - DNA, 795 bp, Cannabis sativa
  modified_base (248)..(262): a, c, t, g, unknown or other
  modified_base (310)..(327): a, c, t, g, unknown or other
caacttgactattcaacctaccaaatctaattttcattctctaccaactagtagatgagaaagttccttccatagtgatttcagcctccttcattatttatcaccattcgaacccttgagtaatagagtgccatgcccacacatagcaagttaagtactcaatcatagtgagtaagatggtggtaaccaacccgaaggagagaaagagatcgaggtttagatcttgataatgctctgctacaaaaagnnnnnnnnnnnnnnngatcttgaacgaaaggagtcattacattccgctgcaatcaatgtaagnnnnnnnnnnnnnnnnnngtgtttaatttcattgttttagacatattcatatttaggatgttaatcaacatacttattagtaaatctggatcttggtaaaatattcccaacaactagccttagagccatggtaatgatttactttcatgaagtatggatttaaaatgatgatattgtttgttgtgttgatttggatgtgttcatgttggtttatgtgcatatttgatgattgtgtggaaattatgattttacaatgataaatatttttagtttcgtttctaaaagtgtttgttctagaaattagatgaaaatttaataaatttaggcttttatagaacttaatttggatttttattgaattatttatgattttttgaagtttttatgaaaatatctcaaacctattgcacttgtgcgcgcgcgaacaagcatcacgtggccttcacacggcttcagataagcccataacaaagttttctcagacta

SEQ ID NO: 106413 - DNA, 1140 bp, Cannabis sativa
tgctcaagttatggcgtagtttcagctttcctttaaagaaaccaaaagcttgcgacacaaatcaatagaaattccacggatgtctacacctcaaccacatggtctttatcgtggcaaaggatcacttttgaaacttatggatggaaatatcgcttgaaagatcagcgcgacttcaaccctcccttttagatggaggaactacttgaagtctgccacccaacttggtcgtatcctataattctagatatgaaacctcggcttaaatttcagttgagaaaaggccttcccccgtggaagctgagagaccactgccgaatttatcctagcctctatcaacttttagaaagattcccctccaagtggccatagaagggaagggcacagtctagatgttagcatgagttacgcctcctgggaagaggtttggctaaaaaacacgcactcggatctcctcctcgggaccaaggagtagtcaatgttgggtcttaagcaaatgattgagaatttggaggagcccaaatctctcaactcatttggggggtagtatgcccagtcattggtaactgcaatttcatacactcatttgttaaggtcattagctcaacatgcatatgtaaccaaaaacaagaaacgtttacaaccaagtttcttaagggaaaacacccttgaattccttcttcaaaattaaaatttaaagataaattcggagatgaaatgcatattgggcaaagattcttgagaaaaaacattcccttgaatcccttcttatcgaccacagtggatttcctaaagcttagtttgtcgggttttgtaaaaaaattaaaactttatcctggcaagggtcaaagtaagaagaatgcataaaaatcgatatggtttcgacttcattaccgaaccagggaaaatgcctaaagtctagggtaactgcatgcattactcccaaaacccaacttcataaaggtgtaggagcctatgagatgtctgaagaacaaatattcccccttctgcaaaggaagtcatctccatgctaacacttggtgagcggttctcccaagtgggtaattagttagcgaggagaagcattacgacaagaaatttaagtccatggacgaccctaaaatcgactaaaaaaaaggcaaa

SEQ ID NO: 106414 - DNA, 546 bp, Cannabis sativa
  modified_base (278)..(281): a, c, t, g, unknown or other
  modified_base (310)..(310): a, c, t, g, unknown or other
tccatgcatatggttggttatattgcactttgatgttattgtttaatcattttatattgaaatggataattcgttatttcatgtattcttatttgttacttttcttgccgagtctttgtgactcacaggtgctctgtggtgcaggtaagggcaaggaaatgttagagcagcaatgaggtgacagtcttctccagcaatgtacatattaactccaccagcctgtgtgccgagttgccaagagttgttttaggctctattgttgggctttgtgccctaannnnaactctatttcaatgtaatcttttctatncaattatcaataaagaaacaaatttacttttattactttaatgtgttatttggttcatgtgatcatttatttatttagttgattaataaattcatccaaatccttatcacactgatattcttatttattgtgttgccaacacagtggaaagtaaacaagattgtatgattaattgtactcctatatttatcagtacacagggtttaactgttatgataatctacaacgtagtttac

SEQ ID NO: 106415 - DNA, 691 bp, Cannabis sativa
agaaaaggaaagtttagctccggttttctcttcaagaaatatgatataagaaaatgggaaactcacacaagattagaataaacagttggttaaataagaataaatgtgtaatcaaaacttaccatttttacctcaattttcataaatagaaaagctagactactttcctttcaagtttagatacacaaaatatggtaaccaaattaaacactccagccaaaatatacaataaataataaaatatttttgtcaattaaatatactaaaaatggaattaacaatctccccctttggcactttgattgataaaatattttattatgagaaaacctgcatcaagtgttagaaaccaaagcaaatagctttttttaaagataaaagagtatagaaaatactccccctgcatgaaagcactttaacacgtaaaacaaagaattttttttggacggaaaagcttacaaatcgaaaacaaagcaactttttaaacggaaaagtgcacaaaccataaacaaccaactccccctaaaacccagggtccagagttgtaaaacaaaaaccaaaaaataatactataataaaaaaatagtactactccccctttttgtctattaaggagtcaaagataacaaaaaaacatgaacaaagtcataagtttaagcatacatatagcaaaaacaagagaaaaagaaat

SEQ ID NO: 106416 - DNA, 950 bp, Cannabis sativa
ttgtcacaagcttgggcacactgttctcgactggttttatcgatttgataaaagctttacaggagtctttcccacatcaagttctcccaatgctcaagctaatgtagctcaaaccaatcctgttgatgatagcaactggtatcccgattctggtgcatcaaatcactgcacccctaatgttcaaaacctcaatatcaacaccgagtatgaaggcacagatcaactctatgttggagatggctcaggtctgtctattaaacacattggccaatcttttattcatactaataattttcatccccttgtgctaaataatatcttacatgttcctgaaataactaaaaacttactcagcgtctctaaatttgctcatgataatcatgtcttttttgagtttcatgttgataagtgttttgttaaggaccaggaaacacaagccatccttctcactggagtacattagaatgacctctatatttttaaaccatctcagttcaatgtgcaatccaacacacctgctgctgccccatgcatttttactgcctctgtttccccaaataatacatctgcttcttcaagttgtactaaaaccaacatatctcaactatctgagtatgatttatggcacaaccgacttggccatccatcagaaaagattgtgaaatctattcttcatacttgtaatatcagtattagcaataaaaatcccttgtctgtttgctctgcatgttgccttggcaaaatacacaaattaccattcccaagcatcattaactgtttacaatgaacccttacaattgatagttgctgatttatggggacctgccaaaaccaccttggtttatggctataaatattacatccatttcatagatgtctattctagatttacatggatttacatgctcaaaaacaagtttgaggcattgaaaacctttttgcaattcaaa

SEQ ID NO: 106417 - DNA, 879 bp, Cannabis sativa
ttgtacaattatttatgcaggttacgatttttaaatttattcaaattacaactgttatgctgccgaattttctaaaataaaaagggaatatgcttttttgtcattcttgtttgcctaattttggttgtactgaaatctaatgagagccatattgatcatgattttgtgcatattattatttcacgacctagtctctgtgtcatcataggtagatcagttgtgcgctcacctgtaggtgagacctaaaatttgtataggaagtaacttgactctgagcccccgtaatatggcagttatcaggtgcgacttcccagtttatggtgtcattttttatgattggtattgagagttagaggtttagtggacagtgtgatatgcatgggtgtggtctctctactttgtttttaaagagctaaccatgtatgaatttttattaaactactggtcctttgataatgattgtcttcctactgagctttataagctcaccccttatatttctcttctaggaactcagttggatacctaaggatgtgggaaagtcgttaatgaagaacgatgagattagcttagtcctactttaattattaattaactcttctttaaatattgaatatgtatctaattattaacagatggtctgaatcatttatatagacatgaccagttatggatgagaaatatgatagatgctataagtattatcttggtattttttagtttattaattctaactattccgtgactacataactgtgagaatattattattgtacatatatactaaagagtgattctattttattacaactattttttatttattatagagttactctattattttaattataagtcttatgtaattttgtaatatat

SEQ ID NO: 106418 - DNA, 648 bp, Cannabis sativa
agcgaaatcaaagaggcagttttcagttgtgaaggtagcaaagccccggggccagatggtttcagcttggccttgttccagtctcaatgggaggtaattaaagaagatttgatgaaagttattaaggcatttgaaaaagatggcatcattcaaggaagcatcaacgaaacatttatctgtctaatccctaagaagctgaacagttgcagggttagagactatagaccaatcagtcttataacaagcgtttataagattattgctaagatgctttcaatcagactcaggagtgtactgggagacactattctcgaaactcaatcggcctttgttgaaggaagacaaatactggactcaattctcattgctaacgagacagtagaagactacaggagtagaggcaagagtggcttggttttcaaaatagattttgaaaaagcttacgatcgggtggagtgggacttccttgaccaggttttgtgcaagaagggatttggggaaacatggagaaaatggatcaaaggttgtatttcctctacttcattctcagtttttgtcaatggcactccaaggggaaagtttgcggggtcacgaggactccgtcaaggtgacccactatctcattttctttttattctggtggcggat

SEQ ID NO: 106419 - DNA, 1066 bp, Cannabis sativa
agtgccataaaggcatccattgctcaagaggagcaagggtgtggggaagatgatgaagatgaagactgcacgcacatgagcgctattcgattgatggctactcttaagaagcatggcaccggaggaaagaaagcccttgggaagggatttatgtttgtggaggccactttaaatggtaagcaggccaagagcgtgttgatttacattggcgcaacacacaacttcattttcaaaatcgaagccaagagggtgggcctaaaactggagaaagatgcgggtcgcatgaaagcagtcaattcgaaggccatggccacgattggagtggctaggaaagtgaatgtcaagattgatggatgggaggggaaacttgaccttgtagctgttcgcatggatgactttgatgtggtatcgggaatggagtttctagcagagaagggggccattccaattccagcaacagggaatctactgatcatgggagagaatccttccatggttcccgctaaagtgagacacccccagaagtctagctactatcagccctacaactgaagaggggcctaaagaagaagaggccaacatttgtcattgatcccaccgtgtacaatgtaaaagtggaggagtcaactccacttgtaattgagtaggtgttaaatgaattcaaagatgtgatgctggaagaactcccaaaaagactgtttcctaagaggggagttgatcaccaaatagagctggtgcctggtgcaaaggccccaactagagcagcataccgattgtctcccttagaacttaagtagttgaagaggcagctaacggagatgttagaggcaggatttatcaaaccatcaaaggcaccttttggtgcgcccgtgttgttccagaagaagaaggacgagaccttgagactatgcataaactaccgtgccctcaacaaggtgactgtgcacaatagatacccgattccctagatcgtcgatctatttgaccagctaagtggagtaaatacttcacgaagttggacttgagattaggctactatcaagttcagatcgcagaaggggatgaa

SEQ ID NO: 106420 - DNA, 615 bp, Cannabis sativa
aacaaatacattttcgatcaataaatgaataaagatagtatttcaaattcaattgagtcgaaaaaatcagcaagattataatttacctaaaggacgtaccaaaggtttagtcaaacccaaaacaccgaacagataagcaatatatttgctaaagacaagtgaccaagagtcatacgtctggtcggtcacttggggggcacctatacctgtacaaagcatttggtaaaaatttaacaatcacaattgcacgacaattataaacagagaatgaaattcattaaggatgacaaaagcacgtagtaccaggattaaaagctgcccggtcatcccgttatccaaaaaatgaaaaataattccaagttcaaagatttcttggctggtcgaggtgtcttagaaaaggcctgaaggctgaataagatatatatatatataaaaaaaaaaaagagataaaaggaaatgtttaaacagctggagtcccaggctctgggtttggttcttctaggccaactggagtaggagcatttgttgttttaacaggagaagcatcagtagcttgactggaggttgaagcagcttggtcggaggttgaagcagccgcctcgttcccaccataag

SEQ ID NO: 106421 - DNA, 1277 bp, Cannabis sativa
tccacccacccctcctcccgtcggtctccctctcctctccgtcacatgcgtcggaccaccaccacctctcgtccgtgtccctctcatctctgtctcgtacgtcggaccaccaccacctccagtctgtctccctctctctctttctctctctctccaagctcggtataaatacatttatttatttatatatttttttatttattatatatatttattttattattgtataaatttaatgtgttttaaaattagttgttattgtaataaaattaattagttgttttattttaatttaggtaaaattatgaaactaattaatgcaggaaaaagataggggaaaatacagatttttctgccattaatggcagaaaaatttgtattttttttttcacattctcaacggtttaaaactgtcgcttatatcctgttttaggcgacagttttaaatcgtcgggaagtttacattagcgacggtttttaactatcgcctattttacccgttttacgaggttcgtataggcgacagttatagaaaccgacgggaacactttaaacgactgtttaaaaacatcgggaaaaactatttttgtagtagtgttacaacaaaaactttttctatactatcaattgactcttgtaagttgtaatatatatattacgaaggtaccattctgaattctcttgctatgctagctctttcattacaaatattgccattgttagaaatggacgaggtacaactggagttccatactcggcaggtaaaaatccctaaatcatgaatttttacaaaaaaagaaaaaaagaatatgacacaaattttatatatatatatgaaaataaatccttaatttattaataaatcaaacaattgtaaatcattaactcttcattccttttgagtacccaatgagtttagccagatttaatagtttctaagtattcactatgaatgagtctccaatatacattagtttttatgatagtcacaataagtgtgatatttcaaacttgtcaaagattatcggacaccgatcatctgctccaggtatgttattatcgactttgaatctaagttcttacgattttatttttgggcaccttcccaaaatgcttcttaccaatggagatatgtctatccaggacaggccctggacatagacagattaaggaggaaattacactctatacccttttcatattgtcctcttttatttttaccctctttcttaaagtctatcatttttacctcttttttttaaatatcgtaccaattt

SEQ ID NO: 106422 - DNA, 678 bp, Cannabis sativa
  modified_base (303)..(321): a, c, t, g, unknown or other
  modified_base (631)..(638): a, c, t, g, unknown or other
ttcatcacaagtgtcttccgagtcataacagggtgagttcctaaaaactctcccactacaacaagataccgtgactttttgtctaagaacattaaatggtactaacctcttcggttgtgtcaaaataacagaggaagtgggatcatcttatatctaataagatgatagaaaacttttggaataaaaaaaaatatctcctttatatgctactttattttcagacttagtcattttcttagaaacgtagtattttttaaaacaaacactttcttatctaatgagtatgggatggtccacccctannnnnnnnnnnnnnnnnnnaaacatgcaaaccttagttaacaggtctagcttttcttaagattacgattcggtcatccatgaatctagtaattgtttacactaagtacacaaccatttcatcattctgaaattttcctatcattaggatatttccttagaaggacttaggcaatgactagtaactaatcatagaccttatactatcatcaatatgcaaatcgaatttctgggaaggtaagtttggatataattcaaaaaacaacttaatgatctttgaactgcataattacctaatatttctcctcccctatcagttcgcaagatcttnnnnnnnntaccttaatggttttccaccattactagaaattcatgaaa

SEQ ID NO: 106423 - DNA, 723 bp, Cannabis sativa
tttaaccatcccctgtttggccaacttttgagagaggcagaaaaagagtatgggtttcaacacgacggtggaatcaccatcccttgtcggatctccgaattcgagcaagtcaaaacccggatcgccgccggctctggtggccggaagcttacgtggaagcgccattattgatcgtggtttttactcaaatggccgtgacgatgaatgaatgatagttaccattagaattctctattgatgatgatgatgatgaaaatgatgtttataatttttgattagttagtggattttctttttaatatatatctattttaactttttttttacctttataatacttgccgtattggatttttagatgtatatatagttaaaaaagaaaaatgatatatgttttcactggttgattatgatagtcattatatatgtttaagataatattagtgatgtaattagctgtttttcttatgacaaggacgatgattatctttaatatgttaatcattcgtaatcttgactttttatatatctttttattttatcatattcatactacagttgttagttttaaaggctcataaaaaagttttgcgttgtctataaagaaccaaacaagaaaaaacacacttcagtattatgattaaataatctgtactaaaatttcaacaaggtttgaaattttgaattgtaccttttcttttcttagttcatatttatttattt

SEQ ID NO: 106424 - DNA, 595 bp, Cannabis sativa
tgtcttcatggtacaaaatactaaaagatagtgagttggattcaaattattgaagtctgaacttctatccaggaaatctcgaagtcaacctggcataagtctaggtctcctcttaggtcaactgctatgactcgggtctactcaactctttgacgtcatccttcatgccatgtgtcaaatattaatattcacgtcaccaacaaagtttctgagttaacaatacggtatgaatgtgataagctatttataatagtaaagttgcattaaatattaaaaataaaaattttttgtaccccacaattttaaaaatgaaatatataggtatatatatgaatgtatataaagattttattgcatgaaactattagaaattaatagattagtgtattttaattaatattatgaaataaaattactcatttattaaatattatatataaatatatataattgaaaatatatatgtataaacatgtgaatattattatatataaatatatatatagctgaaaatatggaatgaggtttcaatggttacatttttattgtaactgttgactgaggttttcggcaactaataaaatattataaagtt

SEQ ID NO: 106425 - DNA, 577 bp, Cannabis sativa
  modified_base (222)..(227): a, c, t, g, unknown or other
agaatgtttgtcattttagaggagttgactactctattgaatggatgatatttttaactctcgcctaaacaggacatgatatcagtttgttgaaaaccttaaaaaaatattaagtatgttttattttgttattttttttacaaacatatttgctatacttgttgttttctgaacttgtgtatggatttatagaaccaaatgatttatttctgtttattgatnnnnnnagtgtcaaaatgaacaacccacaccccgaccctctcctagtaaatgcctttgcaaatgaactctatagtgtgaaaatgcttcctggtaagagcattaattcacacttgttgatgatgaatctgaagttcgagaaagcaaatttgctgggaattgatttatctagagaacaatgggttcaattcattcttaatagtcttcctcttgagtataatggatttgttgtatcttatacgatcaacaattttaactcattcgacatggacaagctagaagcagaattacgtacttatgaacggagcttacctgcaaggaggccaccctccagttttgcagacctaagtaagaggaa

SEQ ID NO: 106426 - DNA, 531 bp, Cannabis sativa
caattgaattcttgaagttgaaggaggagtcgtctgataccatattagtgatgaagaaacaaaattcttcttattaaaaaagaaagtgaaaatgtattgttttcattacattgctaacaagagaggagtgacatatatatagacacagtaatggaccaactaacttaactaattttactaactaaaccgactttaactaagtgagttttaatatacttaattatgtttttagtttttatttttgttatatgtattttaaaattttataaattaaaaggaaatcaattattaactttttaattttttttaaaaaattatttaatgtttaaaaaatttaagaaaaataaatataaagtttaaatatgaaaattgatatactcctaatattaaaaataacaataaaaactaataatattacaaataatttataaatatttttatatatttaaataatattaatattaatatataattataaaactaaccttattaacactgttaaatttaacgaaatattcttatattcttaaa

SEQ ID NO: 106427 - DNA, 818 bp, Cannabis sativa
  modified_base (126)..(141): a, c, t, g, unknown or other
  modified_base (302)..(309): a, c, t, g, unknown or other
  modified_base (622)..(630): a, c, t, g, unknown or other
actcctgcaacaagttagatttgaatagttggatgtaggatttaattttaaaatattaaatataattcgagaaaaaaaataaaaaaaaaatatttttggttttaaaatgaaataaaataatatttnnnnnnnnnnnnnnnnttttgaaaaattaggtttcaagtaacctaaatatcatttcaaaaagaaatttgctaacttaccttttaaactttatgttatttaataaattaaatattcaataaaatagaaaatgataaatacatacacttttctcattttataatttaatttaagtaaannnnnnnnaatttaaaagttaacaaaaaaaattttatttccctttttaaaataccatgattatagtaatcttattctaaataaggtcaaattactttaaaagaaatatttaatttaaaaaatttaatatctgaccttatatttaaaataaaataaaataatcgaattttaatgaaaataagaaaataggtaagcaaaacttgattttaacctatttcaaattcaaattaaactaatatctaaaattaattttgaaaaatcaaattaatttatttctaataattagatttgaaatatgaaaaataaaatcaaaatacaaaannnnnnnnnaaatcggaagttaatttcatgaaatagcatgaaaaatcgaagaaaacaaagaaaaattacacgttgtacggatggtctgcattacgcgcatgaggggtgtcaagccgtgtttccacggcgctgggaggctgcaagcagcccttccgcgcgcgtgggagaggtgatcaccaccccgatttttctgattt

SEQ ID NO: 106428 - DNA, 769 bp, Cannabis sativa
  modified_base (596)..(598): a, c, t, g, unknown or other
acctaaaatacaataactctctcaattatcatccattttttaatgatctatatatgttgttaaagcttattcgatttcccataagttttatgaagaaacgttttgttaattcgaagtgacactatgtcaaaaagttagttttcttcaatatcatgtgatttgtttcttgaatcttgttcttgcaaaaccgttttggtaaaattgtaatatctctttgaatgtaattccaatttcaaagattttggtatcattggaaagggaatttaatttcctaaaactttgatgaagatgttatcttctagttctggaccatttaatcaaaagtttgtatttttgctaagtcatgtaattcgttactccatattccttctcagaaatattttcagtaaaacaatcataactccctccgttttaatccatttttgatgatctttagatcattggaaagataatgaaattccctataatttttatgaagacaactttcactaaattagtataattgttggtcaaaaatagtgatctttctactttactgtaagagtaagaattttaatattagggccttgacccatatcttattataggtagtagtnnngagataacaagtcttaagcagcgagatttgagataagaaaataagatagttttgtatgtgtttatctgcattaatttaaactcttatttatgtattgaaattgatttatgtgttatgtatttttacgtaagtttctgtatgagtacaaagattcatacttgaatgtatttt

SEQ ID NO: 106429 - DNA, 583 bp, Cannabis sativa
ttattttttatgcttttaaactaatagtattgtcagaagagtagttaaaatgtatttatttgcttaattttagttagttttagtttcattttctagttagtaagctaactttttcttttaaagattgatattgttaggtgtgattttctaattaattatgcttgtttgttgttgaaaaaggaagcaaggaagagtggaacataagctgaaattgggcagattgctgaagcaatgctgaagcgaattcagcatcctggcagtgacgtggaaacacgagtttcacttatccacatcagcaaattcatcccagtcactcaaaatacaccagctggctgctgtggaaggaaggggactaaacctagtgggccaaagtgcaaaaagaattgggcttctcattttggggaatgattttgtactctaggaacaaaacaactagaagaggagaaaagaggaagtacaccaccatcatcctccattacgtgagcagcagcagccattttaagaggagtaattgtagaagtacagaggaggaagaagaaaaaagggggaccaaagagaaagggagaaggacacaagttcttgt

SEQ ID NO: 106430 - DNA, 504 bp, Cannabis sativa
atttataatactatatgaatataataatgtatatagaattcgaaataaacaccgaaaaataaaaaaaaaatcaaacaatcagaccgaaaaacttcaatcatgtttatatatatgcacgtatatatcgcataaaaatattatatgtatagaagaaaatatcacatacatttttatgcaataaaattatatattctatgtgtaaatatatataaacatatatgaataaaatatatatgtatatacgtatatatatgtatataaatacaacaatacttatgtgtatatatagtatatatatatataaaaaaattaaattatgaatatgtatatacgtagattgaattaaaatgtatatatacatgatcagaattatatgaatatatatgtatatataaaatatatataaacgaagaactgataccgtatacgtatatatatatgaatgaaactcaaataaaatcaagacagagataaaaactactttgataccaactgttagactat

SEQ ID NO: 106431 - DNA, 1018 bp, Cannabis sativa
  modified_base (451)..(456): a, c, t, g, unknown or other
tttttgttttgttttgttgattttttttttttgaaaaattttatcttttgttacattttttttattgggtgttgttttttactacatttgtttaataaagagctttccctttatttttttttctttttatattttttaaaagttataaaataatcttatacattaactctgtctctcttaatatttaatagttactagattatacattagcttaatttgtaaaataatttgataagtttcaaaatattataaggaaaccacataatttcttaaaatatataacaataaacgctttactttaaataaaatttaatgtatcaaataacttaataagctactatttttttttatttttatacttagacattacaagattaaataaaaatagactaatttttataaaactattttaataaatttctaaattaatttttaaataaattgaatagtnnnnnnaacatcatatgagttacattaaaaaaaaaaggtaacctaaattgatggattttgcaaaccatcatatttttggatcaaagtccttattattaaaatattcttattcttaagttttcttataatgaatgtcttgtctcttgacatgttttgaaagtttcttgggttaccgttgtcagtgattctagatttgttctcttgtgattctcgttttgtctctagtatttgtttagatctttctgagatggcttcgagtagtaaggcagggggtgactggatagaccaatatgctcaattacagttggaggaggaggaagaagggttctggtttcggatgaacaagagggagaggagcaagcttttgatgacaggtggtgcttggtcggtaaattcctgactaatagaactatcgactttgatgcaacgagacacacgttggcttctctttggcagccgggtaagggagtatatgttaaagagcttgatacgaatcactatctttttcagttttatcatgaacttgatgttcaaactgtgataaatgggagtgttgggttttatgccc

SEQ ID NO: 106432 - DNA, 747 bp, Cannabis sativa
ttcttttattttctatactttttgtgcttaacttatgacaaaattaggctcattatcgttaataaaaatctatgttaatagtttggtgctttcattgagagcgtacgtgaaaaaaaaactcagaaaaaatccctcctaaccaaaagaaaaacttttctccatggctgacaatggggaaaatgataataatcaacctgaagagactactcacagcgctagaaaagagccagcgggctcacggaggcctcgtaattcacggacaacacaatctacacgatcaacacgttcaagaagaagccaacgtgaaggtgaccaaaacccagaaactgagaatgaagtacccaacatagatgctggcggttcttttgggagtgggggtgcctatgactccacaaggtatgtaccgttggttgagttggaaaatcgtcaactccagtgacgtttgcaggaggcaaaccaacgaaatgctgagttggaacgggaggcagccgcagccagggcagctcaggaaaacaatgctcaaaaccaacttgatcctggagtaaggaggccacgaggcagatctcgcggctcacgaaccaggagacaggagacagctcaggagaaccctcagaacgctcaagaagaacaacctggggaaactgaggatgcccctaaagatgagcaatcgaatgaccaggcacatcatcaagaagtgcctcggagaccccgaggattttcaacccaggggaatggaaactgtgattt

SEQ ID NO: 106433 - DNA, 621 bp, Cannabis sativa
  modified_base (81)..(82): a, c, t, g, unknown or other
gcccgtgctcaagatccggctcatagaaatcctaatgtgacattggtcggccaagaggccaaacaagttcatccatccatnnaggcacagttggatgaattgaaaaacatgttccaaggtctggccgatcagaagcacaatgatctcgagctggatcgagcatgtggatcccctttttctccagagatcaatgttctagagctaccccacaagttcaagatgctgacctagaagatgtatactgggaaagaagaccccttatcacatctgaaatattttgaaatgcaaatggaattacaaggagtacgaggggatgtgtgttgcagatttttttttgccacactctcagaagccgccaaacaatggtacttcaagttgacactgggaaggttcaactcgtggaaggctttctcctcgaaattccatgcccaattctcttcttctcgccaacttcgattgcatttagaggacctggtcaaagtgaagcaaaggccaggggagcccctccgagcttgtatcagtagattcatggcggaggcaacgaaagttgcacggttaaccgaagaagggaaattaatcgcaacattgggggcatcaaagttcttggagagctttggaagg

SEQ ID NO: 106434 - DNA, 1082 bp, Cannabis sativa
  modified_base (371)..(375): a, c, t, g, unknown or other
  modified_base (708)..(733): a, c, t, g, unknown or other
cttggtgatactctgctacagaaaagatacaagggttagagatctgagggggagttattcaattctgctgcaaccactgtaaggtttgtccaactttatatgtgtttaaattacattgttttagaaattcatatttaggatgataaataacatacatcgtaataaatctagatcctggtaaaatataatccaacaactggcctcagagccatggtagtaatttactttcatgaaatatggatttaaaacaatgtttgtgttgatttggatggtttcatgatggtttatgtgcatatttgatgattgtatggaaattgcaatgtatgttgtaaaatattttttttttgttctggaaatatttttactggaannnnnacaaaaaattaatgaatttaggcttttacgaaactcaatttgaatttttttatgaagtagttatgattttttgaatttggatgaaaatatttgaaaccgagcaaaacactgtgcgcgcgcggatagggtctgacacggcttcagacacgcctatgtccgaattcacttggacaagggctctcctaagcccctcctgacaaaggtttccccccatgaggctactagcagcccttccgtcgcccatttgcagcctattatgcgcatggagagtatgcaatgcatactcgcctagtgcaatcttgttttgctgatatcttttgattcaaaaatcannnnnnnnnnnnnnnnnnnnnnnnnnttggtagaattttgtgtagaatcctaattttcaattaaaaatctaattatcaaaataaattaatttttaattaattaaaattagttttagatatagtagcctttaaatttgacattttgatttttccacaaaaatagccttatggttaatattgaaattttgattattttatttattttacttattttaattataagatcagatattacttattttaatattaaaataatttattattaaaagttgaaatgaacttattttaatattaaaatattaataaattgaagaagtaatctagtttaaatttcaaatttactaaccatattattttttttcaaaatttgttatt

SEQ ID NO: 106435 - DNA, 2330 bp, Cannabis sativa
ttttaaaaaaaaaaaaaaaattgcgggttcaccagttcgggttcgggcgggttgtcgggtttgggttcgggcgggttgctcgggttcgggtcgaacccgatagaaatgttcatccctatttcagggtcaattcctcccaggtgttgatagaattgggtggtaaagataccaaccaatagagaatgggaacaacttcaatctgatggtgtcgtcactaactccattcatcttgaattcattcatcttgaatgtttgacaaagctctttgaagttagcgagatgcatgtttgggtcttccattggcaaccccccaaattggactgcggattggaccatctgtagtatggccgacttaatctcaaaattattagcatcaatggcaggtggccttatgtaggatttggcccctgttaaattaggtatcaaatagtccctcaggctacagtcattttggttacgaccattagcctggttttctacaacacctccattgttaccattaattatcaccgacgttgacgttgtcagccatatctacttcttgttcaatctctattacagccttttccaatctttttctttttctgttctgtctgcaagtcttctcaatttcaggatcaataggtaaactgacagttgctccttgacatcgcataaactaattgtcttgagaaaagagaaaattttgaaacaaacaaaattagtactgaaattgaaaagaaaaaccaaatcagaacaaaatttaacttttaataatattaactaacaatccccagtaacaacaccaaaaacttgttgtagtattttaacacgcaagtatacgtattgtagacaagttatagactcacgaagagtgaggtcgatcccacaaggattgtagttaagtactttaaaattaaacatttacttctatttggttatatcaaaattaagagaaaattaaaattagaaaacaataaaaaaaaatagtaaaagcaggaagcaaataaatcaataaggaaattgacgatgattaaaagttagggctttcattttcaattgcatctattgattatggtttaacatgattctattcctattaccgaattctatgcaataacaagtttacttaagtaatttataggcttctcagatatataaacctcaattacatataaattttctactatcgtgataaattaaacatgtaaaaggcattaaatacagaaaccctataagctatctaacccatataggtactctcgtcctatatcgaaatttagttctatttcactatagcataatcaacactcatcagttctcaaattttgtatcaaaatcataaacaattaattgatggtcagacaactaaaagaaattaagtacgaataaaatagaatacatagaaattgaggggaaattaaatcatattaaaaccaaaaaaattaatgtcaaataatatccatctaaaccctaatgaacagtttagctactcatgttcatcgtagcaatttcacacatattaatttagaatagaagaagaaaatagagaagaaaaagaatgctgaaaaccctattgaaaaagccttcaatattaattttaatcttcaaaatttgtactccttgtttgcttccttgattgcttgtttcattctcctcaaaaattattgaagtccaattcttttatagccaataagggataaaaaagatagaaaaagataacacactgaaaacctaatttgcttgggattagaaaaggcgggctgcgacatgcacttcctatgctgcggcccgtgttgcaaaatcctcacgtccctaggcttgcattgacacgggcctaggcatgaccccctattttgtgtgcatttagcttttatttgatatttttatttttgtttttatcttattccttcgatattttctattcttcttctattttaaatctgtaaaaataaaaaataaaacgcataaaattactccaaacaagagtaaaactaaattaaaaatatactaatattaacttaaaaatagtcataataacatactaacactcgcacgcttcttaggaaagttttctaaaaggttatccatcttgaaactgtgaattcttttgtgataggctaccagaaaacaaaatacaccttgttgatataagcagtactaatcaatttatttaagtcatttttaattatatagtcccatacctacacaaaaaatataacaaaaaatgatgtgatatatttacaaaataagaaagaaagaatttgtttggaatcatatctttgaaaaggatgattgggtagtgagtcataaaataatattagtggagatagtcaatgcaatacatattt

SEQ ID NO: 106436 - DNA, 517 bp, Cannabis sativa
attgaactaccatgttcccaagatgtaaatatctgccagaaccatttgttagcttccacaaataataaaactaagatgaacctaaccttatcaggattaagatccatagatctaagatcaaccagtgatattgacttagaaagatataagggtaagtttatgatatcttacccaagatcaatatcggtcccttccaatgtatactccatacatctgataatggtaaactctaccaatgccttagaaatgacataacacttatccaaggtgtaagtataccttgttgccgattatcatgtcagtctaaattagggctgaacatcgggcaggtttatcgagtttcagtttcatgggtttcaggtttaaaaaaatgaaaccgaacccgaacttgaataggggtcgggttggcgggtcacgggttggcgggtcacgattggccaggttgacgaggtcaacgggttgacccagtcaactcggtcaactctttaaaaaaaattaattttttattcaaataatt

SEQ ID NO: 106437 - DNA, 575 bp, Cannabis sativa
ttacctttccagcttgcataagcacatagctgagaccttgtctagaggcatcacaataaaccacaaacttttccttatctgaaggaagggttagtgtcgaagcggtaatcaagcgctgctttaactctaggaaacttttatcacaccgatctgtccaaacaaacttcaagttctttcgggtcagctccgttaagggtacaaaaatctttgaaaaactcttaagaaaccgacgataatacccagctaatcccataaagcttctaacctcagtagctgattttggtgttggccaatcccgaacagcttcaattttagctgaatccaccatgatcccatctttatccactatgtgtcccaaaaatgagacacgagataactagaattcacactttttgaatttagcgtaaagcttatgatctcgtaatcgttgcaaaactgctctgagatgcaattcatggtcttcttctgactcagagtacaccaaaatgtcgtaaataaatatgatcacacatctatccaggtaatccttgaataccgtcggggcattggttagtccaaaacacatcacaaggaat

SEQ ID NO: 106438 - DNA, 781 bp, Cannabis sativa
attaaatttgttttcttattacattggaatggtcattcttttcttattaaaatggaatagtcattccactaaaatggtaaaaagagcattccattagaaattagaatgcctattccaatactttaaaatgcaatcaaacaaaaaaaatggaatgaaaattgtttcctttccattccattccatttcattacttctaaccaaacatctcctaatcctagtcattttcatcaaagtacataaataattaacaaacccctttacaaaaaataaataataattaattattaataaaccttttctatgaaactgtagcacagactttgaccaaccaacctgtatgttattttcttataataataagtaacaacattatacaaatatttaatgaagctagtaacacgtaagtaaaataatcacgtggtatgtctttaaaatacatatacatagtacaggttcgatatttgagattgaatcgtgacaatagacaattcaggttttttagatttttttttccttctttcattattatcctaaagctgaccacaaataatcgaaaaaaatatatattaaatttgttaataatattattattttgatttcgacattatttgtcttggctaatagcttggtgataagcttgtgtctccttataacgtttttttatttttttaataatctcatcctacgtttaagttttgttttctcaatatatttttttcgttagaaatatgtttatagcttatttttatttactttgagatttgaacatgttaaaataaat

SEQ ID NO: 106439 - DNA, 500 bp, Cannabis sativa
gacatcagagcttttgttgtttagtcgctaggtgacaaatattttgtatatgagtagtaaacttttgtaactttattttgtaaatgagatcctagagttttataaatgtaatatattatgtttttattaaataagcaaagttctaattattcacgatttccaataatctcgttgattagcaacaagctgcgcagtacgttaaaaatcacactaacacgcctatagtagttagggtgttacaatttggtatcagagtcgtcaggttgtctttcgaagatcgtcacgacatgtacaatcatcatcgacagtcagctcattccacggttcagttttgatcatgatctgacaagactagctcttggttacgcaggtttttcaaattagtatggatgccatgcgaaacaccaggagtcggggcaattcggttggatcaagtggtggtcagggagatcagattccccttaatattcgtggccgaggtagaggtctcaggggtaggg

SEQ ID NO: 106440 - DNA, 1275 bp, Cannabis sativa
  modified_base (92)..(105): a, c, t, g, unknown or other
actcatagtaacaactctccaaatgttacaaaaagatgacaactaatatagtcatatgttacatattattaatttattacacatatttaatnnnnnnnnnnnnnnattataaataatataacaattatattatatatacatttcatataatgtgttacagatatcatatatcttgtatcaaatatataaatatataaagaaaaaaatgaacatactataataagattactttaagagaggagttgtttgcatagctacttttgccgacaccaccattcatgtggaggactttttctactttcatttacactaatgttattatagctctcgctattgattattgaggatcttaattgggcttagttaaaattattatacccatataagtgttggagagctattatacccacatagttgaccaattcacaacaaaactaaatggacaatacacatacacattagttaaccaattcacagcttcattaaaaaaaatacaagacccaatccaaaattaaatcaatccaaaaaataaaatctcactagtattcctcaaaatccacaaatcaatcaaacaagatttatataatggacaagatttatcaaacaagttaccataacgaataattaaaattacatgcaataagagggtgagtggagtgggctagctatgtccggtgcaatgagagggtaagaggaggatgttagagattttattactatggaagaaaattaagatgcattatgttaggtctttttttggcattttagttgtcaaaatattttttaattaatgtacatttttattaagcatttaaattgtttttattgcattgattttatgcattttattgctcttttctatcttaggaaagaatcatttttcagctaaatttttctttgtttagaaacttcttataagagaagaaattctcttatggaaagttgctaattttgggaaacttgactttcctttttctaatggatgatttcggttttgcctttattagaaaaaatcaaataaactttatttggcaggtttgaagtccaaattcgtgatcttggttcaatttaaaaagtttcctttcgggtcctgatctgctactgcgaaatccgattctgatgctgcaaatcaggaatttttttaggaaagttttgtacagctgggaaatcgctttgtgtctgtctctagggttgctatattctataaataggacttagagagcatccaaacgattttatctcttctagtctcatattttcatatctttctttgtg

SEQ ID NO: 106441 - DNA, 646 bp, Cannabis sativa
ttaataaaaatataaaattttgagaaaatagaaaaggttaatgaaataaaatgtagagtgccacctaacctctctaatgctttcctttatatatagatatagatatagatatagatatgtatagattatttcatatcaaaatgtgatttttaaaatttatattaacattatatgagaaacatgcccttagagcaactccatggtagcactaaaacttgaatttggtgcataaaatccatccaacgtagcaccaaagtttacagcatatataccgtatggctatagtgcacggcatatatgtcgtggcactgtagctacggtatttttttttaaaaaaaagaattaattattattatttaatttatattatagatattaatattattatttatatttataagattaaaaatgttatttttacaatacactcccttaaaataaatcaatcgatgcacttctatttattgtatgtgagataattttttagcttaatttttgtatggtcgtctacattatagctatttaagacttcttacaaagttttgggaaattcaaaaaaatttaacatgccgaaaacaaggttcaaactgtctattgcacgcgaaactcttttattttatatgtgcgtgaaatagactgtttaaac

SEQ ID NO: 106442 - DNA, 820 bp, Cannabis sativa
ttactaatccacattactagagcggtcattacagaaacagtgtataatgaacccctacaacttgttgttactgatttatggggaccatctcacataacctccaccaatggttataagtactacattcattttctagatgcctacgctagattcacttggatctatctccttaaaaacaagtaagatgccctaaaaaccttccaatcttcaaagctgaagctgagcttcaactaggcaaaaacgttaaggttttacaaagtgactggggtggtgaatacagatcattcacaccctacctcactcaatctggcattgttcacaggcacccttgttccacaacccatgaacgaaatggattggctgaaaggaaacaaaggcacatagtaaaaaatggcctcactctcttagcacatgcttctatgcccttaaaattttgggatgaaggctttagaatagctgtgtatattcacaataggctaccaacatctgtcctaaataaccagtcaccaattgaagttttattcaatattaaacctgattgcaacacttttaaaacctttgaatgtcaatgattccctaacataaggccatacaacaaacacaggctccaatttaggtcttcaccttacactttcattggatatagcattaatcacaaaggttttaagtgccttgacccaactggcagaatttacatctctagagatgtaatatttgatgattttgtttttccttatgccaattctcaactcaactcatctaaactaccagttgagtactcaccatctggcctaatccccaccataaatctgttgggttt

SEQ ID NO: 106443 - DNA, 1168 bp, Cannabis sativa
ctggtgagtattaagctacattacttagtaaaatatcaaacttaattatggtactttcaaatgagctagaacgctgagaacattagctgtactctttaagtggtcgaggaacttgttgtctgcgcatcattaagcaaatatatgagtggaattaatattaattttatattgtgataaaaatatagaagaaaatgataattataagtaggtttgtttattctttctaaagatctgatccaatggcatgatcaacaccaaataagaaagtattatgctaattttctttttcgtcgatttgcagggatatcttgatccggagtactacatgactcaacaattaacggagaagagtgatgtgtatagttttggtgttgttatgctcgagcttataacttcaaagcaaccaatcgagaagggaaagtatattgttcgcgaagtacgaatgtcattgaatagaaacgatgtggagagttacggcatgaaggaaatgattgatccatccattagaaacactccaattcttattggctttggcaaattcttggatttggccatgcaatgcgttgaagagacagctgctgatcgtccgtcaatgagtgaagttgttaaggctattgaaaccattttacagaatgatggtatcaataccaactcaacatcagcgtcttcttccgccactgattttgttggaaacgccaaaggccctcttagacatccttatagtaatgatgctttgcctaaaaaggatgttagtgatagtgaccactttgattatagtggtggatacgtactctcaacaaagattgaacccaagtagcacgacattctgcttgggtttctcttctcttttttctcatttgattttttatttttattttttggctggaaaaagtttactgtaccgtacggtattgtaatgtttgatatatatacatgtagcaaaagaaaaaagttgacacagagaagtttataatcatgtcattatttttttagcattagttatgtaattagtttttggaaaattcacacaatccacttaagtctttttttttttgtaaataattaatgaccgatagagacggtaaaattgtcgtgagaatattatttaattatgagtgtaagctcaagttattgtctaacctatctttttcatatttagattgatttt

SEQ ID NO: 106444 - DNA, 513 bp, Cannabis sativa
ctacactagtaattatttgatctcaagaattgcaccattgcgatctactctttaagataatcattttgatatgtgagaagcatatattttttcgctagctagaatcaaaagtaacattgtagtttcttaaagatttctttttatcaaaaatttcattttatatatatttagtttaccaacaagtaaacaatattcaaacttaaacaaaattaaatatatataaaacaagttcctaaaattattttattattttatctacagctgttataagattgatcataaataaacttattttataaaaaaaatttaataaatttctaaaataacttatgagaaaatcagacagtatcttaagcattatatattttacattaagatagcaatattaagatattattatatggaggatgttctaatggttatatatttattgtaaccattatggttacattttttagccattagatcactattaaatggttgtgattaatttataaattaaataaaaaaaaa

SEQ ID NO: 106445 - DNA, 527 bp, Cannabis sativa
agagagagagagagagtcagtttagaaatgaggggggtaaaattgagtttaagtaaaagttatccttaggttttttcaaaaaaaaaataaaaactcaatatatattaaatattgaagttttttcataaatatgaaaaaaaatatagtagagtttacttttatatggtataaataaataatgtaaaaaattattaaagtttaaaatatgaaaacaaaaaataataaataattttgataaaacttataataataagtttcgccaaaaaagttaccggtgctgaaaaaattgttggtaccggaaaagttactgaaaatagttattgtcgccgaaaaagtcatcgtcgcccaaaaagtcgtcgaaaaagtcactgtcaccggaaaaatcactgaaaaaatcaccagaactaaatatctcagatttaaataaaaatagaatcagttttataacataatgaataaaaataaataacataaaataactcaaaccggataaaattgaaatataactggttctgtaacataataaa

SEQ ID NO: 106446 - DNA, 552 bp, Cannabis sativa
tctctctttctctcacacattccaactagagcattccttaacacttgagattttccatcttcaattcgcactttgtaaccttatgagagctatatcatatcccatttatgatgaagtgaatagtgttatccctcggtatcaatataactaaaggggcataggtcattacctgctaactaagggggtcgaacctctttaaaaatccttgtctctttttactttctagttctaattgtttaacatgtggcaagcatcagcttaatacgactcttctatcggttggctactttttgaggtcaaaagtttcattcagagcgagttgatattacatttgatcaaacgctgttgttaacacgagaagaactcctgttgcaccatctgcatcttcgggtcttcctcaagacccaaagactgcagatctcaatgtccatgttccagccacgactggaattcccatgaacacaagaaatgtgtcaatcttgctaccacggtaggcaccacaaatttggcctctacaactggttagagtgacacgaacatcctgatggatct

SEQ ID NO: 106447 - DNA, 1504 bp, Cannabis sativa
  modified_base (1276)..(1292): a, c, t, g, unknown or other
ataattataatatatttactttttttaacaaaatattttacatatgctttattcatttatatatattattaatatgaaaaaaaaaaacatcaacactgaaaaatccatataatgcttagaagaaattttagccccgtctcatttttatatttttacatttataatatattttattattaatttatgaatatatagtattattattttaataatttcttaatcgtatatatatttattaattatttaaattttacatcaaaatttattttgataagttcattaccaagcataagttaaaaataaaaataatataatttacttagatagtaaatatatattattaattttataggttcattactaagcataagttaaaaataaaaataatataatttacttaggtagtttataaatatatatatattatttaagcttttttaattattttttccttcttcttattttggcatatttataaaaatacatataaatgaaaaaaattcaatttgataatataaaaaatattaaaatatttaaaatcaataaataaattaaaaaaaataccatcatttaagagtgaggattttatgtttttaaaaaaaagtttagggaccaatttaccaaaaaaaataaagtttgaggaccaacttgacaaaatttatatagtttggcaactaatttgcccaaaaaattaaatttagagcctaacttgctaaaacttatatagtttaacaaataagcataatgtttatatcatgaactaccacttttaaatactttgaatttttttgtttgttaaaattatcttgaactaatattacatatgtcattttcaaggtcagttttaaggtatataggacttaatgataaaattaaattttggagtccctatataaataatttaattattattaaaataataattttagtactttagtgtaatggtaaaaaaattaaaactcttaaggtctaatgtttaatcctcaataactacacatcaaatatttataaaatataaaaaaattaaagattgggaattgatcgcttaacttcttaacttaaaataataacttccaccattgcgctaaacactatttagttatacactacaaaaacagttaattttagtaacagatttttagccacaacataatttttttatgactgaatgtaacttttggtcacaacaaaaaactacttgtgattaaaatatagtatttagacacaagttgtcactagtattgtgattaaaaccacatttaatcacaacaaattnnnnnnnnnnnnnnnnntacctttagccacagactttttagtcgcaatatatgaatgataattattaattagtcacaatttttttactttttttttaaaaataattttttttttgtagtgataatttactatattatttaattttttatctatatattaaaaaaaatataattttagaaccttaagtgttcggggacccgaagcgcacgactggctctagccctttcta

SEQ ID NO: 106448 - DNA, 1429 bp, Cannabis sativa
ttaccataaatcatcatttttcaatatttttcttattttcttggttgagcatttttgtattatcatatttaaggtgttagaaaaggtttagggtcaaaatgtttttttaaatcccaagttgtgacctttttttgtcttcagccactgtattgagaaaatggcagaccgttttcctagtaccttagaaaatggttttctgcaagatttcatggctgtgaggtttttagtcatttccaactcgaattttttcctataaagcctattctaaactctcacaaccccaatctgatctagtaaccctaaatagaagcccccattctctctctcaacctaattacctttatctttttctcaaaatccatattgttctcaaatctcaatactctccatctctcttatttcttcaatggctgcttcgtcatctaggcaaggaaagaggagaagattttccttgcaataagaagaggaccaaggataggcatgagctcttctctcatgaaagatttgcgagtagatttcataaagatttctccaaaagagacatactaaatggtaagaaatgttatttagatgtccttgattatgtcaattttagcattctatttagagatatgagttgggaaactttgataagtatacaacaaacatttatcctaggctagctagtaagggctttttacgcttccattgaaatttcttgtaagccatatagcataaggggaactctcaaaggagttagattcaccttaactgttgactctttgaatgcactcctagatgccacaaatgaaggtctcttgaccctaggcgtagacttaaaaataatgcctactataaccataatcttttcatgtggaatttgtgtaggagaaaattttcttaataaaacaaaacacaataatcttacttttcaaggaaaactcatccaatctttcatttgtaacaacctagctcctagaaagggacaccaaaattaagttagtgcaattgaccaaattctcctttttaacatcattatgcaaagcaagagcattaacttaggctatctaatcattagagccattaatgaattctagaagcctaaacaaagaaaaaccttaccctatggtgccactcttagctacttatttctctctaggcatccccactaaagatgaaatcgaggtcctagaatttaaggatttcgacgttttatgtgcaatcacatttaagggtatgtcttacaagtatgatgaagaggaagaaaaataggtttactccaaacaagatctacatgctcatggagaagcctaagtagttcctagtgctagtgaagaaggataagaagaagaagaacctccaatgcctcaagtttctcatttcaacagcaaagatgtattttctcatcttcacacttcagttggtacttaatttaaaaacttgagaaatg

SEQ ID NO: 106449 - DNA, 1701 bp, Cannabis sativa
  modified_base (229)..(242): a, c, t, g, unknown or other
  modified_base (406)..(407): a, c, t, g, unknown or other
  modified_base (1658)..(1675): a, c, t, g, unknown or other
ctcttctaattcaaatcctatagtatcaccattaaatttcaagctttagtgattgagtgcatgcccagccatagcaagttagtcctcaatcataatgtgtaagactatgaagaatccaagcaactaaagagtgtcgggctcggatcttgattatactctacgatagaaaggaacaagggtttgagatctaagctgaaggagtcatttaattctgctgcaaccaatgtannnnnnnnnnnnnnttatatgtgtttatttttatcgttttaaaagttcatatttagaatgttaaaaacatacttgttagtaaattgaggtcctggtaaagtatattccaccaactggcctcagagccatggtaattgatttactttcaagaattatggatttaaaacgatgtatgtgnnatttggatgtgattcatgttgatatatgtgtttattgttgattgattgatgtttgcaaaatttttaattaaaataatttgaatttcgttctagaattatttttcttgcatagtatggaaaaaaattaaacaactcgcttttttacagaacttaattttaattttatttgaattagttatgattttttgaaaaattgaaaaaaaaaaatcaggaaagggatgcccacgtgcgcgcgcaaacacgagtgatcactcggtgtgcaggcacattaggacatgatttgtccgaagaaccttagcgggcccctatctgaacagccatgtgtgcgcagaaatcctgtaatgcaggatgcgtgtgcgtgaaacctcggttatgcatccctcctgcggatggttgtacaatttttttttcattttttcatgctttttcatggaattaatttcaatttttttgtgtaattttgtatttatatttttatttttgaaacatcaaatctaattatcaaattaaaattaattaattttagatagtagattttgaacctgaaaatagataaaatctaattttttacttaattggttaccttattttttaaaatttgattattttatcttatttttaaatataagttcaaatattttatattttatattattttaattaattttataaaatgatcttatttaatattttaaaagaagatatattttaatctaaaaaattttaaaaatctaaccagattttttgtcaactttcaaatttttgatattttatttaaactaaattataaaattagataaatgatatttatttatcattttattttattaattagacattcaattttattttcttttaaaaataacataaattttgaaaagtttgttggcatttttgaatagatatttaggtttgttaaaaatctaatttttcaaatttataggtttaattttaaattgattatttaatttaaattaattaattttcgaaaataatactttattatttagatttttcgaaaagaatttaattatataattaatttaatttaagtaaatcctatattcgactatccagtttgttacatgtgtgtgttttatatattgtttattattcaaacttatttttttttataaaacttattattatttgatctaaattgctatggttaacttgttgacagatccaatgatttgattttaaccaatttttcaattgtcaataggttaaataaataatttgtaacaggtnnnnnnnnnnnnnnnnnntcatctgtgtataaacctagtaacat

SEQ ID NO: 106450 - DNA, 539 bp, Cannabis sativa
  modified_base (253)..(267): a, c, t, g, unknown or other
  modified_base (476)..(492): a, c, t, g, unknown or other
actaccggagcttagatcgctaagatttagaatcgaagaaaatggatataggaggagaaggttatatcgatcgaaacgaaagagggagaacgagggtttcattcgtcattcgttcgtttctgtttagtgtaatgttgttaaaacataaatcatatatataaaaactgataagttttcgtatatatataataatataataataagatatattattattaataatataataatataataatattaataaaaactnnnnnnnnnnnnnnnatcttattattttttagccattaagaaacttctatttttagggtatttggtcaactccgagtaccccaaaatactgtggtatttttaaaatcaatttatcataataattccatcaataattctaactaaaaccgttgtgacatttttggcctccaatcgggtctccagggttcccaaacctgaaattatttttatttcacaaataactnnnnnnnnnnnnnnnnntttcaaataaatctctgtaattaataaattacgcttatatatccact

SEQ ID NO: 106451 - DNA, 845 bp, Cannabis sativa
aattttgcaaaacaaaatataattgtgctcatattttaatattagcgtatatttgaaaaaaaattagattaaaaatacaaaagtgaaaacagccctaaaatatttaagttacttattttttttttgttataaaagtttttttcttaatttttttttcaaccgatagaacaatctcagcccatacgatgtaaaaatgagagatttttttaattagataaaaaaagtaagcataaaaacttaaatttttctaattttacccatttatgggtcttacccattaagagtgcacccgtatatatttttagactatatttatttataacaagtgcaattgtattaatgtaaatttaaaattaattaattatataatatttaaaaaatgaaataccatttcaataatatataccgtataaaaatcagcaaaattttttaattatatatataaataatttaataatattggtataaaatttagtaatatagtgtattaataattttaaaatgtcactataattatttaaaaattaaaaatgatgatttaataaaaatgtgagtaatataatttagtaacaatttttaaaatgtgactaaaatcatttaaatataaaaaataaacatataaaatattttttagtaacattttcaaatgttactaaagtgtactatttaatgacattttagtttacatcacatgggcatatcctacattttctacaaatattacaaaagctatgaatgtgaatataagtgtataatagtgacatttctatgtgttactaaatatcatttttggtgtattgtttcagtcatcaaaatctctatcgtaaagttcttcattgcccata

SEQ ID NO: 106452 - DNA, 535 bp, Cannabis sativa
gtgagaatgactcatcatttcccacgccacaaaccgtacaaagcagagagtctattgggatatagaaccgaagaatcaaatctctaggtgagaattaacaacctgccacatcataaacttgtgcttaggaatgctcatcctataccaaattgcctacttgtatttcacttgaacttgttgctaataccaatttaattgtatcaaaagtcacttgaagttcaagtcactaccaaactctaccaaactctaataagaatactcttggttgatccatttgtatactagcattacatatttatcatagttacacaatactaacattttactattaagctcctatagtcttttatatgtaatagttgctgcgcaaactgttataccataaattcttattgatcgatgaaattgaatttaagttaatgttcaaacaagttgcacacctcaaagtgagctggagactctcagttgggattctattttggtttctatttctagcttgctcaaaatattttatgtaactttttttttttttttt

SEQ ID NO: 106453 - DNA, 765 bp, Cannabis sativa
  modified_base (710)..(728): a, c, t, g, unknown or other
aaacaacatctaacaacttcagcaactaaaaactcaattcaccattaaagctccaagttttgagttcaaaactcaaacttggctaaatctaactaattaactaacaaaatctgcttgaatctacttaaacaaacatgaattaactactgaatcaaccaacaaacatcaacaacaacagcagcaactaaaatcccacaacatgcaaaaattactttttcttacaactcaagaaatcaagaacaagttacaaaaagcttaccaagaatttgagcttactaaaaccttgagaaaacagcttgaattacaaagaaaaaccccaaatccttgctgctcaaagagggccgaaagagagagagctagagagaaaatggtttttgcttcttttcttttattttttttttccaattttgtaaaatgaatgataaaaaagttttacttacttacttcagccgaaactaattaatcaaagtcaataacaattcatttacttggtccacataaagacaaaacactaaaaaggcaaaaagaccaaaatgcccttgcccacacaaaaccaatttaaagggtaaaaagggtattatgggaattctaaattcccgaccactcccgacattctcaatgtctaactaaaccgtcccgctatactaaaaaaatactagattgtagttctactgagccatacaccgcgttccatgttgccgggcaccgannnnnnnnnnnnnnnnnnnttcactatatgacataaaaatacattatgaattcaaa

SEQ ID NO: 106454 - DNA, 837 bp, Cannabis sativa
atttcgaataattattacaatataaaaaaaaaatatatggttggataacttatatatgttagatctgcatatttggatagatttcgggtgtgtttgagtttgaatgtcgagtattgggtgggtatcgggtgtgggaataggcttaccgaacccgcctgtatatgcattgacactatgtttagtaagaggtagggccgactttgaattgaaatgggttataggtaaaaaaaaattttggatcctaataataaaaataaattgtatttttaaaaaatattaaaaaatatatacattttttaaaaagtattttttttgtatttgggccctagccctagctaagaccgtaagagggagaagtgagtagatggagaagagagagattgaatgagacaaaaaatctacttgtttggtaagaaacaaaagatagttggatggaaagtaaattcttccaaatccgcaatttcacactctcactcttcaattatttgcaattacaaataatttcataaataaatactctccatccttctatattttatactttctattctccatttttcctaacaaacatagccagtacgagtacagtcacccgaacatgaatgctacttaaattcaaagattttgaacccatctattagtgttaccagatacacccgaaccatcgctttagttgtttttcaagaacaggctcagagggtatgttgggttcgaggcccatatgtgcagcaaggactgatctcggcttaagacaagttagacttgcgcttaagttccacttaagctagagcccaaaagataatttttcttttaaaaattacatatttttttattaat

SEQ ID NO: 106455 - DNA, 501 bp, Cannabis sativa
aattcttggtttaacgtttttgttatttttattctgttaactttaacggaggctaacccttccgttaactattgccattcaatttaaatgcacagtggattcctctttcttctccctcaaactcaaaatcaaaactattttatgcgatattcttgatcctcatttgttgcgattcttcattccttccgttgcgatttttttcctcttataaaaaaaagcacagaggtgcgaagaagaagaagattgtggaacaagttggaaatggctcttctctcgtccattacaaccatccccacctctgctcttctggtttgttatcttcttcttcttcttcttttctcaatttctctaactcacttaatttttattatatgcttaacaacaacaacaacaacggtcgaagccaaggccaagtacactaattcaatacccattttcatctacaacccacttgacaactctaatcgttagttttcggagcagcaatcggttgacagcgtt

SEQ ID NO: 106456 - DNA, 660 bp, Cannabis sativa
gtctattgtatttgactgctaatcttcttgatattagttatagtgtgggagtttgtgctagatatcaaagtaatcctatggaatctcatgtatctgctgtaaaaagaattatgcgatatgttaatagtactctcgactttggaatctagtattgtttctttcttggaaataatttggtttcttggcatagtaagaaacaaaattctattccttgtccacagccgaggctgagtacattgccactagtagttgttgtactcagttgttatggttaaaataaatgttgattgactatggatttgaattgggtattttgactattttttgtgataacactagtgcaataaatatttctaaaaatcctgttcaacattctcgaacaaaacacattgatataaggcatcattttattcgggaacttgttgaaaataaatctctgcagttagaatatgttgatactgagaaacaattagctgatattttcaccaaggccctagactcatgtcgctttgactccctcagaaaatctttgggagtttgcattgtctaatatctcttgtttctgatttttgtacaatatagttgagttgttctttgttcgcatctaattttgtttcattcttatttgacaaatcttgtttatgcttttggattataatt

SEQ ID NO: 106457 - DNA, 760 bp, Cannabis sativa
  modified_base (708)..(715): a, c, t, g, unknown or other
taaacactcaatacaaaacatttttctcaaaaggagaacatcataaggtttgacacatcaaagcctaatacaaatgcgctcaaaactgtattaccaatggctaattaatctttctaaaaatgcctatccacattatataaaacaacaccaaatactgctcaaacttgaagctaaaaaatattttaaaatcttgtacacaacaaaaggtttgctttaaagttataccactgtctaatctttaagaggttagcataaaactgatctcacccttttaacaattaaaatataataacctctatgccaactgaacatgttaatcaagacgtaatactgttcaaacataaatccacaccatgtaaaatgagtctaatattgttcaaaacttaaagctagaaaatttaaaggcttatacaaatcgaaaaaaatttccttaaagaactgtccaacctttgagaggcttgcatattgctggtctcacccttttatcttctgaaaaaataatagctcataagtcgactaaacttgtattattcaatactgttgcatcaaccataagtattgtgtggctctgttcttcttgagaaactctaggtagaacttccaaaccatcttatttctttgaagaataaggctactatgcttggctccatcccgagcatatacaattgatgagtccatatttatcttataaatatgatcaatttatgnnnnnnnnttcttaaattgattctttaaattattgattaatgtgattttaatt

SEQ ID NO: 106458 - DNA, 705 bp, Cannabis sativa
tacacttactaaattcttagctattcttagaactaacagcatatcattaagtaacaagggtttatactcactgctggtatataactttccagcaccaacatgagaaatatgaagtttattaccatcacctataaccaatttttccttaccaccatactcatttttctgcaccatgttgttctcatcagctgtcacatggttgcttgcaccgttgtccacgaacaaagcttcactatcaacaatctcaagtgaagtcgtatatgctgctgcttgctgattgtttttctggtttgttgagccaccaaccttggggtcaaatcccatgtacgcctcatcgtatctgttgtaacagatagctacggagtgaccatagcgcccatagacctagcaagtgggtttgggtcaatttaaacgaccaccacgacctcttccactttgatttccaccaccacgagagtaatttcctcgactgcctcctgcttggtcctgattagagtgatagtgatttggatgatagttgcctcgaccacgattaccactgttggaacgattatcgagattagcattgggagtgactgaagagttagtagatttgttgttggtgtgaaggctcaggttctgaagccgctctatcttgctgtcaaaagcgagtaagatcccttgtagttcttgccaagtagtggaggatcgagcttcaatctgcaa

SEQ ID NO: 106459 - DNA, 533 bp, Cannabis sativa
cgaacaagaaatggtgagtgtgtactgatttctcagacctcaagaaggcatgccccaaagactattttccacttccaagaatcaatctgcatgtggacgcaacagcagggcacgaaatattaagcttcatggacgcttattcggggtacaatcaaatcaaaatgcatccacccgaccaagaacatacaagttttcgaacagatatgggtcttgttatccaaattttggcacactgatgtggcatcgcctaatggtgacatgtggaatcaactttgaatatctgctcggtgagtacagcccgaacaggatgcctcatatgcatgccgaagcaaagcgatcaaaaatccttgcagagcaaccaacacttagtgaattgagctttcacatcgtgagtcatcaaagaaatccctataacttgggatcacattgcaaagatatggcaagctgtccaaatcccaggaccagtgtattttgcatttatcatgcaatctttctgcttatatccattctaacgagaagggaaacacttcctc

SEQ ID NO: 106460 - DNA, 819 bp, Cannabis sativa
aggtttgttgctcaaagtaaaataagaattgataaaatttctgagagcaaacctaaacatttttgcctggtcacatggggatatggttggaatcgatccttcttttatttcacatgtactgaatatcgatcccaacttttggccagttcaacaaaaacggacgcttttggacaaagaacgagcagtagtcctgaaggaagaagttgaaaagctgtgcaacaacaacttcataattgaagccttctacccagcttgggttgcaaattccgtattagtacccaagccgtacaagaaatggcgggtttgtattgatttcacagacctcaacaaggcatgccctaagagagtttcccacttccaagaaccgatcagctcgtagatgcaacagaagggcacaaatattaagctttatgaacgcttactcaggctacaatcaaatcaaaatgcatccaccagaccaagaacatacaagttttcgaacagatatgcgtctatattgctacaaagttatgtcgtttggtctaaaaaacgctggagctatgtaccaaagattggtaaacaaaatgtttaaagaccagattgggcaaaatatgaagtatacgtggatgatatgcttgtcaaatccagagaggctgggggcacatagacgacctggacgaatgcttcaaagtcctcagaaaatacaacatgaaaataaatcccttaaaatgttcctttagggtcagctcgagaaagtttctaggcttcatcgtcaatgcccgaggaattgaagccaatctagagaagattcaagccctcctcgatatgaactcgccaaca

SEQ ID NO: 106461 - DNA, 874 bp, Cannabis sativa
  modified_base (185)..(185): a, c, t, g, unknown or other
caaaactcaaatatgctcaacccttggtatgcctgaagctactgaaggctctttctacttaggactgacgaacattattggaagaaagaagactgttattcttggctttctcaagaataagatcattaaccgcataaatagttaggatggtaagttcctttctcgtgctggtaaggaaattctgntaaagactgtcatccaatctcttccaacatatgccatgagtgtgtttctgatccctctgaaaatctgcaatgatattgagaaacttatggctagcttttggtacaaaacaaagagtgctagtgggcaaggacttaggaggtatgggttttcgtcatctccatgattttaaccttgcaatgcttgccaaacaagggtggcgattgttatgctctgactcatcccttgttagtcaagtctttatagccaagtactacccacgatcagcttttctgaatgctgaactcggaagtaaccccaattttgtttggtgtagtatttggaatgctcaacacttggtacggtctggtactaggaggatcattagcactggtactgcaacaagaattctggctcatccttggctccttgataatggtaacccttttgtatccaccactactccgggtctcgaccattatacggtcgactctctttttcatgtggataatagaagttgggatgtctctcttatgcgagatatgtttaatgtcagggatgctgaccttattctaggaattcccctcagtttctctactactgatgatcaatgggcctgggttggcgagaaatcaggccattattctgtcaaatcggcctacaatttgctgcaaagtcagaagaacaaccgttctggggaaaacaattcagg

SEQ ID NO: 106462 - DNA, 779 bp, Cannabis sativa
gcatttttattatttgagttcacaacctgaattggttgatggatagcaggagttggctggtttgtggcagggatttcagtcccggtttgttgagttattggtttggaggaaggtaattgcttagttaaggcagttgtcaatctcagaatgaatattgagagttgagaatgaaaatatgtgttcgtaaaacacaacatctctagagatgtagatttgtttggattcaatatcaatgagtaaatatgctttcattctcgaaggatgtccaatgaatatagatgccctactacgaggggagaacttgtgtcgttttgatgtgagagtagagccatgggcaaggcatccaaaggaccttagatggtcatatagaggtggtttattgtgtagtaattcaaaggaagtggtgcctttgaaaagagcagatggggttctattaaggagataagtggctatttgaacaagataaggccagtagactaagggaagatgggattgaaaacccaaggctcttgcaacattgagaatatgttgatgtttgcgttctaccactaagttttgttgaggtctttcaacacaagagtgatagtgtatgattcctttagaagcaaagaaggaatgcatatttagttctttggcattatcggattgtacaactttaatattatgcgaatattgtgtacaaaccatgttataaaacgatggtatgatatgttgaacctcagattttactttgagcatataagtccaagtaaattttgatttgtcatcaacaatggtaa

SEQ ID NO: 106463 - DNA, 590 bp, Cannabis sativa
cgagcagaggtaccctactcacgatctagaattcatagcaggggtatttgcgctaaacatttggcggcattacctatatgacgagaaatgtgagatatacactgatcacaagagtctgaaatacttctttacccagagagatttgaatatgagatacagacgctggttggagttggtgaaggattatgactgtgaaatcctttatcaccctggtaaagccaacgtggttgctgatgccttgagcagaaagggtcagagtcagttaagtactgtgaagcaaatatcccaataattagcaaatgagatgacccgagctaagattgagttagttgtggggcaattggctaatattaccctacaatctactcttttaaagcgaatcaaagaagtacaaatgcaagatccagagttggtaaaaacccgagaaagggtttcggctgggaaggctagtgatttctcagtggatgtaacgggaatgttacgattcaaaaatcatgtttgtgtgcctatggatgatggtattaaaagggagatcatggatgagtctcatacgactccttactcagttcatccagggtcaacaaagatgt

SEQ ID NO: 106464 - DNA, 592 bp, Cannabis sativa
  modified_base (517)..(526): a, c, t, g, unknown or other
atcaaccttttcatcaaaataataattattaaatattaaaaaataacaaataataatttttacatccattaaaataaaaaaaaaataaataaataacatgtcacttttgtgatagcccatgtcccaatcagtaaaaaaaaaaaataataacatatacaatttgaaccaaggcagtatactgccgaaacagtaaaaaagttatattcagcgtgtcacagtataaatgaaagaaaattggaaaagttagtaaagcatgtaaatttcccaaaaaaaaaatttaggcccttactataaagttaaatggtatttttaaaaattattaaaaaaatatgtataatttttatttggacccctaaaataagtgggtcctaggtgcgggcctagcccgcctatgcctagggccaaccctgcttgtagcttcataactaggttctttcttctcacaaacttcaaagataatttgcttacattaccttataatttttttccctaacttatacttaacataatttgttannnnnnnnnntttttttgttttccccataatacccctaattacatgtacccaccccaaccctctcttctcatcaat

SEQ ID NO: 106465 - DNA, 996 bp, Cannabis sativa
atatccactttactttatttgtttatacttttaccttcatttccatattctttaagatatacccatttttatagatgatgttcctattataccccttagattaatgtaaatcatgtgctacacttaagtggaggataagaatatattaggcaacccattcataaaagtgggtatattttaataaaatatgagggtatttttaattaatggatacaaaaaggagttatttctcaacttatctctatatatatggggcaagattatggtaagagctagcaaaagtttcatactaataggaaacttttttttaccattgattatagatcttgtgattattatgatgtaaggtatatacacttattataggactgcttatatacaattaaaactttatacatattatgataatatttaattatatatttattttaaaaaataaaatgataataataattaatttattaatttttaattttaattattattattattttctaaaattaatttgaatagttgtttttttttttgaagaaagtaatcagcagctttattaaacttcaaattcagcaaccaaaaaaggaagcagatcagttgggacatcccccatactgaaaacacgatcagggtaagaaatagcagctctagcaatcgtatgagctactaaatttgctgactgtttaacaaaagaaatagaaacaccacacaaattaacaagcaaaatttgacattcttttattacatcaccaaagaaagaagtcatatgaatcgggttacgaatcgcttgtgccaccaccgaacaatcagtctctaaggtcacctgaggccattgtttatcttttatccagcttaaagcctctcgaacaccaattgcctcagctagctcaggtcgaacacacccatgacaaagccgcgaagttgcttctagcataaaaccatgttcatctctagcaaccattccatagccatactcttgactactcccaaatattgatgcat

SEQ ID NO: 106466 - DNA, 1401 bp, Cannabis sativa
cattttttaaacaacctgaagtgaaggtatcttagttttattcaaccccaattgatttttttattaaaccattttaatttcacatattaatatctctatatttatttttgatagaaacgctcacagatcagtgtagcaaataggaaaaaaattaaaggagttgagccatgaaggatctcaatctatacatgctttatgttataaaagagtatgattaatttataatataattattatatttgtgttttgttgttattactttgaataataatattaaaaaaaaatatctgtcacagcgtgatccagagtctgggggattggcatcgatcccaaatacttgacagaccactcactgtaagcagggcaaatgatgggtgattgacactgctaaagagacattggtatgttttaagcaatattatcttctttatattatgtctaaataaattttataattaatttacatattattttgtgataggagaaaatggctaccatacgtgagacacaacaaacacagtccacctaaattactaaagagcgaggaaatgtcatcaaattagaagacaaatatctatcacttgtccaaattgtttttagacacatcgtggtcactaaaaaggttacgagcgtctaattagcacaagagagatgccagcaccacctaggtttacccaaccttctccacctcaggctggtatatatgttggagctgatgtcatagctgatatgcatgagcgaattagacagttggaggaactggttagggaaaattgtaaaatgatagttttcttgaagcttatgttctcagtaaaatattatatcgaggataatgtcctcagtataaatgagttagttaggccaaaatgaaagacaactaccgagaacgtatctaacttttgctgacaacatttgttttcagtatagtctttaacgagaacatcatcattgtccttgatagaaagtaatttttaacgacgagtctctaacgatgattttttaacgaggacatgtccttgttatatggttttaccgaggacatttgtccttactataaaccctattttttgtagtgacaagtgtaaattttagatttttttaatctaatttaattcgcacaagtgtggatatttatactttgcagattgaatttgatgaaattgtgcagattgaattggattaactattttatgaacaactttattataaaatttaaaatatcaatataataataaatttttgaaaacctttctaaaatattaaaaaaaattaatgcaattggattctttaaatattaatagatatttacttagaacatatgatggtagtgtttaaaatttgtgactatttggtcaaagattccaaaatgcttgtatgattcattattgagtattctaatca

SEQ ID NO: 106467 - DNA, 741 bp, Cannabis sativa
aaaacattgttcatgctttggagaccgtgttccctgatgcacactacggtgcatgctaccaccacattattatgaacgtcaaccacaagttcaagactgatgtcttgacgaattatatttacacaagtgcctacaagtattcaaaatcagagtttcacagagaatttgagaacattcgagcaatgaatgttgcaattgcacaatatcttgaggaaattggatttgataaatgggttcggtcgtactttctaggggtacattacaatgtaatgacgagtacctgggctgagagcttcaacaacacaactaagaacgcaagaggctttttgatcactgctgttgtagcattcccgaggtcaaaagtccaacagtgatttgctacgtgaaaagaaaaagctgacaagtggacaaaaaccctagcaccagaaatagaggaggatttggcattgcattttgaaaaatctcagtatttgaacgttgacacatgtggaccttacacgttgcaggttcaccctggagaaaaaattgagactggtggcgtagtggacctgcaggaatagacttgcacttgcggtttattccaaatcatgaagttttcttgtcttcatgcatgtgttgaagctcaacaataaagtattagcatgtacacgctatgctcgccatattacacaacaaaatattagaggagcacatatgaaggcataattatgccagttagtgacgaggatgattgggaattgc

SEQ ID NO: 106468 - DNA, 948 bp, Cannabis sativa
  modified_base (895)..(895): a, c, t, g, unknown or other
tacactgtaaaatctgcttattccatgcttcagcttcagaaaaatactcggcgtagtgtgaacaattcgggattctggcacaaactttggcaccttaaaataccacctaaagtgaagaacttcatgtggagagcagtttctgatgctctaccaacttgtctccaactggttactaagtgtgtaagtatttccccaacttgtcctgtttgccttcaacatgttgagacagcttctcatattcttctcaactgccctcttgctttaagttgttggcacaaagctgatttgatccctcatgctgattcgaatggcactattggacactgcttgacagtgtgtttaatagatatgatgatgatgttatttgccttgtggttatgatttgttgggttctttagaaagcaagaaacaccttggtttgggataaaaaagcttcctcttctactcaaattttcacttcggcttgggttactcttgatcattggcgaaaagctcaagataaaacatgtttattatcatcctctctcttgcatgatggtagtaacattgagcaatggacgacacctgcttctaatacggttaagatcaatgtcgatggtgcaatatttgagaaggaaaatgcctatgggtttggtgtggttgcatgtgattcgaatggccaaattattgactttattgccaagtattaccatgggacttacaaggctgacgttgttgaggctttaggggttaaggaggcccttagttggctaaaagccaaagggtggagcacgatcgaggtggaaactgacagcttactcactgttcaagcaatctttagtaaacaacaaatatcttatgtctttggtttgattactaatgattgtaaaattttattgtcttcttcacctaatantagtttacgttttattaaacgatcagcttatcgagtggcccattttgtggcta

SEQ ID NO: 106469 - DNA, 638 bp, Cannabis sativa
ttaaattaaataattaattaattaaatttcaaaaatctttaaataaataaatatttaattttaaaattattaaaaaaaataatttaaaattaaacctataatttcaaaattagatttataataaatctaaatatcttttcaaaattatcaattaacttttcaaatttatgttatttttaaaatataaaattaaatatctaataaaataaaatgatttatccaattttataatttaattttaatttaataacaaacttttaaaaattgacaaaatatctggttagtttttcaaaattatctagattattttattaaattatatcctatttttaaatgtcaaataaagtcattttataaaaaatatttaaataatcaaaatataaaaatttcaaaatcagataaaataattaaattttaaaattaaaattaccaattaagcaaaaaatgtagatgtttatcttttttaagtttaaaatctactaatatctaaaattaattaataaaaataataagtaattttaaattgataataggatttgagatttgaaaaataaaaatctacataaaaatttacacaaaaaatcgaaattaaattacatgaaaaaaatgaaaaaattaaaaaaatggcaaaaaaatgg

SEQ ID NO: 106470 - DNA, 1012 bp, Cannabis sativa
atgcagctacagtaattaatttaattactattgcttcatctttcgagcaaggtaaaataataattaggccaacgaactaagatgaacctcttcaaaaaagattagtttagtcacttcacgtaaatttagtaggttttacctcggtcttcaaatctattccatagatgcagaagacatttttaataggtggtctctcccatggtgtgagtggatttaaaactggatcaccatgatataacctgaaatacgaagaaatgaacaaaaataaatatgaaggacacacttaaaagaacagtagaaatcatttaagactatggaattagagagttacatttactaataaggctctaaatcttcacctatagattacttttaattaaaaaaaaaagtcttgttgcaaatttcaacttattgtaatagaaagtgacttcaggtgtgtgtggtgtaagtttcgctacttagcagggagtgtgcaaaaagtttttgttttgcatcgtaagctaatacgcacttttgtaattgatacaacagcctcttactgtccggatcataatcttctattgctttgaaaaaggttccatccgacatttctcgagcagaaaaggataactgagttggaagtccacattccatgctagtcaagttagactctgctatttcggtaattgatggataggcctcaagtcctgtgaatagaaagagggtgacactcagtttgagcataataacatattgccacaaaaccaacatgagtatcaaggttttaccatgggttgaaggaatttcaatatttattatgtttgttggccacccagagaaatttaaccgaaattcttgctcatcacaaaaatatgtttgatgactctttctgctccctccccaagagaaatgcttcgagtatacattctccgccctacaatactttgaaaatggcatcatccatagagaagaaccaaatgaattgaacaacaggcgagcagtcccctgattctcacaagattatataaagcat

SEQ ID NO: 106471 - DNA, 512 bp, Cannabis sativa
cacgacatgtacaatcattatcaacgatcagctcgactcacagtttagtaagcctttattactttagtagtttatttgattagtatgttataagaaaagcgtgataggaagcatgttagtagcttgatagttgaataggcacatgttttaatttccaaaataagcggcaattagtaagttattcttgatcgcgatctgaccaagctagctcttcgatttgcaggctaaactaatagaatggacgccgggaaaaacactaggagccagggtgactcgtttagatctagtggaagtgtgggagctcatattccgcataggccctagaggtagggcacgcggtcggagagatgttaactcggtgtaggttgccaagaaatgggaaaataggtttgcagcaatgcaagccagaataaccgaataagatgaagaaatcagacgctagaggcagcatggtgctccaaaaatgcaaatggttccctcccctgctatgcaggaagggcaggttgttgcag

SEQ ID NO: 106472 - DNA, 667 bp, Cannabis sativa
  modified_base (216)..(217): a, c, t, g, unknown or other
agtatattaatatagggatattgatagctaaactaactgaattttaaatttttttaacacttaactacaaaaattaattttttgggggcaaaactacctaaactccgtttcattttgctctgtacctctccgtctaaaaatcaaagttaagtgtcacaatggactgctcacgtgtacatatttgtacacgtggaaaatttttagtggtccacgtannattaattttaaaaaataattattaatatttaaaaaaattaaaaatcagaagaaaaaaattaaaaaatatttactttttgggatattagcggctaaactacctgaactttaaattttttaacacttaaccacaaaaatcgattttttgggggcaaaactacctaaactctcatttcgtttttaacacttttcctttttcttttcttctttttcttaactgaaaaaaccctatcacacagtcgcctaacccacgatccaaccttctccaactcccctctcacacactctctctcacggtgcacaacgtcggccttctccgaccatcccatgtcagacgggctgcagaactgaaccccacatccaaaaaatctaaccccgatcggccctcttctctctctctttcgatgtgggagggagggttgagagattagggtttcagaaagtttaagaa

SEQ ID NO: 106473 - DNA, 516 bp, Cannabis sativa
gcatgtcttagatttaactagcatatcatccacgtatacctccatatttcttcctaagaggcctttaaacattcgatttaccattctttgataagttgcaccagtgttttttaacccgaagggcataaccaagtaactgaatacccccttgtcggtcctgaagctattacattcttgatctgcgacatgcattttgatctggttgtatccagagtaggcgtccatgaaggatagcagcttgaatcctgaggtggcgtccaccatttggtcaatttgaggtaaagggaagtaatcttttgagcaggcttcgttgagatcagtgaagtctatacaaacccgccatgtcccattcgatttgggtaccaataccggattagccagccattctaaatagtacaaatcccggatcaggccattagttaacatcttatctacctctttctctaaggcgtccacttttactggatcaagaggacatcgcttttgctgtattggtggcatgtctgggttaacatt

SEQ ID NO: 106474 - DNA, 840 bp, Cannabis sativa
  modified_base (201)..(201): a, c, t, g, unknown or other
ttttagtgacacttcacacgtgtcactgaagccttttgcatttattttttgcgtgtcactatatgcgtatagagtcatgttttgtcagactgaaaaggtaacagccacacatatgaagtgtcactatatctttttttctttctttttccttttttattaatatttttggagatatagtgacacacaaaaagtgccactatnttaaatatttttctaaaaaaataatatttaatttaatctaattcaaattttatatattacaaatattaatttatattaattatataaaattaaatataacaataataattttcattaactaaatgtaagcattctattgtaaactaataaaagagggtaaaaatttacaaatctccatacaaagtttgcagtatagatacaaagaataaacttaaataaaaatagtatacaaagaggtaaatgtaactgaaaatacacacaagtgattcaaactttaaaagtaaatcccaattacaaactttaataacctaaatcctttagcaaaaaaaactttaataacctaaatctcataaatgtttcagtaaccacaaatccacaatacaaaactttgaacaaaaattagttaatggatataaacataaaattttaacccaaaaaataaacacagaacaatatttaatttccggagtaaacacattgaaacagaaaaaagtctagaaaaaggtcagattcgctccaagatccatagagcttcaaccacaaccatgatccaaaataatagacgagctttaaacaccttcagccataactggaactattgacgctgagatccctacacaaaagagagagagagagaga

SEQ ID NO: 106475 - DNA, 782 bp, Cannabis sativa
caaaaaatattaatctaacaataataataataaacaattaataatactatattataatataatttgattttagactaaatataatgtttattaatagattataatttaaaataaaattattaattttatataaataaatttaaaaaatatatattttattacgatataattattttaatacatatctatattttattaatagaaacttaaaaaatgtataactaaatataatttataaattatttttatttatatgtggataagacttaattgtttttataacaaattaaaaattgatcttcaataaagtttataatgtatctctaatttttatgtggcttagaaactaggaaagaagaaaaagaacaggaccacaagcacacgactgaagtcaaaatcaataacaataagaatgcaacaatccttttcattaaaaaaaaaaaaatgccacaaacctattttcttgatgagaagcatccacataattcttctggaatcctccacacaaatatggaaattaaaatgagacgtgtcagaagtataggtggctgacattctatgtttttctaatttctagtatagtgtctttattttcatttgaaaaagttcttgtgttcccaagaaatagattcacttcttctagctcacataattttgtaagcccataccttacaaaagaaaaaaaaaaaaaaagaagaattgataagcgcatacgtcagcactagcctaagcgcatacgtcagcactagtcacagggtgttaagaatcgtaagttacattaa

SEQ ID NO: 106476 - DNA, 756 bp, Cannabis sativa
tttaacgtctggcgagccaacctctagtatggagtttaaatcaatggtggtggaaggcaagaaagaaagaaagaagatatgaaatagagcttgcaaaaaaaatgttggttggaaaaaatggatctgtgcgtgcttgttgaagatgatgaagaagattgagtcaaagagaaataaatgaaaaaagaaaaaggaaataaaaaatattaaagttatttatttatttaaatcattttaaattattttttaattgaaataatgagttggctcaataatatttaaacacgtggcatttttgttagcatttaacaggtctgttaaattgagtaccaacggacttacgaaaatagcgaccttagggactattaccgtcaatttttgaggttggggacttatctgtaatatgtgatgtatatttgtatgtatatgtgtgtgtatatatgtaatatatgtatatatatatttggataattttttaatgggtattaaaaaaattgatgaggtggcaatttagtgacttgcttaagtaggttaccaacaagtttttttcttaaaaaaattatatttacttttttaattatagagaatcgtgattctgataaattatttttagaaattaatttattttacttaaattattatattatccttacattaatattaaaatgtataatgctaaagatctatttcgattgaaaggtttgttttttttttttttttggggggggggggggggggggtgttttttttttttttttt

SEQ ID NO: 106477 - DNA, 507 bp, Cannabis sativa
tgatcaaagaactctttcaccaatttgcagacttccggacctacagtattccagtacttacggtagaaaattccagagaatccgtcgggaccaggcgccttgagagggtgcatttgaaagatcacttcactgatttcagagtcttccggtgttctgcatataagtaagttttcctcgggcgataccttgatggtgaagagagcgtcaagatcttcattaatgacagggttagtagattggtacaattcttggaatttatcttggaagtattggccgatgtcgtgtctgctgcgaatccagacgttgggactggtttcaatgcagctaacccgattttgccttcggcgcactaccgtagatgcatgaaaaaacttcgtattattgtcaccatacttcaaccagttctctctggatttttgcttccatattctttccatctttgcttccaattctaaaatttccaattgaatgccagcctcattctccaacaaactttgagttaccgga

SEQ ID NO: 106478 - DNA, 776 bp, Cannabis sativa
tttattttattttattttatgtcaatttcaaaaatgtattcattttaaatacattggatttcgaattttgctatatatatttatagaaaattagattgagttaaaattaaaatattttagaccaacttaaattaagaaattttcataatatttattgagaattattactaagatgaaaaatagttttatttatttttagatctatctaagtataattttataaatattaaattaaaatttatatttagagttatctaaattggtaattttaattaaatatacatatatatatatattaaaataaatattagatgaaaaatacactttaaataatgagctttattataaggatattcaatttccattgttggttctacacagttcttgttttagtgagatccatccccaatagatggacgttcattagcaatttaatgccgtagaatctcgaaagataagtattattgcaagtgttttattcttagtaacatccatccgaatagtgactgtcaagagttggatttacaaggtatgaaataatagtagcagctcatgaaataagaatgaccttgactctcgactaaaatgaagcaacgtcggattctctttttgatcgaataaaaggttactagaatgatatccattttagttgagctgactgctctattcaatgattgatatctttgactctcgcccaatacaaaacaatgtatcagtttgttagaaaccttagaaattatttaggattgtttgtttttgtattttcacttgtcatt

SEQ ID NO: 106479 - DNA, 727 bp, Cannabis sativa
caaaagttttacaatatagtattaaaccaattcttctgcttcagtccattctggaggaaattgctcccacgtgggtgaatgtttccttgagaatgaaagatgacccggagactgataaggcttttggatgggtgcttgaaatgtgagtagtacttgattttagttttgctgtgactgccaacatatctttattttttctaatataaatattatatttctttaaataaggtatgcatatgctgtagcatatgctttacatggcgtgcggctttgattttatgaatctctactaatgggtattgtcatttgatattgaatatggtgtataagaaggataccaaggttgaatcaaagtaagggtatgatacttaataatttaagtattttttcatttattaattactttattcaataagtaatacccctaatattttgagcttctaatcttcccaagtactaattaagctgcttcacacataacaatgagtggtcatctcatctttatctttaaatcaaatcccatctaacactttctcatatttgtttttctgtttcaccaaaatctgtgttctttttttctttggtcaatagattgtccaatatgctacaagagcaaccacccacaatgaaaagtgcaaaatacaaaaattatactattgggtctattgaagcaaatgaagattgaagtccaccaatgagtatcattagttttcttatctacaatttt

SEQ ID NO: 106480 - DNA, 2237 bp, Cannabis sativa
attaatttcttgacttgcttatgtgcttgctctctttatactttgacacttattttcaaaattatatcaactctatcacaaagctctccatctgttttttcttttgttcctatcgtgttagctttatgcacttttgggccaatattccatcatatttgtaaagctcttttccttttgctatatttgtattaacgaattatgaattaggcttaagcactaatatgtatgttgttttctcattcagatgtatagcagtggcaacccaacaaacatggctaatcccattaaagatgctagcgttcaggttgatatccagacaatgattggaaggttgacattgtatgaaaccaccctttgtgaaacactccagtgggataagctcaattatgatgttaatctagaccgggacactattgattatttgtcttcatataataagaatgatatccagttaatctgttgccaagctgattcaaatacaagatggctaatccctgatgtggttcaaaataaattcattcagtcccttgactgggacattggcatggatgataacatgaagataacttttacttgggtcctatctagggacagaccaaaaggcaaggaagtggtgagaaatacatggattgttgatgaacctaatcttccagaacgaacagatgttcaaaaagttctcaatggctccttgaacagctttaggataaataatgtctatccaagattctttcgtgtcactggctctggtgacatcagactcttggaattagaggttggttattcatagaaactacctttcatcatttgctttatcttaagttttttgagcttcacatctacgttgtttgatctaaaatgaattttgtaaaagcagttggtgatatttcataatatgaatgacattaatgatattaaagaactacttggtaaaaagaatattagataaaaactgtaagaatctttggtttgcacaaaaaattgatttaatttgaagttctatgataatattggatttttatcataattaagcatatttttcattgaagaactgatatatagtggtattttacagaataattctgtaagtgggaaccttgttatgaatcatgcgaactatgaatggtggtcttttcatgataccactgcatttaaaggctgtggaggtgtggcaggaccaacagcgattgtagtatctgaagaaacaccgccaagtaagtttcactataacatcttatgtttatgcttggattggtctaataatatttattctcttttaacacattattgataacatttcagctggtattcttggcgatactctaagcaagttcagcatctggggtctctacataacatttgttcttgcagtaggacgctttatcagacttcaatgctctgacttgcgaatgagaatcccatatgagaatcttccttcatgcgataggtaatacagcagttcttttctttaacccttgctaacaacatagtagcatgcattcacgtacaaaaattaagtctgaaaaatgtgtttctttcttcttatggaaactttatcaactctgaattcttctttattaacccaaagaataaacaaatagctggaaagttctgttcttaatcttaatcacctatctggtaggcgtttccttgaaaatttcctttcactcaactctacaatccttgggcaaaaccccattttcaaattatgtgatttactcagagattaaaaaaattagtatcctatttaaaaccatcaatacaaatgatcatattcactgcttttctagtactatgccctcccatttcaaaccatcaatctttaacatttttgtttatgtggtaggttgctggccatatgtgaggacatatatgcagcaagagcagaggatgagcttggggttgaagaggtcctttactggacactggtcaaaatatacaggtcaccccacatgctgctcgagtacaccaaagctgactagatttacatacaacacaactatataggctacacacctttaacttgacacattatagaaacaaaccaaagcactatacaacgaaagaagaaagaaagatgggaccaaagttatgaaaaagttccattaactttcaggtgttagtattgttgataatctgctcacctcacattgtttttgagatgataattattcaattattattattattttttagtttatgtacataacaacaaagtgtattcctattttaatttttta

SEQ ID NO: 106481 - DNA, 767 bp, Cannabis sativa
tataggtacctaaccgttaaatattaagtcattatccactttttttattggtttttttaaaaaaaaattaaatttgatgacttggacccaatcaagaattattacgtgacaatttacttaacacttaacacgtacaaaagtttcagaattataacttaggtattataaccgccaaaaattaaacttacatatttatttgcaactggaaattaaacttaagtatttatatcgcaaattactcaaaaatatatagaaaaatgagctcatagtatatatggttatacatataaagagagaaagatctcattatttattatccttaattacagttaacaaagctgaattgtggaagtgtggtggtggtgtgcctatttgatcatctattcattgatatggatactcagcaaacatgttcttagtgtcaagaaagaatttaagagaaagtttttctggacgactggcttccaccctatcaatcgcacttccttcaaaaaaaaaaatcgtaatttctaaagacctttatgctttatgttattcacatattccttacctcgcttgtcattgacatatcctatattgagaggcatcatcagcaactggtaaatttaccctatgggttgagagctacagacttccttttgcacgatcgagctgtacacttgagaaattgtggtctgctcgagaaagaccaatctactatggatgagttcacggtgcccattccccccgaggaagaggagcaagactatgttgctcgagctatatat

SEQ ID NO: 106482 - DNA, 694 bp, Cannabis sativa
  modified_base (337)..(344): a, c, t, g, unknown or other
gcaaaccttagttaacagttctaacttttcttaaggtcatgatcaagatatccatgaatctaaaatttttttacactaattacacaaccattccatcattttgaaattttcttatcactaggatatactctagaaggacttaggcaactactagtaactaatcatagaccttatacaatcatcaatatgaaaatcaaatttttggggaggtaagtttgaatacaatttaaaaattcaacttaatgatctttgaaatgcatatccaccaaatatttctccacctctattagttcgtaagatctgtaaccacttaccttaatgtttttcaacattgctnnnnnnnnatgaaatttctcaaacatttcaaatttctttacataaggtaaaatctagagtgatcatcttaagaatttaatgataactcatatccaccactgaatgtacatccatattcgtatatagatgatcctacttttaagtggatataggcatacattctcttcgcaaagattgatcttgtcaaaaccactatgatcaagatttgaatgccatagataaattatgtggttatggtcttttgatgacttaggtctagttactataaagagttcttagaatagtccaagtggatcttgatcacagaatacaaaactcacattccttacattaacttacagtttagatccattaacaa

SEQ ID NO: 106483 - DNA, 569 bp, Cannabis sativa
atatacccccaatcatagccctaaccccgtgtccaacacagtgctgagtcgatagaacattcgtacgatagtactaatgaccataatatcaacctttattcggtacgctagtcatgctctagccataccgatgtgatactatcaagtagtacgatactatcgaccatacacaactagaagaagggcctttctcttcggtttttaggtcagtttatcttcgatttattaaaattcgctaccgaagttatttgaggcgatgacatatgttctaaaatactgaagacttaagggggacctatgtcttcggttgttatttaataagcgaagagataggtcacttttctcttcggtttttatataataactgaagacataggtaccttttctcttcagttattatagaaaaaacgaagagaaaagttacctatatcttcggttgttatttaaaaaccaaagacgtagatacattttctcttcagttttgatataataaacgaagagaaaaagtacctatctcttcgattattatataaaaaccgaagaggtaaggtcttcctatttgaattata

SEQ ID NO: 106484 - DNA, 521 bp, Cannabis sativa
cttatgtgtttaatttcaatgttttagagagttcttatttaggatgttaataatcaacatacttatttttaaatctagatcctggtaaaatattcccaacaacttgtataagagccatgtcaatgatttactttcatgaaatatggatttaaaatgataaattatgtttattgtgttgatttggatgtgttcatgttggtttatgtgtattttgataattgtacgtgaattacgaaatttttccatgaaaataatttaattttttttatgaaaatattttatttcgattccttgtgaaaaattaagcaattttggtttttatgaaactcagttccaataaaaattgagaaagttatggttgtttgaaaatcggatgccatgggtgtcgagatggtgctcaatcgcattaggcactcggaaaacaccccttatgcaagcgcaaatttcagacacagattgtctgattgctcagtcacacgctattcagacaagcatggactctgcaccttgcccacgaagac

SEQ ID NO: 106485 - DNA, 582 bp, Cannabis sativa
aatggtatttacccttaattattttatataatattttttgtgctagtttttaattattattttctctaaaaagattatatatacagtagaacctctattcaagaatacacttgggactaagaaaattatattataattaagaggttataactaaatagagttatactagaaaataaaaattaaataccaaaaaatatcaatataacaataataacaataaacaatcatgagtactatatcataataaaattattttagagtaaatatattgtttatacatgtattaaaatttgaaataaaattattaattttgcgtaaataaatttataaaatatatatattttattaaaatgtaattattcttatatagaggtatattttgttaatacaggacttaaaaaatatataactaattacaatttagaggttattcttatttataacatgtttaaattaggacttgattttttttataataaattggagattattcttaaatagagtattcttaaatagaggttctactgtatatttatgacaacgttttttttttcttaataaatagattgggtttattgtttt

SEQ ID NO: 106486 - DNA, 695 bp, Cannabis sativa
aaatgggcgtccataaatcttaggatctccggtctggctgttgcatccatgagctaatctattcttagaagtggaaaacagtttttggagcacgccttgttgagatcagtgaaataaatacatactcgccattttttgttgggcttgggtaccagtacggggttagctaccctagccaggtagaaagcttctatgatgaactcgttattccgtatcttttttcctcttcttttaatgcttgtgcccgttctttgtctaataatattctttttttttgaacattacataagtttggatcaatatttagggcacgagatattacaaaaggatcgataccgaccatgtcctcgtgtgaccagacaaaaatatctaggtttgctcttacaaattttattacagctaattttactctgagcaacaaagctttgccaattttgagtttcctggtcgagacatttgggtcgattttgatctcttccaattcttccagtcaccttacatttgtatttggttcaacaagtcagggatccacatcctcgtccccgccttgggcgacttcctattggccaatacttttcccctactccgaattctggtcagaggaactttcctttttggccttagttagggcaagattatagcattctcgtgcaatttgttaattccctttaaggcaccctaccccattctttgtt

SEQ ID NO: 106487 - DNA, 584 bp, Cannabis sativa
tatcatattgctcatatattagacatcttgagttaaatttgacctaaaataaaccataaagttgtatttggtccaatttttatatttgtactctaatgtacaaggtgtaaattagttataaaagttaatattaccattaatattcattaaaaatatacaaataattaactttatttatattattttaataacttataaatataaaaacattttttattaataaatagcattaataagtggcaaataagtaattaaaaaatgtgtcatttattgtcagatttgggctaaatttggcacacattttagatcactattagagttaactttttgtaaaatattctaaaaaatggcaatacaccacatttatagctctccattggagatgctcttagggttgaacattgggcgagttgattggattttgggttcaaaaaattgtactcagacacaactcgtgaaatggtttcaggttcgtgggttcaggttgaccggattgaccggattggtcgggtcaacaagttgacccgatcaactctcggtcaactttcttttattttttattatcacccaaattctttatagaa

SEQ ID NO: 106488 - DNA, 612 bp, Cannabis sativa
cttgcaacgagggcactcagggtaggagtaaccctggcgtccacctctaccttggttcccacggaaccgcttgctttgccctgaaccaccagattccgaggtaaccttccttttctgaccagtggttgagtcaccaccatctctaccataaacaggaataggaaaagtgggggttccaccaacactcggagtccctcggggctcgtgaaggaatttcacagcacccttagctctcaaagctttttcaaccatttcagcatatgtggttgcttcattggtggtgatcaccagatcatgcctgatcttcacattcaaacaggccaaatacttctctttcttgctaaagtaagttggcacgattcccacggcgagcttggccagacggtcaaacttggtgagtaatcgacatcccttcagtttgcaccaactcagtgaattctttttgcttagcactgcggatagattcattatagtacttagagttaaacaactccttgaattctcccagggcataactatgacgtcctgagtgagggttatcaactcccaccacacgagagcatcctcctgagactggaaagtggcacaggtcactcgatcattaccaaccac

SEQ ID NO: 106489 - DNA, 1429 bp, Cannabis sativa
  modified_base (897)..(898): a, c, t, g, unknown or other
  modified_base (1291)..(1292): a, c, t, g, unknown or other
taaccattgatgcaacaacttggttatatggaacaatttaatcgacaaaaaagtatggaggattgatcagaatatgcaaaagtatgcactgtaggggcttccattgttcgattggacatggaaggttctctaagaattcgctggcccttctcgctagtggaagaaacctatccttaacacccactcgatttggatagaaaaatcgtttacgtgttgatagttgttgagcacaacataaggtgttcttgctcaccttaacgaagcatggaagattaatcacaatatgcaaaaatactagattgatcggcttcgagatcaccataaccattgacgcaacaacttggttatatggaacaatggaatggacacggaagtatggaagattgatcggaatgtgcaacagtatccactgtaggggcattcatttgtctgaattgacatggaaggttctccaagaattcgctggccctactagctagtggaagatacctatccttaacacctactggtttttgatataaaaatcgtttaggtgttaataggttttgagcacaacataaggtgttcttgctcaccttaacaaagcatggatgattgattacaatatgcgaaagtactagattgatcggctttgagatcaccataaccattgacgtaacaactttgttatatggaacaatgggttggacagggaagtatggagaattgatcggaatgtgcaaaagtatgcactgcaggggcttttattgtccgaatggacatgaaaagttgtctaagaattcgctggcccaaatagctagtggaagaaacctattcttaacacgcactggttttggatataaaaattgtttatgtgttgatagttgttgagcacaacataaggtgttcatgctcacnntaataaagcatggatgattgatcacaatatgcgagagtactatattgatcagctacgagatcaccataaccattgatgcaacaacttggttatagggaacaatggaatgaacccgaaagtatggaggattgatcagaatatgcaaaagtatgcactgtaggagctttcattgtccgattggatatggaaggttctctaaggattcactggccctactagctagcgaatgaaacctatccttaacacccacttgttttggatataaaaatcgtttaggtattgatagttgttgagcccaacatatggtgttcatgctcaccataacaaagcatggatgattgatcataatatgtgacaatactagatttatctgctacgagatcaccataaccnntgatgcaacaactaggttatatggaacaatggaatgaagacgaaagtatggaggatttatcagaatatgcaaaagtatgcactgtaggggctttcattgtctgaatggacatggaaggttctctatgaatttgatgg

SEQ ID NO: 106490 - DNA, 739 bp, Cannabis sativa
gaacaaaaaacaaagtcataaccggtttctaaacagcgaaagaatagaataaacagaaaatgcaataaaataaccggttataaaacacaaaaaaaaaaaaaataggaaacataaaagaccaaagaaaataaaaaataaccggttaaaaaaacagaaaaacaacaaactaaaaagaaaaaatacctcgggagacggcggatcgaaaaactcattgtcattcccaccaacatcaatattatcagagcaagaatattcaaccttctcctcacaatatttgggcacagatgaccccttcttgctcttcaatagttcaatcactttcatcaaatttaatattgaactcatcttttaaatttttaatacttaataaaattttcttttggtcgtcttgaatgcagaccaaagccttctccaaatttgaaaactgaaaacaaacaataatacataacaaacataaaaaaaaacatataagaaaaaaaacaagaaactaaataaaaaacaaactgtaacaacgcaaccaaaaagtaaaagaaggcataaagaacacataccttcccatcgaaaccttgaggtttctttggaagataaaccggttcaaatctgaggttttgcaagcagctttcttaagctcacggacaataggataaaaatccttaacagtggcctgaaaaattggaaagaaataaaaaaaaaaccagttataaatacactattcaaaaaaaataataaaaaaagaaac

SEQ ID NO: 106491 - DNA, 1886 bp, Cannabis sativa
ctcgacattctaaatatctaactaaattgctctgctatttctaaagttctaacccaagatagagtgactctataggccatatatcacattctattgttaccgggcataaattagaaaaaatatgaaatttcacatataacataattagcacacctagaattcaaatatatctccataattacataaataataattaaaagtctaattctaaattaaaccctaattatctaataatttcatattaaagttaagcagtcattacaaccaaagtcaaccacaaaccaccaaggccaccaacccctggctctcccacctcccaaagttcccataacagttggttggcggcagccataagtcacgaacaccaaaatccaactcgaagaaaagaattgttagcacccacgaccaatcgaagtccatcctagagagttctctaggccaaggctcgagagcctccagcgaagatgacagcaacgacgcctcaagcaagagaaaaagaaaagtgtaaagccctagttagttaggaagaagatttttcgttttctgagagaaaaaagaagaagattttctaaatgagaaactgaatattaatattaatatatttttttattattattatacaatcaatcataatgatttacatttatgcatgtataaattttgaatagcctaaaaattgatctattatgtagcaccttttttaatttcaaatcctaaccttccaatcatatatggttgataatatgtacacatattattaatgtaactactaactatctagggtcacacaacaaatttatatatgtcaaaatataaattactctagtaactatcacacataattgtaccaaaaactcattataatattcttgtacatacacacatgtctttgactaaacccttcattagtttaactacctctaaaattttcataagttattaatatatatcctcctaaaaagaagtgattaagggcaccaaagtcgttgatgaaacatattatacatttatttttattattttttgaataaatctcaaacatttattttggataagagtaatgttcctacagatagagttgactgagctttctgttgctttaacttttttattttattttatatcaattaatgacgttatattttggatttaagttattaataatatacatgttaatacatacttgatacttacttatgtactatgtcttcttagagagatttctgatttttgaagatagggtttgttgttaattaggttttcgatgagatcattaggatgggtccacttaatattaatgtcttaattaatatattataatcttataataacttaaataatcacttgtggtacttttaagtcttgcttgagtgagttttgtattagtcatatgaaagaggttggaaaacactaaaacaatagatatatgcatttgatgagatgggtgactccaaaataatcatattttggaaaacatactgcaattgcttacttgacttggagagcaagtaagttacattgccttttatgagcataaaatcattaggagagaactcgttatgggagatgtcaaaaatattgttcatgtagatccattcccttaaagacaaaaattatagatattaattgattttgggctttggatcatgtatggttatttttctttgtacaagaaattttgatcgtttgattgtttttctttttgttgttagcaattggttgtttgggggtgttttatcttgtattggtttttggtataaataatatctacttacccaagataataaaagacattataagtgttggttattaatatgtcatactgaggggcggacccacattgtagcgaggggggcagtcgccccccttgaaaaaaaaaatcgaga

SEQ ID NO: 106492 - DNA, 1965 bp, Cannabis sativa
tgtcgccatcttgctctccgggagcatatgagaattacatgccttctccgggaggcatgcctaaagtaatcctttgctttaagaagagttagctgtttcattcaaatgctaaatccttcccatccacacgtcatcatccggttggtccacgtattttgggcaaaatcaggggcaacacatatcataatgagttttctcataatgagttttctataaatttatccattgtctttttttagatcactattttgtgtgagaatttttatttaaaatttaatttctataaattcatcaattgtcttttatttttggattagaaattgtatgataaatttttatacaatataaatttatttttctaagtactacaaaaataaaagtactgtagaataattactcatataattattttaaaatatatatatatatatcaaaattttaaatttatatagatttacaactaaattatcactaaacaacatcttaaaaaaaattgtttagtttatttcctagttatatacatatatatattaagtaaagggttcgattaagacgtggtgtgttcaaaacgaaacagctttgtgatctgctgtccatatttcgataaaaactcgtaattataattcttattaaatattactgaagcaaatacaaatttaataaactgtggtgtctcttgttccatctttttgctcttttttctctctcctaaaccatctttaaattccttataacatttccactctgtcccaaatcaaataaaggaaggaattattaaagcccacacccgagtattagaaaacagaaaaatagtgctgccgtataactgatcttgtcagctcatcggctatggccatggctgtagacatggacatgatcatggaagacggtcttgagctagatttatctggttatagcaccacaaccactactactactacttctacaaccaatacgactagcccagaagattatgatcatggctgcgcctggaacgcatggtccccagtcgtggactggagcaccctcacaggtggccatgacagtttccacgacttaatagaatccatgatggaaagcgaaggagaagatgcagatggcgaactcaattcgttttcaccgtcaactaagatagttgctaatgaagatgagtattattcggccagtgatgacagtattactagtcctactgtattggtggaaaatgatgataagggattaagattaatccacttattgatggcggccgctgaagcactcggcggtgccagcaagagccgggatctggctcgagtgatattggttcggctcaaggaattggtctcccccacgggagggacaaacatagagaggctcgcctctcaatttactgacgctcttcaacacatactggatggggccatggggtcctcaagtagtagttctcacgccaataataaacatttcttaaacaatcatcacggaggagataacgaccaccagaacgacatcgttgcagcgtttcagttgcttcaagacatgtctccttacgttaagttcggccacttcactgctaatcaggccattcttgaggcagtggctcacgaccgtaggatccatatagttgattatgatatcatggaagggattcaatgggcctcccttatgcaagccctagtgtcccgtaaggaaggcccaccgggcccacatctaaggatcacagctttatccagggctggcggtggccggagatcgattgggacagtacaagagacaggtcgacggttagtggctttcgcggcttcgattggtcaaccattctcgttccaccaatgcaggcttgattccgacgaggctttccggccggaggcgttgaaatcggtgaagggagaatctcttgtgatgaactgcatgcttaacctccctcacttcagttaccgttcgccggagtcggtggcttcgtttttaaccggatccaaatggctg

SEQ ID NO: 106493 - DNA, 567 bp, Cannabis sativa
  modified_base (348)..(349): a, c, t, g, unknown or other
cctataccgtaggtatcttaggggttaggtggatataatcttttatcccctcttgattgatgtgattcctcacaaagtagtcgtcactagccttatttatcacagcgtaatagctgaaaaagaggggttgcaccatcagtcatatcgtttatggtagtttcaatatgtcttcccccatgcggcattaaatgcgaagtgattgttcaatagagtccagtacctcccgaagctgccttagtatggccctggcctccaggagcataaagatccttctcatatctttcccgggagtcatcttcccagagacactcctctgttgcctaagacttggttgatttctttaagagnngatcctctcagctccacgtgtcgtctttttacagtaacacgtattttaggcaaaattaagggcaacaattttttttaataatttcgtgatatcaatataagggaagttacttgttttttttaaaaaaaaaaaatgaaagttagtaattacatatataatacaccggcctctaattcctaactctgaaaagaattaaaaaaaatactaataactgccaa

SEQ ID NO: 106494 - DNA, 558 bp, Cannabis sativa
  modified_base (190)..(207): a, c, t, g, unknown or other
tgttataattttttaaatccaaattaatactgttaaaatacaaaacaagtaaacaaaaaaaaaaaacatcacaaaccaaatttgaaaagttaaaaattaaagtgacgtttggtaacacttttattttttaattttttaatcacaaaatttttgtttttgaaaaataaaaatgtgttttgtaactactttnnnnnnnnnnnnnnnnnnacagaaaataaaagtgtgttctgtaaagttcttttttttattattattttttgattttatttaagtcgagtctaggtccgggtcgtggggggattagggtccgggtttggtcagagtccaaaatattgattaaaaaaaattgtttaaaaatattgaaagtgatttttttttttaaaaaaaattcttcttaattaaaaaattgaaaaatgaaaacagttttataaaacatgtttttgaaaaatattttcactttttcaattttaaaaataggaagattttaaaaaaaaaatactaccaaatgccacataattttatacacaccacacatgtcaccatatcaaatctaaatct

SEQ ID NO: 106495 - DNA, 525 bp, Cannabis sativa
caaacaaacttcaagttctttcaggtcagttccgttaagggtacgacaatctttgaaaaaccctcaacgaacagatgatagtacccagctaaatccagaaaacttctaacctcagtagctgattttggtgttggccaatcctgaacaacttgaattttagctggatccaccatgatcccatccttatctactgtgccccaagaaggagacacgagataaccagaattcacactatttaaatttagcataaagcttatagtcccgcaattgttgcaaaaccgctctgagatgcaactcatgctcttcttctgactcagagtacaccaaaatatcattaataaatacgatcacacatctatccaggtaatctttgaacacccgattcatcagatccatgaatgtcaccggagcattggtgagtcgaaaagacatcacaaggaattcataatgtccataccgagtacggaatgcagttttcgggatatcttcctctcaaattctcagctgatgatagcctgagcaaag

SEQ ID NO: 106496 - DNA, 664 bp, Cannabis sativa
ccaatctcttagcaagaggggcttttaagggtagagcattggaaaggatactccaccaatggaccttgtgtcgctccaaaatctttgagtttcaaagtttgttccagagtgctggagcaatgttgcacaaaggagcccgatcaagggcttgaataagataggcagacttcgttgaaaataggccatttggttcttttgtccagacctatttatcccttccctggccacttgaaataccgcctcttaagatgttactaaccgtttcctgatcaaaaaggttgtgtagcttgggtgtgtcccaattttcgtcaggtaaaagtaaatccgatactttctccaagcccagctgttgacgataattaggcttagggtaaaaatctgtaccatggataacccaagggtcatcccaaatacttgtctctcttccatcgaatattagcttgcacaccccttttcttaaaatctctttattagatcgcaccacatttctccaaaactaagaatcggaggtcttaacctcacagtcaaaaaactgtttacccttaaggtatttagatctaaaaacattatagcacaatgactgttcctcagtaagcagagcctaaccccacttagccagcaatgcctggttcatctccacagtctttctaaagccaagcccccc

SEQ ID NO: 106497 - DNA, 699 bp, Cannabis sativa
aaaggctcaaactatccaaaaatttcctaaatcatattcctaataaatgttgtcaaggatttcgcctcaagagaataagacatgtaagttctaagcaattcatttaatcttaccacaaaccatagtaaaacaattataacatatttcacacattgccaaattgcatccctacacaggctttacaagcatccaaactaatccaaagagttaaaagaattaagcgcgcagtttcaaaatttcaggatgtttcacaatcaacagcatcatacaactatcttcagcttattttcaaatcataacaacaaactaaactaaagctagaaaaaattaaaaattttaagcccccccaaactgaaattcacattgtccccaatgtgctattagaactaaaagtgaagagacatacctgtggtctatgtcacatcaacaagcggttgtcgcccataataagcgtcatgcaagacaacttgaaagttgtttttcaagatgccctcaagcttggcatgtattgagtttgaaccaaaaaccgcaccaacaataaaagaccttggatgatgagggggataagcctttggtaactcatagagaatacaatatggagaatgtgatattggtggaaaataagggtccattggtagttcataatataatggtgttgacagcctcaaatcaacaactacaagtgattcttctgccacc

SEQ ID NO: 106498 - DNA, 606 bp, Cannabis sativa
atagaacgtgattttgaaaaatatattttatttttttaattttaaaaattaaaaattaattaaaaaaatattattaaacgtcacttatattaatatcacatactattttttgttataaaataatatagaataaagaaagaaatgaaagaagaaagaagacaaataataaaagaaaataagagagaatacaaatttctaaaagaaaatacaataaaatattaataatattttttttatcttaaataactacagtaattgataaaagttatgtttttaatggaagtccaaaaataattggatgggtttataatagtacacatgttttattttattaacacgtggtagcatctgtgaggcgggtcagaccaaggttttgtgctgtgtattgccacgtagggagcttattttgtcgtttgaatgggcaactgacacgtagattttcgaaagttctgtccatgatactctatttcagcgctttttttttttcacaattatttattaacataggttaggtttggttcgtaatttttttttattttttaaattaaaaagtaataatattttctaaaattatattttataatttttttttattttttaatattt

SEQ ID NO: 106499 - DNA, 835 bp, Cannabis sativa
agttcctggtaaaataacttccaacagagatgtatattgcagaattttcctcgctaccctgtcggaagccgctcagcaatggtattttaagttagctcctggaaagtttagttcatggaaaaccttctcttaagaattccatgcacaattcgcctcctcacgccaacttccattgcatctaagagacttggtcgaagttaaacaaagacaagaccagcctctccaggcgtatatcagcagattcatgacagaggcgaccaaagattcacgagtaactgaagatggaaagttatccgcaatgctggggggcattgaagtcctcggcgaactttggaaggatataaggaagaatgggccggtagactcaatgagtgattttcttcaccatgccgaatgcttcatcaagctcgaagaagtcattcaacgagtggaaggtgagcaaaagcctggcaagtcaaaggctccttctactggaacatccgcccaacttccccattacccaaataattcaagttcaaatggtaaactttccaacaataaccataggcaagggaatgggaagaaaggaaagttcactggcaaatctgaacaagctccctgggaaaatcaagccaagtacactgcattcactattttgactgaagatatagaaactgtgtacatggcaactcagttgctggccccatataagaagcccgtacccatgaagaaagatgtcaacaagaggggcatgacatagttttgtcgattccatggagactacggccacgacactaatgaatgcaacaacttgatgcaggaaattgaattcctgataaggaaaaacaacccacac

SEQ ID NO: 106500 - DNA, 3459 bp, Cannabis sativa
  modified_base (2137)..(2143): a, c, t, g, unknown or other
cttcatctttaactattaaactcgttcaagtaaattttttcgcctggaaatcccaagttgttctgaccgtgatcaggcatgatcttgatgagatcttatttagcaatgtatctcctcctgaaaaattaatcaatgggccagattaattctctcttctcgcaatagaaacattgtgatcaactctttttgtcttggcttcgatcatccatgatagacaaattattggttctgttgctgcatattccacttcctgtgaagtttggagagctcttgaacaaatattcgcagggcaatcaaatgcaaggcttcttcaattgaagagtcaactcaccaacatctagaaaggtgacacatccgcctcatattatgttgataaaataaaatctccgtgataatcttgctataactaaatgtacaattagttatcgaaatgtggaattacaactattgaatggacttggacctaaatatgatccagttgtgtttggtattacttccagtcttgaggaaagccaagctctgttaatggctcatgaatgcaggcttgaaagacatcattctatagctaatatttgaaacaaaatgtcttctaatctcacaacaaatggtccaataacttggtttaatcagtatcaaagcccttctcagtacttaagaagaccaaatcagaatgatcagtccaaaaactatggcagaaactactcaagatacccctccaccaaacaattcaaggcctatctgttacactgctacaatttttcattacatttttgccaaatcctttactccatccaagaacaactctgtgattggtaattatgcacctcattgagccttcctaactaataggaactagctgagacaccagatccacaagcatattcatccacatttgtccttggttttggagatgattttctctgttatgctgacacaggggcaacaaatcatgttgcaattgaaatggaacatctagattatgccactctgtgcacttgatgtgaatccctagcagttggtgatggtaagaaaatcttaatttatcacataggcacttctacaatctcttctaaccactatacttctcttaatcttaattatgttttaactgttcctgttatcaagaaaaatccagttagtgtatcaaaattaactaatggtaatgatgtatttcttgaattttacaaaaattattgttttgtcaaggataaggaatcagggaaggttctactcaaaggaaaaattaaacatggcatatatgtgcttgggaagggatcatctacttccacacttcagtgacatcttgccacaatctccaattctgctaaggatcaaagttatagttgtagtactagatcttcttcagttgattacaatgttcaatgtaatagtttgttaggattttgtgccctaaataaaactcattttcattgtaatcttatttacttttaataaagatcataaatcataccatgacttagtcatatgttttgttcacatattttatacatgattataggtttaatatataagatctattaaatcccgaacatatagttattcacaattatagtgatgccatcatagtgaaaagtgattatgattatatgtctcaagttatttagtcccacgatttatcagtgcactaaatttacactgaagtgaatcaatgatggggtttgcttacacttggataaagtggaatgtcttttccagtatattagtaaagtaaactagcattggatgtatcgactatacattgaactagaacgatattgacagtagtaaatatatcataaacttaacgttgtatctctttaagtcaatgtcacttagttgatcatagatcatttgatctcaatcttgagatggttaagctctaccttaatgtattgcgcaagttctttgacttgttcgttaccagcttaccagttgaactagcccatacttacatcgtaggaactcagtagtgaaattgagtggaagtatttattatagatatggaaatctattacttttatgtctattagaagtgaaatgctagtttccttagagcttgatttaacgcgataaatgatagagcactcatttcggtaattatattagtttcccgaaacatcatttacaagtagctaannnnnnnaaggataaaatacattaaaggataaaacgataattttgttcctactcaatttataccatccatagaggatcaatgattattgtgattgaaacaatggataaattatagcgtatctatactttgtgtataaagtgttcaatgtaattagaagtacaattctgaatctatagtggagttaggaggaattagtaagttagaaaattccattcggtaaatttcaagatctgattattaggagcttggttatatgggtcatattcctcacattgtctgagataatatcatcttgtagactcaactaattgatttaataagtcaattagaattcaaaaatagattgcgtcttatttgagaatttcaccaagtttgggcaatcttgagaagaaaataaaaataagtgtttatttgttaattagtactctttgtgagtctaattaataaatatattgaaattgcattttatttgataattattaaaataaaattggtatgtaaataattagatgataaaagtactaaaattagaaaagacaatttagttttattagttgaaataaagtggcacaaatctaactcaaaagcccataatatatttggccctaagagttagatatcaacccaagtttttacttaagtcatcttatctaacctagccctaagtgaatgcgtaaataaggaaagtgatgagaaaaaaaaattaacctcttaattttatgttagacaactctcttctcttttttctttgtagtttttgaaattcactagtaattctcaatctctaaatttttcaaaggtgattttagtatcaacccacattattcaagttgatactcaagcctttgtggaagactgtgatgagcacaatcgaatgaggagaagattcaagttcagatcttgagtatactctcctgcagacaggaatcaagagttaaagatttaaatggaaggagacataatattcttttgtacccaatgtaaggatttccatatctctttatgtgtttctttattgtattagaattttctatattaggatgttagattataattctaatccaacatgaatagtaaattaagattctgattaaagtttttccaacataatcacattgttgctcaaacatgtgcaaataaatgtaactataatcactcaccaataaaataaagattctaattttgctattaaaaatcctcaactgttattctctgctactagtactcatataaatctttggcatgttaaatttggacatctattacctcacactcttcataaaacaccctcatccctacctattccatgttctataaagaaa

SEQ ID NO: 106501 - DNA, 994 bp, Cannabis sativa
tagaacaaggacacttgaactcctgacactcgaactctaaaaatatggacggtcaacaactagaaaaaacgttccaacggcaaccactacaccagggaggggccaaagggcataactacaaactaaggatatgttaccctctaacatgtcatatcgctattgatacaattacgtatcaggtcccaataagttgtgataacataatacagtgcaacaaccagaacctaatagaactattcaaccttcaagcactataaaagaacctataatctacaattatgaatgattcttcttctccttccaataaaaaaattcaaccattaaaaagttcaattttttcaaacaaaaaacactaacattagacattacaataactacgaacaagatttctaatttaatagcatcatagagattaataaatcataccaattttatccccaaaattgttccaaatctcagcacgaattgatctatcatcatcagcaatcccaatcacttcaacaaaacccgtgagagaacccagcggcggagtacccttcacaaaaatctgattatcatccgttgattttccgatcacagctccgttttcagatctgataacctgaaccaaagcccgaacccttttcccaatgtaggagcgaagaagctcgccattgacgaaaactgctgggttcgaagagtccgtatcctgaaattgaaaccataatcgaatgaaagtagaaaacttttagagaaatcgcagccctaatcgatgagtgggaaaatctagggttttgagaaaaccttaccagatgagaagccatggtcgaaaatgggcgccaaaattgagaagagaaagtgaaatgaaataatttgtgggaaagaaattaaattttatttagttaaataccaacttttaatatacaaaataaagttggtatatttgtaaaatttaccatttttgtactttataaatttttttggtgatcttagattttggtttttcatttttttt

SEQ ID NO: 106502 - DNA, 1000 bp, Cannabis sativa
taccaaactgaaattcagtacaactttccatcctcagactgatggctccctatgagttgttatatggcagaaagtgtagatctcccattcactgggacgaaacaggagagaagaaatacctgggtccggaatcagtgcaacagactaatgaagccatagagaagattaaggccaaaatgcttgcctctcagagtaggcaaaagagttatacagatccgaagtgcagaaatgtagagtttcaagtaggggatcatgtgttcctacaagtgtctccaatgaagtggatcaaacatttcgggaaaagaggcaagttatgccctaggtttacaggaccatttgagattctcgagaaggttggactagtggcatatcgtatagctttacctccagctctttcaacagttcacaacgtgtttcatgtttccatgttacaaaaatacatttcagatcctactcatgtactgtgttatgagaatcatgagctacaatcagacctatcttatgaagaacaaccagttcagatcctagacagaaaggataaggttcttcggaacaagaccatagctttggtcatggtactctggagaaacaacaatgtggaggaagccacctgggagttagagtccgacatgagggctcagtatccagagttgtacaggttagatttcgagaacgaaatccttttaaggggggataattgtaaagaccgcttaactttaatttggaaattagcagataaatatggtttaattatgaaacttccatattagttatgaattactattttacggagttttatttgaatttagaatgcattacatatgtcatatatggaatttcacatttttgcatgttttatgcccggcaaggaatgcaacgtttgaccgttataatcacattttagtattttagtatagcggggcaatatagttagacattatgaatgtcaggattagttgagattttagaatttaccaattaccctaaggtggtttagtga

SEQ ID NO: 106503 - DNA, 1178 bp, Cannabis sativa
ttttttttttttttttgcatattagtgtcattttttataatttttttaagttatgttttgtataataagtagtatattgaataataaataatgtgtaatatatatatattttttttgtaatttaatatttttatacatttaaatttttaaaataaattttatttttatattagaggattctccgttcttattttttgccccattagaagatttactgcctcgtctcaaatggggaataagcggggtagggcaaggatggggacaggaaaacactttttgccaattcttcaccctgtatgtatttctattttatatttaatcacaccaataacaatattacacaacatttctatagttttatgtgtattggtattggagaatagattttaaacatcactaattagtgttaatatatgtggtggtatttggagtcatatctccaaacaaataaacagataaagaacacattcagttatttaaaattaattaacaatatacgtgcattcaaagtataatatttttttaagaagtgatttttaatttagataaatataattgttgaaaaaaccctattaatttttggtgtatattgttgagtacacctatggtttgtttgtgtatgagtgtaagtctcacttgttcttccttcttagtctcatcaaagttaaattatagaaatgacaatacatttgaaatatcagccgtacccttctttcttgtgactcttaaatttaacctaataaaccaaaacacactctcacttcatgaaacacattctttaaaataaaaaaaaaacaaaataaaaaaaaactaatcaatcaacttaataattaaaaaggattttcttatttataaatataaaagtttttttattattatttttacagaatatacaatgtaatttatagagcaatcaataaaacaacttaaatggcaacccggacaataatccacatcacaactcaagtaacatttaatcacaaccaacagagcaactcaagttgtataaaaagaatcataaaaatagaaaaaaaaattaaaaaaattgatatataaagtgattccctaattaaatttccactcttataataatatgcaaaaatcttaatattttattgagtaccattggtgctcaatattattcataagtattattttatgattaattagcaatattc

SEQ ID NO: 106504 - DNA, 628 bp, Cannabis sativa
gagtcagtagctgaatttcatgcaaagttgtgtgatatctccaatgagtcctatgccctggggaaaacctactcaaattcaaaactggttcgaaaagttcttagagttctcccaagaagacttatgtctaaagaaatatcaattgaagacatgagaaacattgaggaacttgatcttgatgagctcattgggtccttgcaaaattatgagctgtcactgtccagatggaagaaaaccaagaaacagaaggatgcggttaaggataaatctgatgtgagtatagctctcattcatcaagaaaacaagaaaccagttttagaggaattgaatggcattactgacgagactgttgccttgttaacgagaaattctgcaaaattcttgaaaaagaactacaggagaaattttccaactgataaagaaaatgctctcaagaagaacaaaggtggaaacttcaaacaaggacaaccatctgctgatcaaaagaatcgaggaatcaagtgccgagagtgtgacagatatggccacatccaggccgagtgcgcaaacacactcaaaaagaagaaggcccttgcagcaacttggagttatagagaagaagaaaagaactcaactgccagtaaaagca

SEQ ID NO: 106505 - DNA, 939 bp, Cannabis sativa
tgttttttcacgacgagggaaatggaccgcattttttgacacttttgtcggcgcatttagtcgccggcaaaagtggaaaaaaatattaaaaaaagtaaataacttttgccggcgcatgtaagtgtgccggtaaaagtaggcacggactgccaaaaattcccaccttttggcggttggggtgccacttttgccggcgaagttagagtgtttcgccggcaatattacttattgccgacgataatatgccccgacaaaacatggaggtaaacacattttgttgacttcttttgccagcgcatttgttgactttcgccggcattggttgacatttaccggcgcaattgagcaattgcgctggcaaaagttgacattcttgtagtgtttgaatggatcgaggaatatgaagaggccttctaaaaactgaaggagcatttgaccaacgctttaattctatctaagcaggtagaaggtgaggagttgtacctttatttggcagtgtatgatcttgccataagtgtcacattagtgcgagaggaaggaagggtccaactaccagtgtactacatcagtaaaagattactaggtgcacaatccaagtatcccatgatcaagaaattgacctattgcttattagtcacctctaggaagctctgaccctacttctaagcccacaccatcaagatactaacaaatcatcctctttgccaaattctacaaaaactggagtcatccaacaggctattgaaacgggctatggaacttagccagtttgacatctaataccatttgagggtttcgatcaaaggacaacgcctagttgacttcatcgtggaatgttctagattgaatgacttgaatgaggtagtctcagagtcaccaacttggaaagtttatgttgatgaagcgtctaatgagaagggagccagagtaggaatcata

SEQ ID NO: 106506 - DNA, 1177 bp, Cannabis sativa
atgtgagcaaaaatgtaaaatatagtatgttcgataaaaaaattatttttgaaaattgaaaataacattttgatattttctgttttctaattttttaaaactcagtttttaaaaaactgtttttaaaaaattttgccaaacaacccctattagtttttaaaaattgttttcaattttaaaaaacttaaaacagtttttaagttatgaagtcaaacaaccccttagttacaaaagaatattctagatactattaagtttgttcttgttgttaaattcccacataagcaattcttttaagcactatcaactacataggagaaccaaaaagctacaacaatattaaaatgttgtaactgcccaactcatcaacaaactcattcactggcatctaacagttctctacctctataaaattaaaagaagcttcagaagagagtactacctgactaatcttgcatctcaattagagagagaagtagcttgaggagagagaaccaaaaagaaagaaaaatagagagctagaaagggaaaagtttgagagaaactttgtaaaagaacacagaaagaaatagagagaggtttttgagattacctaatatgatttgtagctggagtattcatttgatttttgtaacctgcttatgattgatattgcatcatcaagcatctaaggcaagcttgacagagacatagccctaatttttgggtgaactccgagatcaaatctctttgtgttcttgtatgtttgttttgtttatctctaagcaacaaacattgatctagatctttgttgttgtttggttctggtattgtgtctgggttttgcaggttcgaaggctagggtttgaagcttgagattgagcttgtagaaggaagaagaaaaagtcttattcgagtatggttttggggttgaatcaaaagtattcttgattcttcatatctttgattttatatcaaattgatactgtgtcgttttgggggttgcaaactccattccgtgaagtgtttgtacaggtcattatttaccttggtttctaacttgttggtttagttggtgtaggtatattctcggtattgaatttcctacagtggtatcaaggcttgattcaagctgggaagatttaactaaatttggatacaagatcaagaaacgaaaaagaaggcaatttgttctatt

SEQ ID NO: 106507 - DNA, 504 bp, Cannabis sativa
taatttattgtttaaaattataaataattaaaaaaaaacaaaagatagtttgtttgcattatacaaaagcttatttaaatgtcattttattttttcttttttaaatgtcattttatcttttgtttttttgaaagtcagtcactctgaatctatttcttcgattattatatttgaaattctatttttaatattaccaataaaattaaattaacaaacaattttattaatgcaaaactgttataaaattatttgaatagaattgaaatttgttctatcaaaaaccgaacctgatagataagaaatatactacagaaagtaaaattgtagaaactaaaatgacacacaatattttatacgtggtatcaacaatccttgcagattgctactagtccacgagaccaaatttcattattcaaattttaacacgtacaaagtaattgacttacacaaaacatagatttcctctaatgattttactgcaagcttgatgtactcctatttgct

SEQ ID NO: 106508 - DNA, 503 bp, Cannabis sativa
tttatgtgtatattgcttatgttttatacaccacatcgatccattaaaattacataatgtatgttgcttaaaatagatgtaattatagtatgacttttttttttttttttgagtgaaattatagtatgacttttattatacatatagcatatttgttattattatgttttttataattaaaatgggatcatgtgcttatatctcaccttttgatcttagacaatttagggaatcaataagaatttgttatattattttgttaataaataaaatactataattattggacatcacttacgattgattagcgatattatttaaaagttattttcttaagctacatgagacctgatacataattatactaatagcattatgatatcgagaaggatgttagaaaccaattgtactttttagtaattcttcataatatatacatatattgggccaaacatagtatagatattattgcatcatttaatatgatattgtacgagattatt

SEQ ID NO: 106509 - DNA, 963 bp, Cannabis sativa
aaatcacaaatttgaagtaataatgaataataaaaaaaataaacttaattaattaataaaataataatttataaataattaagtaattaattttacaattgtaatattaattttttttgaataatgaaatttaataaatataaaaaataaatataattaattaattatatgataatcttaaatgatgaacaattatttttaaaaataaacagtagaacgtgatttttttttttaaatttcaatataaaatattttaacttaagatatcataaaattgtatcattaacataaaatcttatatgcctttataaaattgtgtcatccaattttgtattaactgttaatcttggagagttaattttgctacctagtaggcaaccgtcgacatgtgagtcggctccacaacaataccctatgtacggtcaatttaggtcattccaacaacaacatgtgtatggtcaatttgggtcattgttgcagcaacaacatgtgtatggtcaaataggaggatctccacaacagcctatgtatggtcagattatcagtgcgcaaagtcagcaacaacaacaacctactttggttcgtctgcaaactcaataatttgtggagatcttacctacgccgcagactggacaaccttattaccctacccaccggctcctcaatctcgtgataatcgcgacggttcaagacttagctcgaatgtagatgattttatggaatttactgatctgaacaatgataatttatgtaaatttttatgttttaaagtttattttaagataattttataattttatttaagatagtagtgtatattgttatggacaaattaatattaatgtttggtttgttaaatttaaattctaattaataatatatttataaaataattattatatataattataattatttttattatataaatattaaaagttataattttttttatataaaaaa

SEQ ID NO: 106510 - DNA, 1334 bp, Cannabis sativa
cgtctttgtctcatattcaaatctctatgggtaaagaagtattttaaactcttatgatcagtgtatatctcacatttctccccatataggtaatgccaccaaatatttagggcaaataccactgctgcgagttctagatcgtgagtagggtacctctgctcgtactcctttaactgccgagaagcattggctattacctttccagcttgcataagcacacagccaagaccctgtctcgaggcatcacaattaactacaaacttttccttatttgaaggaagagttagtactggagcggtaattaagcactgctttaacccagaaaacttttctcacatcgatcagtccaaactaacttcaggttctttcgagtcagttctgtcaagggtacaacaatctttgaaaatctctcaacaaactgacgataatacccaactaagcctagaaagcttctaacttcagtagctgactttagtgttggccaatcccgaacagcttcaattttggctggatccatcatgatcccatctttatccactacgtgtcctaggaagagacacgagataaccataattcacactttttgaatttagcatatagcttatgatctcgcaaccattacaaaactgctctaagatgcaactcacactcttcttatgattcagcatacaccgagatgtcatcgataaacacgatcacacatctatccaggtaatccttgaacacccgattcatataatccatatcaaatatagtatgcagccttggcccgtcattcaccctaatggcgttctggcattttgaatattctaaatatgatctgaaagaggatccatgactttgacggccacctcaatttccccagaacattctggtaccccctgatactctggaagcctcaaccttccatttgtgatcagggttgccactgtcggtcgccttactgaaattaccacaggcaggaggattcgatgccatgacgacatcctttacagtctgctctttcgcaacatgttgctcaacctcctcagcaatcaaggctagctttaccactttcttgtacaaagtgtcatgtgaagtggtaatctttaagtcctgattgattttggcattcagtcgtctcacatatttctgtttcctggtgaaatttgtgggcactagatcaccagcaaacttaaacagtcgatcaaactctagggtgtatttggccactgacacctttctctgagtaagcttcacaaaatcctccatgtgtgaagttttcacagcgatattgtaaaacttttcttcaaacaaacttttaaattctttctaggtcattacactgacatccc

SEQ ID NO: 106511 - DNA, 1098 bp, Cannabis sativa
gaagcttatctgcttttgtggattcggtctcattagtaccaaagtcaacactaagatgatttgctatttcacattgaatttttgaaaaatcaggagtttgagaaacaacactatccatcaccttatcaaacagattcacttcttttgcttgtcgagctattgcttttacaagtgtggtcttgccgatgccgcccattccacacagcccaatcatctgaacaatgggatctttgagtgcattcattacatcttctgaaattcttcttcttccctcaaaggccatgtaatctttgtctaaataaggagaaggataagaaatgcgaccattaaaattcacgtaacgttcgattaaaccatctattttagttttgatctgtagaaatgtgtcctcatcaatcgttgcttttggatggaatgtgaaatagcaaaagttttggcttgcacgctctgcctcttcacgcttttcaaagatattattctctgtttcatggagccaatcggtaacctctttgtgaatttgttcttgtttttgtttcttcgactcaacatcccttgacaattcatttctgcatttctccagttcttctagctgttcattcagtgtctttacatgccttctgtgagttgcacagtgacaaagtcgattcacatgtctcacgcaccgatagatttgatctttgattaattcggccacaaccgtcgtgcaaatcgttgtaacaggctcccccatcaccctacacttgtttgcttctttctttatttctttgttttcctgattaacaaaaactatatatatttagctaatcttttctaataaaatgccaaaataaaaccaagtttaaacattactgataagatttgtgaacatatttctatgaaagtgttctcaaatgaattcatgtttggataaaaaaaaacgtaatgggagaagtaaaagttgcatcaaattatagtattctactctaacacgcaaaaatattatggcaattacacttactgggattttaaaagttcttatgataaatatgacacatttaagtttgactaatttatatgatattttttgtttttaggtctctttttatggtatttgatatg

SEQ ID NO: 106512 - DNA, 619 bp, Cannabis sativa
aaggccagggatgcagctgtggccctgcgaggtgggagcttcaggattctaaggaggcagtgcaggaattgaccgccaagctgaagtctctggaagagctgcatcaagcagatttgcaaatgacagccaacctaactgttgaagtgaaggggcttcgtgaatatagggagcaggctcagaaggaggtggccaaggcgaagagagatgccctcctggccccagttacttgccaacactgcaagaagcgctttgatgatggagtctttatggtctggcaaaccaatggccaaaatattaaccttggcttttatcccaagcctgaagaggttcttgttcgcttgtaggagaagaagaaaaggctagatgcggtgctggaggagcgcaggggtccttgccttccacctcgggctgattgaattacttgtttatcacgattatcattatttttttttattgttacatattcagtccttcccaccacttttaagacaatttatctgtctttttttcttaaggggagacatttatcgcccgtcccaagccttatttctttttaaggtttttctttgggatccaaacaatttacactatgtttgaatatatataacttttaactttc

SEQ ID NO: 106513 - DNA, 734 bp, Cannabis sativa
ttgcgtccgggtccgtgtctagctctgggtctgattcaaggtgtgggtttgaattcgggtccaagtttgtgtccgagtttctgtccaggtctagaccccgatctaggtgcaggtttgggtccaggtccaagttggggtcctgagtgcgggtccatgtttgggtctgggccaagatctcggtccagatccaagtccaacatttcgatcccattctaggtcttggtacgattccaggttcttatccttatccttatctaggtccaagtctgtgtttgggatcgggtcctagatttaggtccaggagcgtgtttcagttccgctctgcgtacacgatcgtgtctgggcctgaattccagtctcagttctggtctgaggctaggtctgtgtacggttctacgtctgggtccgggtctttgtcacagtcctagtcttgttctagggtctttgttcggcgattcttgttcaggttctaattttaagtcccaggtctacgtctgggttcgggtttggtttttcgtcttagttttggtcctaatctaagtaccagatctagacaccgactactagtctgttccaggacccgttacccgaattccaatatccggatcactgtcacgagtctcagtcaagttcttgttcacgtcccaggtccaatttttgagtttgggttcgggatcgagacagtggtgcggttctaggtcccaacccttgtttgtgtccctagtctggttcca

SEQ ID NO: 106514 - DNA, 2373 bp, Cannabis sativa
  modified_base (139)..(151): a, c, t, g, unknown or other
  modified_base (206)..(219): a, c, t, g, unknown or other
gtaactaaactcgaaggagagaaagagatcgaagcttagatcttgataatactctacgagaaaaaggaacaagggttagagatctgaatagaaagagtcattttatttcgcttcagccaatgtaaggttttctaaactnnnnnnnnnnnnntttcattgttttagagatattcatatttagaatgttaattcaacatacttgttannnnnnnnnnnnnntggtaaaatattcccaacagaggctacccaggtcatggtgaacgaaggcttcgatgagtatcgtagagagttcaatgcttggatggaactgaataatggagagacgagggctcgaaaggtggaggtggatcgtcgaacgagggaagctgcagaactcataaaaaaattcatgcaatatacccaaccacagactggtacccaagctcgagttccaactatcaatagaggcaaccctcgtcgccatgaactgtatgttacaaatgaaggggtagtgcatgggccagagaatttccccactaccaggaggactaaaatctaaagggataatcatccagggtgggagtcccagagggacggagaaagaagatctgttgaggaccaggaccagcctaggcggcaccctgaacagagtaattaatacaatgttcacaatctgagtcataagagtagctatatgggcttgaacgtcgacctatccttcttccaaagttgccatggtagtgggtatgcatcccttgctcctgattcagtttgttaggtccccacggtggacgctaaattatagaggataaaatttacaatgattggaatggaaggatcgcaggcacctacaacttgtagaacaaaagaagaaagactgtgaaagctttgggacatcagggtggtgccagccaaagagaatccgacgatcaacttagtaaacgatttgaataaagaataagcaaatgtaaataaagaagatggaaaataaatatctccaccgtagaatgatggcaaaggattgataatagtaaagtattgagtaagtgcttgagtgaaagttcaatgaacgaagatctgatgatctttcgagactcctcgatccttcctttatagagcttctagtgatcagactcctccattctgaagggtgaacgtgggaagtggtgtttcccttttctaagaggaacgatcgattcttttagatcagttataaactcttcaacgttctttatacttaacttagtcttgtagctacttggttcgttttggctttgagctttgcacaaagcccaatgtattagtggactgtatgtaataacttgtattgtaatttctatttgggttgtaagagcactccaacaatttctctactttattctttaaaatatatattgatcaaaattgtacatttattttattttattttacctcaaacatttatattaaatcatacatcatcttttctatatttctatttaccttattagaatgttgggacacgattttatcccgtgatgtactttcacggaatatattctgcggtacattagatgggtctcaggatacattagatgggtctcaggatacattagatgaatctgagagtacgttaccattttttaaccttaattaccctagatcaaccccaaccctcagatcaaataactctcccatgtcgtacatcacggtatacattccgtgaaagtacatcaggagacaaaatcttgtcccttagagtgttatatctttaatacattttaagttaaataataatgtcaaataaataaataaaacacaaagaataaaataataatattttttgaggagagagcaaaaaagtaactcaaaatgaatataaagcattaaaaattatttgaagaagctctattcctttctctacatctagagaagagaagatgtatcatagattagagatcctgcattttatagaaccaatatacattgattgaaaagatgtatctattggagtcttatttttgcaattttctttaaattttcaaagctttccctgttataaaaaagctgttgagattgagagtgctcgtagaccatttggacctagtacaatttttggcaacacttataattataaaatactaaatgaaaagttgaatactttgaactaaattgtttcatttaaattgactaaatataaattaagttgtttaatttaaatttttatattattcttctttatattttaagaaaggaaagggaaaggaaaatacttggtttgcttgcggaatgcccatccctttcagcctcgtgaatgcaaatggtattgcgtttcaacaatcggataagatcatatcattttcaattcaaggtcagacagtgaaatcagcccatttcatgctttaccattccatt

SEQ ID NO: 106515 - DNA, 1218 bp, Cannabis sativa
gcggtatccgctggtaaaattccgctgctaattgttttcaaaataaaaaaagtgggaattttcccgcataaatccacaccacccaataccagcggaacattccgttggtcataactaaagttcgctggtgttgttcattttatttaaaaataaaaaaaaaattatttaacttcactggtatccgccggtaataacagtattaataggggcggacatgctccgccggcaatacgtccgcccctatttctaatttttcttgtagtgtgaaaggccttaaaaatcgcctctaaagggtatttttgtagtagtgagactctcgtattgcaactatacttgtaataggaagatatttgcagcaatttgtatagtttgaaaaaaaattgtaacaaaaaatatttgaggcgcaaaactctataaggatcctagtttacttttaaaagaatatatgtaagggtgttcatccaatcaattccgcattattttgctcacagtacatctgatccgcattaagtatagatttcacatccaatccaatctgtataataactcaaattcagtccaatccaatgcaattcgcaaaagtgtggactagatcgattacttttcaatgtcgaattatttaatatttattaaaaaaaatatttttttatataataaacaacatattattaaaaaaaaaatattattgttttatatctccaacaacaaattaaaaaaaaaataaaacaaaaaataacacattcaaatgagggaaaaaaatatatgcataaagaattatttaatttggttttagattatattttcattataaataaaaatagaatatgcacttgatctattaagttttgaatttaaattcgtacttttctacattaagatatttgtatatattatttttcaaatatatatgtagattggattgattggttatttttatatgtcaatcaacatccaattcgtacaagtacgaatttttaattttttaatgcaattttatctacacaagtgcgaatttctgtattttgtagatcagatttgattatatatatattttataaacacccctaaatatatgtaaaaagacactatgttaataaattgaaacataatttaaatgggaaaatttcacattttgcccctaataaaatccccaatatcaaaatttagaccctccactaatttatacaaattaattccatttattacatgaacttccca

SEQ ID NO: 106516 - DNA, 514 bp, Cannabis sativa
tatgaaaaataccttagctgtcattgtattctggaagagataagaaggaactctttagcaacatcaaacagaagatttgaaaacttatgcacacatggagtggaaagatattctctacaggtggaattacaagaaatgttacttttgccagcacatttttgtgttgacaaaagtttggtattacgctggcaaaataaaatttacttttgttgtgttggcaaaaggggttggcaaattaatgtttgtattagaacttttgtcagcacaaaatagaaagcgctggcaaaaatgacttttcccaactcgtaaatgcgctgataaaagttagattttagctactgtaaatgtgtgctagtaaaactttgacctttttgccagcgcagtttgcgaaataacttttaccagcgcaacagcgaactgtgttggtaaaagtgacattttttgtagtgtggtcgagaagtccttctcaaagctgtggtgctatcaatttctacttatgctatgagttgtcaat

SEQ ID NO: 106517 - DNA, 969 bp, Cannabis sativa
  modified_base (186)..(192): a, c, t, g, unknown or other
tggtcattttgccccattgatattttgtcctttagtggacttagtaattgggaattatttgggttatgttatgtttatttggctgaattaagtaattaaagttactgttgtctctcattttacaaaattgaaaaaaaaaatcaagagaaaagcaaaattccattttcctctcaaactctctccctnnnnnnncctccttgagcagcaaggattcttggtgttttctttggtaattcaaaccattttctccagatttagtgatcacaagttgttggtaagattcatatagctttcttttaagtttcttgaatttttgagaaaatttgataattgcaagcttgagaaattgtggctgtgactgttgtgtgagtttgttagtgatttgtgaagcttaattatgttttaatatgttgattcaagcaagactgtgttggtgtttgttgattttaactaagtgttgaattttaaacccaaaactttgattttcaaagtaaaatgatgaacttggttgctgtagttgttgttattgtttatggatattttctgcagttatattatgcttgtttgagtagattaaatcaagttttgatgcatgttagtggggtttagccaagcttgagttttgaactcaaagctggagctttaatggcatttttcgtatctgtgattactgggttgttttgatgctttgggaatgttctttggggtatttagaacaggtctggaaggttgcatgaggtttgggtttgatttgagtgagaaatgaatttttgaaaaatcctgcactgaactggaattccggttcagggaagccatcagcaaccggtataccggttggggcttccaggaattttccagaaccggaattccggttgggaaaattgtggaaaccctagttcttcccattattgtgttttttagggtattcccatgctttttatcgatagggaaacttttagtttctagttt

SEQ ID NO: 106518 - DNA, 546 bp, Cannabis sativa
agtatcttctttacttgtcctaattctttcatgtcaaattctgacttgagtttatctttaattcctttgaatacttctttatctttgcccattattaacatatcatctacatagagtattagaaacacatctgttgactcctctaagtgcttgaaatataaacagtgatcaaacttggatcttgtgaaaccaatctcctaaacatagctgtcaaatcattttttccattgttgtggtgattgcttaaggtcgtataaggacttttccaacttacaaactgtctattttccatcttgttccacctaaaatccaggtggttgctccatgtatatctcttcttctagataaccatttagaaatgcaattttaacatcaagtgctccacttctaaaccttgctgagttgtcattgataacataagtctaatggtcttatacttcaccacaggtgagaacacctcggtgtaatcaatcccttccacctaagtgaaacctttggcaactaatattgtcttaaaccttgctggctcatcctttgtcacacctt

SEQ ID NO: 106519 - DNA, 835 bp, Cannabis sativa
caacaaaaaaattctgaacaagagagataatgtcgttacctacagtgttccaacatttttggtaaaatcccggtgtcatgccatcaggtcccggagatttatccgggtgcatttgaaagagcgcacgacgaatttccacatccgtaaccggctccaacagtttttgattctgaacagccgtgactgaggctgaaaaatactggaagagatcattgtttcctgctgatgaagatgatgaaaacagttgagaaaaatattcttccacaaccgatgatagtcccccctgccagtccacccaattcccagcagaatccttaagcttttggatcgaatttcttcttcttcttgccgtggctgtagcatggaaatatttagagttgctatctccctcttgcaaccaaagttgcttgcttctttgcttccaataaatttctttttgcagaaaaatatcattcaatttagcactggccgattgataattttgtatggagatatcatcttggcctctcttccacttcctcatttcttccttacaatctttgattctttttgaaaaatttccagaataatcctttccccaactcaataacacttctccacattgttttactttgtcaataactcccaccgaattccctggctgccaacagcttttaacaatttcaaaaaacaatggttctttaagccatgaattttcaaaacggaaaaaactattttttgccaccacaacttgattgacagtatttaacagtaaaggagtgtggtcagatgtagaagtttccaagttaaaaagcttagctgagggaaaaaagtctaaccaagattgagtcaccaa

SEQ ID NO: 106520 - DNA, 915 bp, Cannabis sativa
  modified_base (67)..(72): a, c, t, g, unknown or other
tgattgagagtacacaaggatgttgtcgataaatacaataacacaaatattgaggaaatccttgaannnnnnattcatcaaatccataaaagctgcgagagcattggtcggtccaaaagacataaccagaaattcataatgtccatacctagtgcagaaagatgtctttgggatgtcctcctctcgaattctcaattgatgatagcccaatcagagatcaatctttgaaaagaccgtctttccctgaagttgattgaagagatcgtcaatcctaggtaaaggatacttattcttaattgttagcttattcaattcccgatagtcaatgcacattcgaaaagacccatctttcttcttaacaaacagtaacgaagctccctagggtgacacactaggccgtgaaaaccctatgttaagtaacccttggagttgaattttctgttctttaagttctgctggagccattctataaagggctttagaaaccgattctgctccaggtgccaagtcaatgacaaagtcaatttctctctacggtggtaaacccagaagttcatcaagaaaaacatctaaaaatttctgaaccaccttaatgtcttctggccgaacagagtcaggccgagtggtatccgataccacggccagatccctaaaaatccctctcgtaacaattccttgactgttagtactaaaattatcggaatctgagatccctgaactgatcagacaaaaacaaacggttctctgccttctggttggtagattaccatcttcttcttacaatcaatagtggctgactacttggacaagaaatccattcccagtataatatcaaaatctcctaaactcacttctattaaatctgttgggttttatgccctaaagatcggaagagcgtcgtgtagggaaagagtg

SEQ ID NO: 106521 - DNA, 618 bp, Cannabis sativa
aatgctccaaacacgattaaaacttaattaaaatatactaaatttaatctaaaattaatactaaaaataacctaacagttgccgcatgtaaacaacttcttgaaggtcaccattaagaaaagcattgcttacatcaagctgtttgacatcccaatgtgaagtcacggcaagtgttagaacagccctcactgttgttggtttgaccacaggactataggtttcttgataatctattccaggtgtttgtagatagcctttagcaacaagtcttgatttataggtgttgagagatccatcagcattaagctttatcctatagacccacttgttatcaatcacagtcatataaggctcatggggaaccaaagtccatgtctttgtcttaactaaggctttgttttctgtttgcattgatttgaaccatttgagatctttgagtgcttgcttgacagatttaggttcactcggcagtagagattctttgagaggatgcttggtggaaagatatgctttaggcttacgaatcccactttgaggtcttgttttcatggtgtgagtgcgagaagtggtagttacttcaggttcagctgctgttataccagcagaaattggtactgg

SEQ ID NO: 106522 - DNA, 564 bp, Cannabis sativa
ctcttttcctgaaatgtttgatccccttcattggagacacccataggaacacatgttcccctacttgaaactctacattcctgcattttggatctacatgacttttttgcctcctctaagaggcaagcattatggctttaatcttctcgattgcctcattagtctgttgtacagattctggacttaagtatttcttctcccctgtctcatcccagtgaatgccagatctgcactttctaccatataacaattcatagggagccatccctattgtactttgataactgttattatatgagaactctctcagtggtagatacttactccaggagccttcaaaatccatagcacaggtttgtaacatatcttctagtatctggattgtccttttggactgtccatcagtctgacgatggaaagttgtactaaattttagtcaggtacccatagcttgctgaggactttgccagaatttagaggtaaactatggatctctatccaaaaggatagactttggtacaccatgtaatcttactatctccttgacgtacaaatctgcatact

SEQ ID NO: 106523 - DNA, 785 bp, Cannabis sativa
agctaacttggctaaggagtaagcaactccattagccaacctagaacaatgaacatggtcggtcttgaggtatatagcgcttaagacaaaattaaattttagggccctatataaataatttaattattatcaaaattataattctaatattttggtgtagtggtaaatttttttaaaactcagctgcaaggttcaatccttcataattacacattaaatatctctaattaaaaaagatgtaaaagtagaagttgaaaattgatctcttaacctctttgcttaaaatcacactccctaccactatagtaaacactattttgttatatttctgattatttaatcttttatttatatactaataatttttttcataatttcggggccttgagcgcgtggggccccaaggcgcatgcctagctcgcctcacctcagggttggcaactcaaaaaaaaaaaaaaaaaattagtgttggttacaatttaattattatatttaattcaaagtttaatatatatatatatactaggttattgttacggacattgcacttatacttagttatatttttaatttttatttttgttatgtgtatttttaaaattttataaattaaaagaaaccacttattaattttttaatttttttaaaaaaataatatttaaagttttaaaaatgcgaggaaaataaatataaagtttaaaaatattaaaattcaacatactcccaatattaaaaataacaataaaaaataataatgttataaataataaattaatatttttata

SEQ ID NO: 106524 - DNA, 2046 bp, Cannabis sativa
tggtaaaatatattccaacacaactgtctttagaatgcctgtcagtcatcctttcgtcctggttgacagaatcactagggtagtttttctgccctttgggcttaagtactttcgtactctatcctttaggcatggttttgcctctaagagtagaagggtgtccaggctcgaaagcaccggtggccttctacgtcttagagggctggccgaccagatttgtgtccttttgaggaggtttaggagcagacttctatgtgggttcacctactttgcctttacctttatccttgcgagaatttgtcgttttggcctcggtttgcccaagagcacgttgttcagccataacttccattgagaggtcatcgtcaaactttgccaagtcctcaaactttgattttgaactatttatataccttataagtgaacaaaattaagtgttcaacaactatatttttaatagttatcattcattcacatccaaacacaattagtaacatcttttactaatttattaatagtgataatatggaaagagttacaaaatttatctttatcatctttcaagaatttgcaactcctttctacaatttatgtttaatctaggtaacttcctattatatgtaactggttgacaaaattattattttgtcacacttaattatttaatataattaatctaagtagtattatattatataaataatataacaataacttggttaaacaagaagatgtcacaaaaaaccaagccaactatgttcttattcgaagacattttctttttctttcatgcattttacgtttgtaacaaaatcttgactattttccttaataaatagtaaaagaaaaacaaatatgactccaaatcacaatttttgcattatatacaattttgaatttattgtgcttagcgggaagagaagaagaaaaagaaaacaacacattataatctcgaatatattataaaatgataagtaaagtgaaaacagaaagttaaaatacaaaattgttgacctgagataatattattaaagttttataataataataataataattataaaaaaaaagctcatatcaaacaccagcaatagaatttctttgcagaatacgatctatctctctcttatttctctcttcttactttttcactctctctctctttctatccgtatatctcaaaaactccaaaattggcttaattaggttattattattattattattttttaattttccatttatttaatttttctctgttcttctcatcttcttcgaatcgtaatacccacccaatcaaactcaaccaagtgctctacctctctttagggttcgtcttcgcattcattttcttctccgatttcccgttcgaacttttctagggtttccttcatccattaatgtaaaagcataagagaatttcttccaagatttgttgttttgttttgatttttggattcggtgcattcggataaaggtgtttctatactgattggtcgatccgcgaatggaagctcgagaatcatcgtcatccgcatcggcagtcgcgaatcgggatgggacttcttcggcggaagacgacgctgttctatctgttgccgctgcgctttctaaggacgctgctttgcactttcgttcggggaagttcgctgagtgtgtcgatgtcttgaaccagctcttactcaagaaaccggacgatcctaaggtgtgaatctctgacttggttcttgtatttattgctgtttttgattccttgattttttggtctgatgattcgcatttgaattggttgatctcttgtaagattggtttgagtttggaaaattgtaaggctaaatgagtagcttcgtatttctcttagtagctgaagttcatgtgttaaggcgaattttggaatggaagatttagttcgatgctattatctctttggattttattttcatttccctttttctcaattatagtttgagtttgcgagtgtgcctaaaattgagatggtattcggtggatattttatggtactgccttataggtttgtgttcttgg

SEQ ID NO: 106525 - DNA, 530 bp, Cannabis sativa
cttgcccttctccaggcaggcatccgtacagggactccattctggaatgaactacaacaggaaggagccgcgaaccttcaggacttccagacaagagtccaaaaatacatcaacctcaaagaggcccaaatagtggcctatggaggatactatcccaccgagatagcagggtatatgcctggagccccaccgtcgggtactgtcctgaccgcagctccaccaatgagcggcatacaattctctgctactcccggatacagtcagggccaggccttggcccccgcatcgtcctattttggaaatccctcggggataaaaagacaagctccctcgcactccgctccaactgccaaccttgcaggtccttcccagggctcgaggagtaaacgatcctccaagggcagcacccggacggaggagaagctttcctgagcatgccatcccccaagaagcataaagacatgcgagcctaactggaaaggttgctgccctgagccgttttatctcccgatctacagacaagtgcattc

SEQ ID NO: 106526 - DNA, 626 bp, Cannabis sativa
tatatttcatctataagaattgtccgaatgtgaaaaagttaattattttccaagactaagagaaatccacattatatatatgcactataaaatttttttattataaaattataattaaaaggaaaaaaattataattaattataaattattatttttatattatgattaaaagatttatagttaaatatattagttacaaaaattataatttattgtgactaaatataattttaatcacaatatttattgtgactaaaattaaattagtaatatatttttaaatactatattttaaacacaaataacattttattatgactaataaaattttatttaatcacaaaaaaatttatattataacaaaaaaattatcattaaaaataacttcttttttgtaatataatacaatatctacagcccgtggcaatatataatataagcctcatttgataatttataatatgctaatttttgtctgactatatataatttcaatgataaaactgtttcttcaatattaaaaaattaattttatattctaggcgattattacttagataagttcccttaaaccaagtaaaataacttccattatgaaatgaattaagatacaatatccagttct

SEQ ID NO: 106527 - DNA, 736 bp, Cannabis sativa
  modified_base (540)..(546): a, c, t, g, unknown or other
ttgcagcggaatataatgactcgattcactcagatctctaactcttgttcttttctgttgtagagtattataaagatctaaacctgagcttggatctctttctttcattcgggtttggttaccaccgtcttacccactatgattgagtacttaacttgctatgtgtgggcatgaaactctatcactaaaggctcgaataggtgaagaacaataaaggaggtaaaatcactgtataaggaactctctcatctactagttgtttgatagagaaaactagatttgatttggttgaaggcaatagttaagttgaatagttggatgagatgggagtatcatgttccttttatagtgtttcaactaggtctcagggttgaatcgtatggattcaaaaagaataaaatattgggcaaaaaatacattaaggtatgcccactaaaagggaccacattctagtcacaattttgtcaactagtgaggagaccatgagcctatataaccgagcttccaataagtagatatagaatttatcaagtaaattcnnnnnnntattaattctgccttgcgccactatagatttggaattgaattacactctcaattatatagaacgctcaatatgtaccatgatataagtacgttatgattatccattgttacaatcgtaatagtcaaagatcctctatagatgatctacatcgaaaatggataaatttaccgttctacacttcaatgtatt

SEQ ID NO: 106528 - DNA, 1141 bp, Cannabis sativa
aagaaagagaaagaaaaagaaaaataaaaaaaaaaaaatgaaaaataaaagattttttttttataaattatttttttataatttttaaattatttataaccattttttaaaattaaaattacatggaccactaaaaatttaccacgtgtacaagagtgtacacgtagacagtctaccatggcacttaattgtgatttttggacagaggggtacagagcaaaacgaaaccagagttcagagagttatgccgccaaaatttcagtttttgtgattaactgttacaaacctaaaagttagggtggtttagccgccaatatctcttatatttttcaaacaagatatattccttaaacaaaaaaatatagacaaaatctacaaaaaaaaccaagaccaaaaccccaaataaaactaacaatatgtgcctcggcacgtaacattcaactagtattatatatgtgtgtatatattcttattctcatctatttattcttaaattcatatatatatattatgtgttcttattatttatttataatatattttatagattttgtatctatgatatgatagagaaaatatatataaattatgcatatatttaaaaaattatgtattctcgatgtaatcttacatatatcttgaagattatataaatatgtcaaataattaactgaaatataataaaaagatgagtatatattcatatatatattcttacattctttgaagacaataaaaattaatttaatatcgatacatatttgggcagatataatattttatatttgtaaaaaatattgtatttgtgtgaatacaattaaagaattattgaagtgattattattgatacaatttgatagtgggttttgaatacccaaaagaattttaagaaaattatattgaaatatcaaaatataagaataatatgttagtttctttatcacgcataaaatatgcaataacaatattcaattttatagataaacatattacatataattatagatcaaaagaatacatttgttgattcaaagagaagaagccaaatgaatcaaagagaaaaataaaaataaaagaggtttattgatgatgaaaaaaattgattacagaaagtgtccatagacacttcatttatactaac

SEQ ID NO: 106529 - DNA, 960 bp, Cannabis sativa
  modified_base (53)..(78): a, c, t, g, unknown or other
cattccaccaaagtacaacacaatgtatatgactttaaaactaacaattaagnnnnnnnnnnnnnnnnnnnnnnnnnntaatcatttatgttatatataataaaaactgaaaagttaaaaataaaacattaaaattcgaaatcgggttggtcagtttaattgggcgggttggacctattttcaacccgcccaattaacagatcgggtggtttgtaattttttcgagttatttcggtttgtaatttttatcgtttttttcggtttggtttgggcggattattcggtttggacgatttacaaatttttttgtacaaccctagttggtattgttccaataaaaataataagcaaataaatatgttcattctagtatagtatcattagtttatttacattagtacacctaaatattatgtaaactaattctcaattactaaaatattatgtaaaccaattatccctctaccatagcacaacaatctctgtggaaaaatataaaattatcaattacatataacttaaataaaagtagcaataatttggattttttgtcattgaattacacatatacttttttaaattgttagatagtctcacatagctaatatgtgaaaagataatagaatatataagagaaataggctactcgtcccattgctaattggttttgagatgaaacttcattcaccttatctaaaattctaatatggtatcagagcaaaacaaataaaaaaaaatctctagcgactacgtgacaaaaaaaaaattgatcgaagtagagctaaacaaaaaagagccaccaaaaattcaaaaaaactgatctaagagccaaaaatcaaaaaaagccacttgtgattcgagaatagtgagccaaaaaaaaaaccaccgaaaatctaaaaataccgatctaaaaagtagagcaaaagagtcacttgtgatcagggatagtgagccaaaaaa

SEQ ID NO: 106530 - DNA, 639 bp, Cannabis sativa
ctctttagtgtttttttattctttaaactgtacacatacttgtgttagtttaatttattgacttgaatacacatgtgttagtttaatttattgacttggatacacatctttaaggctttattagtagatgattttttattttctgtcttaattactattggttttatattacctttatgaattaggagagataattttgacttttgtgatatgcacctttttatttttttttattatggtttttaatgagtgtgcattgtgataggagcaaaaaactatagaaggagactcttgctcttaatctagggtcaataactttaaatatgtaagtctctaatgaacttttttttttttgaacaactctaataaactatttggataatcacctttatgattttaaaaatagttgagttgggtagactaagctttacagtttagagtttaaaaatataaagggtcagagtagaattttaattttttgttatttttaaccaaaatatagggttaaaatatagtattaatctttacttaaaatataaaattttcaataaatatggatttttcttataaataatttaatattttgatcaaatacaatcttgaaaatatttttttagacatatattgatcaaaatacaa

SEQ ID NO: 106531 - DNA, 659 bp, Cannabis sativa
cctctttgagcagcaaggacttggagtttttcttcgtaattcaagtaggattttcatcaaggttctaagtttaatccaagctctaggtaaggttcttacctcctattttcatgttctcttaaattgtaagaaaataatgtttgcatgccttgaagttgttcttgttgtggttgttgtagttgtttattgttgatttcagaggcttgattatgagttttcatgttgattaatgcttggtttagtggctgttatgttgttggagcaagcattggagttttgaactcaagcttggctcattagtgtcaagtttagtttctgtgaattgtttgtgtttggggatgttttctgcagttatattatgattatttaaggtaatttaaacaggtttcgatagctaattagttggatgagcaagctttgagtttttaaactcaagcttgactcatcaatggcaatttttgtatttgtgcatgaagctttgttttattgctttggaaatattctttgggatgtatagagcaggtctagaaagtttggggaggattggggttgaattggttgagatatgcaattttcagtgtttcctgcactgaaccggaattctggttcagagaggcctgtaggaactggaatttcggttggcttccaggatttcctcc

SEQ ID NO: 106532 - DNA, 821 bp, Cannabis sativa
  modified_base (587)..(596): a, c, t, g, unknown or other
cgggtctaacccaaacccatgcaagtgcaaaaaacactctagaacccacccgagaaaactaaacggggtggacccaaaccgcttgtggaaacatgttttccaacgcaactaggttctacgggtcagaactctgggtgggttgactaggtccaggtcaaaccgaactcaaaggttcaaccctaattacatcaaactcagataacacaatcaactaaagtttaaccatctcaagattgaagattttattaatttatatataaacaactatatgatatgatttagaatatatagtaaaaataaatttacttattatacccacagtcaatataggttcactctaatgtaacaaatatatttaattatgtctactttactaatactctcaaatagacataccacattacaaaaaaattacttttaataatattttttttagtcacaatataaatttttttgtgactaaatgttatttttagtcacaagtaactttttgttgtgactaaaacatagtatttagatacaagttgttattaattttggttacaacaaatatcgtgactaataataaaaacacatttagtcacaannnnnnnnnntttttgtgactaatacatttagttgcgtatatattttttagtcacaatataagaacgatgatttactatttattacaattttttttgtttttagtcaccaattttgttataattaaaagtaaaaagaaattatagtaacacttgccaagtataagtttacttgtctctactctactaaaaccctaaaaacttccaattaattaattcacttagaagaaatatgat

SEQ ID NO: 106533 - DNA, 940 bp, Cannabis sativa
  modified_base (902)..(903): a, c, t, g, unknown or other
ggcccgataatgtccatgagtactccaactcatggagacatatgagtcccctcatggtcctcatatgtccgccccactagtcccactgactagtagtagctcacttagcaccaaggtgcaaggggtggtggagagctgacactagggtacccccttaaagagcattctgagcttttagccttctacgaggaacatagatgatttttgctctatagacatatgggaagaaccatataccaaatcacctagtttttccaaaccaattgcaccattctatttgtagacccaaataaatggcgaataccaagtcccgtcccgttccggataatatttaagatatttacaaaaatgctactacatacaaactaagcatcagcatgctaccaacatgtgccaccatttgaccaccacttgaccaacttgtgagcatcacttagcttgtaacgtgccatcttagcacgcattacactctcccccacttcaacatgtcgatgccctcatcgacggactgcaggcaaatcttcctgatctcgactcctaagcttactccaagcttctcctaaatcctaagtctgcacttgtccctctacctctatagaaccaccctcttggtgacgatcttgctcgcccactcttggacttgatcaaagaccttgtgccactgtcactattcagaaccacccatggagtagtgcctccgcgctagaatacttcgcccaacatgaactcctctgagtccatcacaacgtccttccaatcaagcaagtagtcattgcaacactgaccctgaagctaccacatcctctgattgtagctcactcgacaatcgtccaattcatactccttttcacaaggactaagtatggtgcacccctcagggtgaggttcacaaaccaaccgtnnccaacggcacctacaaaacacgcttccactaaagcta

SEQ ID NO: 106534 - DNA, 1171 bp, Cannabis sativa
ccaaacatagccaaagggttgatcgtgtataccgaaagccaagacaccacgactgatatttacatggctgggaaacctctgactcatggttgaacacatttcctatcctccttacctgcaccacgaagtacccgtgagtcacaaagactctacaagaaaagctactaaatcaaaagcgatgtaaaatgcaagtaatcacaacatgacaaaatatacatacccacgattcattacatattcagcatgcacatataatttaatacaaacacatatattacgcattataagaaattcatggcaactcatagttaacgacttcatcatcataataaaaagatattcactcaatacataatcacataatcaattaattgtcttataagacaatcctactttaatgcttcataaagcatccttatcactcattatccacgagctacgtatgtcactatcattgctcgataaagcacccaataagtaagaaacctatatgcagtttcaagggagtaattactgatttcattaacggtaatgaccgtatctttatccttttctcgatcataatcgagtcataaaagatattaatcgtttcttcaatcatcatcgagtcacaaatgataatagttgttacctcgatcataatcgagtcacaaataataataatcgttcctcatcattacctcgatcataattgagtcataaatgataataatcgttcctcatcactaccttgatcaaaatcgagtcacaaacaatgataattgttttttaccaacacgcttagcagtacataaagattttcttacctcaaaccaatattgggtgtgcgggccaatctgagtggaaagatgctcgacaatcctaggtcctatgtcacaataacgaagctcgattaacaacttatccaatccttgaaacaaaccctaattcttaaccagacaaattctaactctccatgggatcaaaattaactcaaacatcactaaaatgtcttaatccaagctcagaaaaacatctcgagccaagaacctaactcaaagaaaactgggatttccccctgcagaccaaccaatcgaccggtcttgccataccagtagcaatcgatcgtccttttctggactgcaagaaaaccttgggtttctcctctaaaaccgatccaaaactccatcat

SEQ ID NO: 106535 - DNA, 643 bp, Cannabis sativa
tgatgcttctgctgttggggaggtccaaggtgttgttgttccatgtagtgaagatgataattccagggatgtagataatgtcaagggcaaagaaattgatgtaaagggagatgattttttcaacggcttaagccagcttgagattgatgatgaccaagttatttttgctagtttggaggctgttgcaaaaatcaatgtaaactgctttttttttactaaagaggaaatttcattaaaataaaattgttccattaaaaaaaaattgaagaagtcatttgtgttctctctagtcttcttccatgttgaagacgggaagggcgatccgaaagccaattgttcgagaattgagtgtggaattaggagctaggagtgagaaggaggctcgaatcggtcaggaaaatgtggtggaggaagttcgaacttcccaggaggctgtgattgaagcgattttgaaggatggtgcttgcgatctaataatggagaatgaaaattttgacctaggggaaggggaagagaagatcggtgagcattgttgggcagatattttttaaaatgaagaacatcagactcaatctcagagtcattagaggaaattttttgtgagcaagcttcaagatcaggaagcgcgattgagatttgagga

SEQ ID NO: 106536 - DNA, 775 bp, Cannabis sativa
ccgattagccatatcctgccccatattcgaagagatcctcttacccatgcttacctcagacttttctagatttacttgttggcccgagagtctagtatatctcttcaatatgttcttcatcgtatcgcattcattctccttagcctcaaggaaaacaaagctatcatcagcgaagaataaatgcgaaaccttgattttatcccttccaaattggatcccatttattcggccagccctttcagcttcatggattagacaagaaagaccttccgagcaaagaagaaaaaggtatggagagagggagtcaccttggcgaagaccccgggtaggttggaaattcccaatttgttcaccattaatgaggaccgaaaaattaacactttctacacatctcataagtttctctatccattgttcctcatagcctaaacccctcatcattgttcttaaaaagttccattccactctatcgtaggcctttgacatatctaactttagagccattttcttgccattcccaaatctttttgacttcatacaatggaggctttcaaacccgatgatggcattgtcttgaataagtctaccccccacgaaagcactttgttcctcagaaattgcttggtgcatgcttgtcttcattcggccagccaggcatttagccactattttatatatcacgttgcagagacttataggacgaaattcagacattcgggatggctttgatatttttggaatgaggcagataagtgtgtcattgatatcctgaact

SEQ ID NO: 106537 - DNA, 639 bp, Cannabis sativa
  modified_base (348)..(355): a, c, t, g, unknown or other
atttcattattttacaaaaaaaaattaaaaattatcaaaaatcacattttcactctcaaccctttctctctttcgaatccacctagaggcagctagggtttgtcaatttaatcttcatttcaagcttaattcagcaaggagttggtggtttcaagctttaggtaagcttctagtaactctatggttttcttgagtttaaagttatgaattttgcatgattttaaggaattgggttaagtagctgctgtttgtgtttggatttgttttcagacgcctacttatgtttggatatgttggtttaagcatgttttattggtttttagttagtttaaccaagttttgagtttnnnnnnnnaaacttggagctttaatggtggtttttgtttctgagcatgtagaagtgttttattgctttagatatgttctttgtggtctataaagcatgtttggaaggtttcattgagtttggggttgaattgattgagtgatgaattttttgttggattcctgcactgaactggaattccggttgggaaccggtctaccggttgggccaattttgggaacactatttcttcccatttttgtaatatttagggtattgccatattattcatcgatagggaatcttttagtttc

SEQ ID NO: 106538 - DNA, 927 bp, Cannabis sativa
ggcataaaacccaacaataactttatatcattatatattcattcatttatgttatatataacaaaaactaaaaagttaaaaaaataaaattaaaggtgcaaaattgggttggtcggtttaatggggcgggttgaacctattttcaacccgcccaattaacagattgggcggtttgtaattttttcgggttatttcggtttgtaatttttatcgatttttttggttcggtttgggcggtttacaaatttttttgtacaaccctacaatcaagtgtttggtttctttattagaacttgaaagcccattccaaaggaattacaattcacctaaactagggatttgcttttccactataaaatcatttgaagctaattccatactaacaaaagtctattttaccctatcaatccttctctacttctcaccttaccatcatattactaattatttaatatttatatgtaattttattattttatttttaaataattaggtttaagaatgtgcacatttccttcacatgataaatatattttttttgttaaaaatattatttttttgttcaatttataaaaataatggtaatttaataaaacaaatataatttttgaaaagtaaaagataattttgtcaaaataataaaaattctattccattccatacaataccaaacatgataattcatattccgttgttaattcatagttgttaacaaacaaaagaataaaaattccatttcattctatccttattcctattatcattccttttctccttctattttcactaagtaaccaaacgccaccttagatatttatatgctactcaaagtaaaacttaaagggaaaaaaacaaaaaaatacaaaaaaaggaaaaaaaattacaaaaatactttgggccgcccattaaacatttatacagtccaca

SEQ ID NO: 106539 - DNA, 1031 bp, Cannabis sativa
  modified_base (163)..(166): a, c, t, g, unknown or other
ggaaatgggatcttctgatgcgagaaatggaggtcttatgctgcagagaatgaggtctatgcagaggtcgagtccttttacatgcagacagtctttctcgagctacgtgtagacaatctttctcgagctctcctgtcctctataaataaccttgtagtctttnnnnaggaaaatggcttaatggtttgcccctagtggcatttttgtacagacaagtttgtaaaccaacttatcttaaatgccttgtactttttcatttgaacttaatatatttgtgtttgcttgcgtttttattcacaatgtaaacaattatattttgatcaaatgcaaagtacctttggtctttccattgctcataattttcctatttaagtagttagtaatctactagacttttgagttttgagcagttatcaactctgcctcgcaatgacagttacgatctgtcttaagcaaacttaaatatacgtttaattattttctcatttgtgtacattttttattgcttatatgaatagttagattatctatccatatactaggtttaagtacttttatcaagacatctcgatgcctcggttaatattcctatcttgtgcgaaccgttaatattcagttttgtacgcaagttatgagttatatctcatttataacttttaattttcctttttcgtcagacaggtttaaatcaaaaagttatgatggtttgatcgccttctcgtcagaaaggttcgaccaaaaactttaaaaaaaataaaagttgtgggtttgcattatatcatatatttccagataaattcttgttaatcatacacagatgccccttaagtaattttaaagagtaaggctttttaattgcttaaataaaagaaatcattctctttattcataactaaagttaaactattacatcaacaatgtgagttaaatcattaatttactggtaatagggtcacaaatgttccacgttccagtagttctttattagcgagccatttagtcgagcaaatttgtaaactctgattcctact

SEQ ID NO: 106540 - DNA, 569 bp, Cannabis sativa
  modified_base (134)..(138): a, c, t, g, unknown or other
aatttggcacctccccaacatgaataatttaataagattttgactaaaacttagaaatttgtttagttttggatgataaatatatttacaaaaaattttattttacctctattattatttgttttcgttaaaannnnnatgcgaccaaacacaaccagtaaccaaagtaaatatcataattatgaaacaaaaatgtaactgcaagctgggacataattaaacagctaaaatactaacgtcatgtattttgcatgaatcgccacaacaaccccacattaagaaaaatcggaattattcaacctaatagggccatggggaaagaactaaaacattatcttacaatccagacttaaaattaatttacagaaacctaagtatgtaagaaaaatatataaccagctcgacagtcaaaatgcatacatgtaaacaaaaggctcaggaatcccaataatggcctaaaccggctgaaacacaaatacagttaaaaaagagagcccattatccaaaaaattgttatttttgaataaaaaactttaaaaaaaatcacccaataatttctcataaaacaa

SEQ ID NO: 106541 - DNA, 749 bp, Cannabis sativa
agaaagtgaatcagaaaaaactctctccacgggaagtcccacatcttgagcccaacgcaaacctactagtaaagcaactgcttctgcccggaaaactgaaaaggagcctgcaaatgagatagttaaaccaataagtacatttaaatttaaaactcaaaattttagagtataattgttatagagtcaaaaccaaagggaaacccctttggtttgactctttacctaacttttaacataataatataatagtataaatttaaataacccctacgctaaaagggatcatatatctattttgaaaaaccataactattaaaattctttaaagtttatccagataaaatccacttataattatttagttaaaaatatttaagttgaagtcacctttgttattattacattgttttataccttcataagtaaatttgaaaacataaacttaaaactaaaaaaatagacccaactgatatttactatattattttaaaattgtatgtattatcccagtccttgctataagaaacataatacttagtaaattggactgatttaccttgtagtagtttagataagactgccttcatttgtttgcctgaggaaaaaatgaatgctccaaaaccaatcacatattgaggggttgatatcgctgcgtccacatatagtttatagctaagaacttctgtctctgtattactttgctcactagtacacccagttgaaactaataagaagagatccatatcttg

SEQ ID NO: 106542 - DNA, 673 bp, Cannabis sativa
  modified_base (55)..(63): a, c, t, g, unknown or other
aaaataacatacatataacaacaaattaacaagattacaacataaaaagaccgtnnnnnnnnnaaataaaataaaaaaatcgtaaaagatgtttgaaaccatatttttgtaatttttttgttgtttttatgtttttgtgaaataatcccttttatatattggcaaactcaaatttaaaatgagggagaatataatttttttgataagcgaggggggtgtacttttttttcgacatatgatatagcatattaaaaatgaagtttttttcaatattatacctaaaattaactttatttataaaaatacttttaaaaaattatttgcacacatatcaatgtgccacttcagcacacatatcgaaattaaaaaagttaccaaaaatagaaaaagttagaaaatctcatttctaagaactttcgttttgttgggagttttaaaaaaagtaatcatttagttacttttccattaaaaaatttatttcagaattttacatatgaaaataataaataattatcttaatatgtgaggaacatatatttttctgtctccaaaaaatgacaattaatatttaaagtaacttttttttttacatatttttaggctatattatgttattttattgtttaatataccttgaggttacctttttttaatgtaactcatatgatgttca

SEQ ID NO: 106543 - DNA, 1121 bp, Cannabis sativa
atattgcaacaaaacaatcgatttctaccataaattcataaatttatcaatttaagactaaaaactttatgaaaaaattgaaaaaaaaaaaaaaaaaaaaactcaccttcacctttgacattctcgacagtaggcgataggcggtgagaagtggtcggttttagtttgggagagggccgacattgtaggcggtaggcggtgaggggggttttgatttggtgaggggtttggttaagagagaaccgagtgagatagaagaagagagagagttgaggtattattatgagaggggtattgttgagttatttaaaaaatagtcatatattttcaattttaaaatgtattagtttatgcataaaatattttatgtatagtttttttaattttccttactaattaataatatatatataattgcaaagaaaaaaaatttacaactcatgtagatgcattaataataacttgtttagtaaattaacttaattaagctggctttttttcgtttgtttgttgcgtaagtactaattatgtcttgtttttgtttactttttctcgtcacttaacaatttcttatacgaaatctccttcgtccactgccaaataaataaataaatgaaattttgagtttgtttttcgttttcttaatatatatataaatgagatcagagaatatgtactttgtaagttttttgtcgggtttcaacaaaggattatcagtaagtatcattattattattatactactactactgcaatctgacctaaatcacactaacagtgctatgtactcttctcactgtagccctgattttgatgctctcatcttagttgtcattttttttttcttcttcgttgtttccagcaaaagccataattattatcaaacatttcctttttcacttgtactaaagtcaaaacactccattttgttctctttcactcttctttttattttatttatttatatatttttcactatttccacactactatcctagctaacaatcatttacagtctagtccaggcgtatcattttttttttcctttttatgtcaagacaaatacttactccatttacagattgctgtaccaatcagcataattagtggaggaaatttta

SEQ ID NO: 106544 - DNA, 1004 bp, Cannabis sativa
gcgcgaaaaatgagcccattgttactcggatggttggaagactgaccttgtcttagagaagtcaaggtgccgcacgggtgttccgctgcctgaaaaggtaagtccgtgacacaacacactattttttgtagtaggttttctgcagttttttagtttcgtggtacgggtgcggtttggaaattgaaaaaaaatacatgtgtgggttggtttgaaaaaatagtcaaaactcgcaccacccgcatcgcgaacaccgttcgtgaacactttattcatagaaagtaggaaaaataagctcaactaactaaggaaacatgagctgtactaactaataaaagtaacaaacttatgaatctactcaactaacaataccggtaaattaactaagtgaggaaaacatgtaaattgtgttaaaacaagcaacaacagataaaaatctaaaattgaaagaaataggaacacagaatattattatgaataataaaagtaggatacataataattatttgatgataaatcagagagacagaggttttcaaaagatgatggaatagaagagcatttagaagtgaaccatgtggccccagctctcctcactctcttgctccttccttcaatgctcaaagccactctctggcgtgttgttactgtcaactctctcgtaagctttcttccataatcttctctttcaattattttattattcttcttaattaatttcagatatcaaactcaactactttttaccttttctctttctcatacttataaatttgctactacttccattccaatgcctgtggtttttggttttgaaaaaaatggcaaacgcccttattatatattaaatcataataagcttaatttaattttgtgcttggtgtagtatttcagcaaatgaatataattttttctaaagaattaatttcaaattatctaagtataattttttttgctttaattgaataaaaaataaataaatctgagttctacttgttagaatttgt

SEQ ID NO: 106545 - DNA, 528 bp, Cannabis sativa
aagtgcattcggaaagcaaatgtgaaaagtaaacataatggaaatcgagaaattactcaagaaatcaaacgtctgggttcaggttacgtcaagccaaacgagcagttttgatgaaagcacttcagcaaacttgaagctaaaaacctctcttttcgctctgaacttacttagcaaggaaggttggcaaaaataagtttgtggataaatgctcattggtatttataggcaaacaatgaaatggggtaattatttcaaaagaacctcagacgcctcggttcccccctaaaagcgaatatgggaaatcaaaagtaatcaagtgtagctgtcaaccgtggtgagagaaaatcagatttcgaaatacaaattgtcagagcatttattagctgaaaactgaagggacgcctagtgatcctcacatcgagtcgcgaacaagcgcacctgacacgtgtcacccattctaacgcaaagacaactcagaggaagtctacacgcaacttcggaagtcccgtacagacttgggggcaaatg

SEQ ID NO: 106546 - DNA, 682 bp, Cannabis sativa
  modified_base (51)..(55): a, c, t, g, unknown or other
taactaataaatgtaatttatgtgatataatatatacacttctataaaaannnnnaaatcggtttaattcggtttattagagttaattgggttgtttagaataatttgtaaaccacccaatatattcattggacggtttggatttttattgtattatttcgggttgtattttttgtcggtttattcggtttggtttgggcggtttattcgggttgggcggtttgtaaattttactgaacacccctaactgatcatgttcgtcatctggactcaatgttaaaaatcttgcgtctgtataagatgtggctcaacctactcaagtgtgtctttgctgtgggctctgggaagtttcttggcttaatggtaaaccaacgaggtatcgaacactactaaaaaaactccaaattcccgtcagttttacaccgtcgggtaaagaattcctgacagtccataaaactgtcgcctatatgcgcatcgcaaatactgggtagaataggcgacggttaaaaatattcaggaaaatagtatgggcctcaatttaaacttgtcacctatagtgaacactataggcgacggtttaaaatagtggcctatagtttaggctacgatttaaaactgcggcctatactatagtaaaactgtctaaattcaacgtatgatgtaagcatacttgtatatatat

SEQ ID NO: 106547 - DNA, 660 bp, Cannabis sativa
gggacatctgggatatctgggattttattttgtagtcgttgtgcgacctgcctaaatatattttgaatattttgtaaaattttaaatacaggatcccaacttttgtaaataaatgtgtaaaagtttataaagtttagtaattaaatctaaagttttaatttgacacgattttcaagaaaatctctttgattagcaaagatggcactgtaattgaaaaattattgtagcgcacctaagtatcagagtgttacatatggggttcgtcaatgacaacccctaattgtccttttgctggaggcttagaaagagttagcggcacctccttgtgcgtctgagggaggccagcctttgtggatggaggctagccttcgaaggtggtgtctagccttcggaggcagaggctagaattttgagatggaggtcagccttctgtgatggaggccagcctttggaggtagaggctagactttagagatggaggccagccttcggaagcagaagctagactttggagatggaggccagcattccgaagcagaggccagactttggagatggaggccaaccttctgtgatggaagccagccttctggacttcctgttgctgactcgccctgctggtatgtctgggcatgttgtgttttaggagttttaatggaa

SEQ ID NO: 106548 - DNA, 1198 bp, Cannabis sativa
actctctccgtagagataatgtcgccatatcatcaaagcaaacactaccgcggtaagttctaggtcacgagtcgggtaccactattcataatccttcaattgatgagaggcataggcaataacccaatcagcctgcatcagtacacaccccagaccctgtctggatgagtcacaataaaccacgaacctctccttgtcaaaaggtagggctaacacttgagttgtgattaacctccgtttcagctccataaaactaagttcacacttatttgtccatacaaaatgctgattctttttggtgagttcggttaagggtgttgaaattttagaaaacccttcaacgaaccaacgataataaccagctagacccaaggagcttctaacttttgtcactgtttccggtcttggccaatccctgacggattctatcttccctggatccaccttgatcccatatttgctaacaatgtgtccaagaaaggacaccagctagccaaaatttgcactttttgaacttggcatataacttgtgttctcgaaatcgttgcagaaccatccgaagatgttgttcatgctcctcttttgattgagagtacacaaggatgtcatcgataaatacaataatacaaatatcgaggaaatccttgaataccctattcatcaaatctatgaaagttgcgggagcattggttggtccaaaagacataactagaaattcataatgtccatacctagtgcggaaggttgtctttggattgtcttcctctcggattctcaactaatgatagcacgattggagattaatctttgaaaataccgtcttcccctaaagttgatcaaaaagatcatcaatccttggtaaaggatattcattcttaattgttggcttattcagttcccggtagttgatgcacattcgcaaagatccatctttcttcttaacaaacaacatcggagctccccagggtgatacactaggtcgagaaaacctatgtccctatgtcgagtaatccctaaagttgaattttcagttccttaagttctgctggagctattttgtaaggggccttaaaaaccggttttgctccaggtgccaagtcaataacaaaatcaatttctcgctgaggtggtaaacttgaaagttcatcaagaaaaacatgtaaatattcctgaatcaccttgatgtcttctggccgaa

SEQ ID NO: 106549 - DNA, 837 bp, Cannabis sativa
  modified_base (57)..(58): a, c, t, g, unknown or other
acatgaaagtgacttacatgtggtgtcttacctttccagatttcatatggtgttttnngagtacctggacgtaagaatactctgttgatggtataacaagtagtgttgatttcttcggcccaaagacgcctcgtaagcttcttgctattcaacattactctagccatttctattagagtacgattctttctttcaaccactccattgttcaagagttttaggagcagaaaattcatgagaaataccgttagatttacaaaattcatcatacatagtattttcaaattcttttccatgatcactcctaatccgaataattttaccaatgttacaaatcttttttcaactcgtaatttcaaacacaaggattggaaagcttcaaaagtatcagatttttctctcaaaaaatccacccatgaaaattgagaaaaatcatcaacacacacaaaaatatacctcttaccattcaagctttaaacctggattggacccattaagttcatgtgtaggagttcgagaactctggaagtattcacatcagggacactcttgtgagaaattttcagttgcttaccaagctgacgcggtccacattttcctaaagactccttaactaatttaggtaatcctcgaacaattcctgcatcagaaaatctcctcagatttttaaaatgaatatgaccaaatttttcatgccatagatcagtaacattatcaatgatagaatgacaagtggcatgcgtagtgagagtataacaattataactagatctgagcccttgtaagacaatttcatcaagaatattatacacatagcaatgattactatcaaagctc

SEQ ID NO: 106550 - DNA, 653 bp, Cannabis sativa
gaattagaaaatagacaactctgataacgcttagccaaatctaactgacaaaacgctgagttggaaagagaggctacagcggctagggcgacccaaggaacaaatcctcagaattaacctgatccggtggtaagaagaccgcgaggcagagctcgaggttctagaactaggagacaggaaacaaaccagggaaatctccaaaacacccaggaagaacaacctaggagtaaaagggatgttccaatagataatcaaacaaataatcaagagcaacgacgagatgttcctgaaggatcgcaaggatttacgaaccaagggaacgaacaaaatggcatactagaagcttctcgcaggaatggggacgcaagatagcctcgacttgggaatcagggatcccttgtggcaatgaaagaaaccatggaaaccaacctaggacaagtggactaccttcaagataccctcaatgtccttcttgattagagagagagagagaggatgtatacacatatctaaatagaaggcatctaacctctttcaaagtagaaggccgatacaagatgaagcaagttctagttcaggacactcaaggtctcgaggacatagtcgatcgggtaggcaaatgcgagagagaactagacctcgacgttatgctg

SEQ ID NO: 106551 - DNA, 755 bp, Cannabis sativa
gatttttgggtccaaatgttcaaccctatatcaaatcatgcaaatctcttatccacttcttcaatagattagacaattttaagaatcacgtgccagttatatggatgttatacctcatcctcccttaattttgtctttggtatgcaccatgaggtttcacatcccattaaaaatgaaaccgttacaataagctagcctcccaaaggaccaagcataatccctcccatgagagattgtggagggattcacccttgacccaagcaagaaatgatgctagtaaaagcatctctatcctacaccacataacacgtctgtatgttgccaatcgaatttgggaggcctccctcctactttccaacaagtctagggattcaccctcaattgttgattactaacttggtagtatgtcgtcctgatgggagggcaagtctatttcagccaatatcatcacatcattagttagaaggtcagtttattaaattcagtatttaataactttttatttattttattataaaacacatgtaattataatttctttgttaatttcacaatctttaatatttgtcacaaatttactatcttttcatatattttaaaagaaagtaaattatgtttttaatttcaatactaatactttatttgtaataacacacaattaaaatgttatattttaaattatatcactacgtataagtgcaatatatatataaaaagattacaaaagtttgacaacaccgtgcaaaacgtggctt

SEQ ID NO: 106552 - DNA, 894 bp, Cannabis sativa
  modified_base (145)..(150): a, c, t, g, unknown or other
  modified_base (501)..(501): a, c, t, g, unknown or other
tattgcttatggcagtttcaatacgttttctcccatgcggcattaaatgagaggtgactgttcaaataaggtcctgttcctcccagagataccttagcattcccctggtctccgagagtatgtggagccttcacctctccttcgnnnnnnatattctcgttgacactcctgatgccaaagacttagttgatttatcaaatagtcgtgcttcttagacccacgtgtcgttgtcatattggtccacgtattttgggcgaaattaagggcaacatgggtgaaaattaatttttacgggaaataaattcttaaggacaaaatagtaatttgtgaaattattattttgattcaatatagcaattatgaaatgtataattaatagtacataattattgttgttattagataaaactatattaattagttaaatattaaagagaaaaatatataatttaaaaataataatatttattttaatctgaaataagagattaatgagaattnatcaattattatttattggtagaataaaaaataaatcttatttatgacaaaattaaaaaataaacttttaaccttaaaagacccacacgcgcgtgtagacccattctacacgtgtggggtgacgtataaaagtacatgaattatttagtttaattattttattagttaaaataatttaaattaattatcttttaattattaattaaataaattattcgataattgtttaattaaaaggataattattaaaatgaaagatctactgatattttatattcatttattatatatttatatttaaatttgaattctaattcaaatcaaattagatatttaattttattttaaataaataattaaaatgctttgtttataacactatatataagatat

SEQ ID NO: 106553 - DNA, 1296 bp, Cannabis sativa
  modified_base (49)..(58): a, c, t, g, unknown or other
attttttaaaattttgtagaatatattaaatagctataacgtacatgannnnnnnnnnaaaaatagactaaaaaatttttctagatagagggtgcattagtatatctcttttaagagagtgcattgtagaatcaccgaaaaatttatatttttatgtttaaagatttatatatatacttttacggtattctataaaaataacaagaaaactacataaaagcaatagaaaaataatatacaaacaacaacaaaaaaataagagtgcaatataaaaataacatggaaattttaaaagactgtattttttgtaaaaaaaatattaaaaaccgtaaaaatatttaaaatttcttacaaccatatctttgtaattttttgtttagcgttgtttttgtgtattttttaaataatcccattattaaacctaaaatgagatagaccatgtttagaaaagtcaaaatgatggagtagcccaaaatctaggcccaatatcattggatcaagaaacaatcaaggaagagttggttgtattactcagcccaggaaaaaaagcccaaggcaaccctcgccttctacttctagcctcatctgtgtgaagaaggagaagatgagcaaaacataaatgaggaaggaagagatagccctttggcttcaggacttcgttatggttgagacttgagcctagatgaagattcagaaacgaggttattattaaattttattttcacactaaatcagtttatggtcctatttgtactattttagaaaatacatagtctattttgtcatttaacaaaacagacagtttaattagtaacttatacagtgtctaaaatagtatttactcaattttttattaaaaaaaatataacatcaaatttcattgtatagcatcaatacaaattactagaatgaaatctgcttcttactaatgttatagcaccctcatattttgctaactaagttgtccacctcaacaaatattttccgaaatttaatcattggagatgctctaaagtgtgtcaaatttacaacatgttaaaagttgtaccaaattggcacaatactatcttgtgccactaattattgtgattctttgacttttataaaactttacatacttcatttaccccattaccattatttaaataataaaaaagataagaaaatatttttttatttttaataaaatattaaatgactattattaatattttttttttttacttatttaacaacttatgtactgtagcacaaatataaataatagaccatatataacacaaatatatatttttg

SEQ ID NO: 106554 - DNA, 775 bp, Cannabis sativa
tgagttaacctttcatacaaggcatggggagcctgtttcagaccatacaaagccttttatagtttatacacatggtctggaaactgaggatcttcaaatccctttagttgctcaatataaactttctcactcaatataccattcaaaaaggccgacttcacatccatttgatacaatttgatatcaagaatacaagcaatacacaatagcaaaaaaatagattctaatcttgctacaggagcaaaagtttcatcaaagtcaataccttctacttgtgtatagccttgtgccaccaatcgagccttgttccttacaattgtaccgaattcatcacttttatttttaaagatccactttgttccaatcacattgataccttttggtctttgaaccaaaatccaaaccttgttgcagacaaacttattaagttcttcttacattgcattgagccattcttcaaaagcaatggcttccttcacatttttcggttcaaattgtgagacaaaacaaagaaaactaatcaaattaacatacctttttcttgttaccatgttttcttcaagatttccaagaatgagatctttaggatgatttagttttactctggtgcttggttccttcttggtaaaatcagtaatgatgtttggatgaatcgagataggctgttctggctatccagaaaactatcaatctcggcttctgtggaaaattctaaaaaatctttaaaatcatcaacaaccacattagctgattccaaaacagtttgagttctcat

SEQ ID NO: 106555 - DNA, 701 bp, Cannabis sativa
catggaagttgttattttcatatgttcttcccctcgttgttgtattcttagtgttttttttttcaagaaagatatttagggtatagggttttagagtttgcttggagtatttttttttaatggtttctaattgttataaattttatcagttacagggttgtacaatgatgcttttgatgttgttgaagaaaaaaagatgatggtgttagttctgtgtttgttgtttaaggtgtattgatattgtaagatgattatattagttttcaattttccgtatagaataatttctttgacttgaaaacgttaaaaaattttatttggtgccatttcacaattgattgcattaggaaatggtttttgaatttcaaaatctttggccaagctgatcttctgcttacatataatggtatctgaaatgatttcatttttgttgtaaaatggatttcaaacgaagcccctgatagtaaatgtggctactttaggtggtttaggttaggttttttttagcagaaaaaaagatagaagaagaagaagaagaagaagagagggtgaggaaatttaggaattagggagttaggtttttgttttaattttttagttttttaaaattgtttttttaatttttaattttttgattttcaaataaaaatatttttttttattgtttatttttaaagtaattaatttttatattttaattt

SEQ ID NO: 106556 - DNA, 668 bp, Cannabis sativa
tgatcccgtctacacgatgatgtacctgcctttcttcttcttctcattattttctgagcttcatttcggttatctgggagttcacccgagttgagataggctactattggcgtcatccagttcggagatgtgtcgatcatttcgatttcttccgtgccggtgatactaggctcttcaagaaactggatcgggaccaggttcgccttgtcacttatattgctgctcgccaatcaggctagcgcatctgctgttgtattttcttctcttggaatttgcctgaggctgtagcttttgaattgtgtgagcagatcatgtatttttctcagatatgctatcattttttctccccgagccttgtattcgccagatacatgatttaccacaagctgtgagtcactgtagatctcaatgtgctcggctttcatctccttcactagtttgagtccagcgattaaagcttcatattcggcctcgttgttggaggctttgaatccgaatttgatagctgcatgcagatgttgcccctaggtgtgacaagggcaattcctgcaccgaatagctgatctgtggccgacctatccacatgcatcttccaggtcggcttgttttcagtgttgcttggctgtggtgttgactcgagatcatcttctgggatgctttcagttttt

SEQ ID NO: 106557 - DNA, 610 bp, Cannabis sativa
gcaaatgttgagatggcacaatggagggcatactggatcgttttggccttccaccaaactagtttcttgcatatttttgttttcttttcttttgcatatttactcttgtttttcattttgtttttggttgtgtgcaaaggcttcatgcctcttgactttgtgttagatggtattttttttatgtttttttttttagtttgttgaatgttattttgttggatgatatggtcttatttttatgcatgaataatgttgctttattttttttttctctatattttgtgaattccttgccaccctttttgattaatcaaaagggagagaatatctattgattattatttttttggcataacctcaatttttttttagtatctaatcttttaatcataagtaaaaattgagggggagtttacaaaaacatgcaaggtaaaattaaaaggtaaaattttttttcttgcacacattaagggggagctaatccaatatacattgtttaaatttttccttcacctttcaaaataatcaaatatttgatatcatcaaaaaaggggagattgttaactcaaacttttaggtctccttattttgatgattaacaaatatttga

SEQ ID NO: 106558 - DNA, 2280 bp, Cannabis sativa
  modified_base (617)..(619): a, c, t, g, unknown or other
caagagtttcgtaggtgccatttcacggtggaccacccctttatatacaaagcaggtgtccgatcagttatacaaggattacattcattgtctatccgtttttacacattgaattacaataattaaactaaacaacactaacattaataaatgaacggcagttactaagttcatcaacgtgtgcgtcttctgaatctgcgagttaactgttcatattccgatgttaaactcgcaggtttatcattatgtttaggatgtctgcgtccttagatagtcgccttttgtggacatcgcatggcgagatgatagaacctacacatgcaagtctatatcggtttatcaaggctacagggttcttagaaccaaatcgtgtttatagacagtcggtctcctggtttatacatggacatggggaggatgctcggacataattcgatatgtgcgagctactctcttatctcgaatgcgatcagactttggtcatgctcgctatctctcgcttattctatcttaagcgaggtttgaaacttcgaggagtccctcatggacatttcagctttcattggaaatctgcgtatacgtgtcctctaaataggggtctggtctcgagtttctannngagagaaatctcactataacaaagcaaaaaggaaattttcttcaagtctgtcatgatatttctatctgagccatttgagcagcttcgtttggactacatttaggcttcaaacagtgagcaagttttcaatcttctcctcttttaacttttcatttttaatttatgagtttccattgtaggaaatgcccttattcttgacttgttgtagaagatacatagaaaatctaggctcgaaactttatagctttctttgcaatattttgtacaacttcgtggtttacgaaattatgcctttaatctagcattgctctattttcaccttgctcatccgaagcttcgtgaaatttaacttttaacccaaaaaattttaaacttattggttttgacttaactttttgtgcattttttgtccttttaatttgttgggtggtcctggtcgacgctttttcctgtttattgttcgatttcctggccaaacactcatctcatgtgttgtcttttgtagatgaaccttggtgagttttgtggaggcgaacactaaattgactaggctttgcttcaactcttgtacgaggagaggatcaacctcatcttcgtgccagtccatcctcttcgagtgacggactttctaactcgagctttgaagattgggaagtgactagtgatcattctcctactctagaacccatacgcaacatcactcttacaccgagcagatcccaagagaagggtacggccgcttcatttgggaatgtaagaagggttggaggcattatcttccggctaattggacatatattgtctggccaggtgttgctgacatccttcctgttggccgtcaaagttttggtaacttcggcatcccagtagttgtccctactgttaatgttgcaagacacacacattagtatccatccaggagaaggaagatggctcgcacaaagtaaactacgcggaaagtcaatgcatctgaccctcacgtggcttagctcgccacgttaccaagggctgagcaagatctgccagctatggaggaggacgatcttgagggggacattgaggtccaggagatagaggaacaggacgacgtccgtcctgatatcccttccgaagctgaggaggaaggagtggtcgaggctttaaattttggacggtataatgaggctggggagtcagtgtccgtgtacggtgatgccttggtcgagggggaggactatgtcaccgaggagcttactgaggcagttccccacaggaggcaaagtgccttaggtgccagatgggtgagccctccgtccaaaataagtgaggcacgtatgagggcctaaggctgcgtacttgtgcggattggagtgttacgtcccttctttgaatcaccaggcaacaaacccacagaatggtttttgtgcttggtcaagtgctcacactaagcaaggggcgatggtgcctttgcactcgtacttcaagagggtggaatattattttcacctttgtctgacctagttcattccaaagggcattaagtatttgtcggccatgtttgtcctctacgccattgaaggatggggtgtgccgtgtccacacgaggtcaattggttttttgacatgaagtctacccctaagcagagcaggtcagggtacttctattgggttttatgccctaa

SEQ ID NO: 106559 - DNA, 657 bp, Cannabis sativa
ttgcttgatacttgcatggaaaattgcagtattcaagtctccattttggatccaagtgaccttagccttctgttgcagaaatgttgaatagtcttgctgcactcggattagcttagttctcgcagtcaattctctatcaatcatctcaatatcaagcggatcttgctgtagttgttgttgcacattttctagatcaccctgggctctttggacagccgtctgcatatcagagaaaccatctttgttaatctcttttagaactggctttagagctttgagcttggatatcacttgatacatcttggtcccatatacccgattgttccatacatcctgaaccttattgctgaagtgcgggtaactactccacattctgaaataccgaaatggtctccttccttcaactctccttggatacaaggataacacacaaggagaattatcaaatgtcccttcgctcagaaagttcgcctctgctgtcagatattgatcgagccatgcttggttagccataactttatcaatttttgaacaaattctacctttcccttgttgtttgtttgaccatgtgaaaaaattcccagttgccttcacatcttccaaccgacactgctcaacacagttcgcaaaagatatatctggataatacttgacttt

SEQ ID NO: 106560 - DNA, 679 bp, Cannabis sativa
  modified_base (622)..(623): a, c, t, g, unknown or other
tttggtgcattaattctgtgattgttgtttcttttctggtctttagtttttttttttgagtcattgaacataatctgtcaagggggagaatgtaagtgtcgttattttgtgacagcttatttgagtacaatgtctagtcatgtctggagtttcagtctgttatatctacacttgcaaactgttaagtctgttatcgttaggtgctagttagtgccaggtggactgttttgttgggtataaatagtcggtttccttcagtaaacagattatccataaaatcaaaatcgtaggttaattcagttttcatcgtgggagttagagtcctatcttgctgctcttgttgttgtttctataggtctgattgtatagcttgaagatggtcatctatggcggaaagattagaacctgaagttgctgagttcaaactgaagggagttcagtgtcaacttcgtcatcagatctgaagggatttcaggttgaagaagtgtcgaagaagaacttaattgttgcacaagggattgtgcactagcactcaagattcttgattgctgttggtaattcattactaattgctataaagtttgtattagattcttttagagagaattggaaattgaaatannaaactcttgagaattagtagatgagattaccctggttcggggaacccaagcactag

SEQ ID NO: 106561 - DNA, 1357 bp, Cannabis sativa
aactaccaatataaatttgtagcttataaataagtaaaaaattataaatactttgtctacttttattatgaaaagattatatatatataaaatcatttttatcaattaaaagcaatcacttaaaagaatagatgacatcttagagggagccaaagcctcctcgaaacgacgatcaaccagcaattgagagttcctagcaaaagaaagtccagctccgctgattgtttgacaaaatacaaaaaaacagaattcaaagaacccaacataattttgcaatcctcaataacaaaaccaaaagaagaatataaattcaaagaactctggatgacctcaataaccaccaagctattaaattccactctgacttgaacaaaacgcccagtcttcaacaagttgagagccttcttcacgctgagagcctcgaccaccttaggattagctcttcccaccatgttccaagccatggcaatcacaaacaccctgtaatcaacttactaaattaatccctaaaaaacccttactaattagttatgctccaaaataatttgttaagtgtttttttaatataattgttaaatgttgatggtgacaagctgtgttttagtactattaaatgcaattaaaattacacatattagtttttttatatagttactgtgtaaatttagactcctcaactactttaaagttgagtttagaaagctaagagaaaattgaaagtgaatatgattgaaaaaattacacaatcttatgtatttgtttgatcatgtaattaaactagtcgtagtgttatttttagtattaaatttagattaattttagtatattttaaatttagtttaaatcgtgtttggagcattttcacgctttttatcttttatttttgtagatttaaaatagaagaagattagaaaatatcaaaggaataagatgaaaaaaaagataaaaaaaatctcataaaaagatatataaaataataaagctgaaacttcaagcctgaattcgactatcttctaattatattttggaaaaagtcaaaacataaaagttctagatctctcttatatctttccagaacatcttaaatcgtctaattttgataaatattgagagagttatggccaaaatactatcagtcaatgtagtagaaaaatcaccattgaaacgaagccaggtagtgaaactccaacacgggccacggcccgcccccctaaacttcacaaaaatcgtctttttctctcacgtgagtttcggtggtttcccaatttgaataggcctttaacatgtgagtttttatatctttttaatccctgaaggcctatataaaaggtgaactagagttgatttcagtgaagca

SEQ ID NO: 106562 - DNA, 567 bp, Cannabis sativa
attgtcatctcaaataaaaaatttagatgtagatattaattcaacaaaaaataaaagaaagaaatgaaatgacatgaagaaaggtagatttgtaattaggtaagcttattaccttggagctgccattatttggcatgtcttcaatgatgcaaccagagggtaacttccaacaacgagaagaagaggtattatcctttgaaattttataggatacgtcagcaatcacccaaattccaacctcaatttgttggcaaaggcgaaggaatgaaatttctctttgcggcacatgaggcgaaaggacgtgcatttgcgcatacatctacatatgcatatcttatatttttatcaaacatgcataaaaaatttgtacgatatatacaatatatatgcaataacttaattatcacacttattattatatgcagactgtatttaccagtagcaaagctccatgtctgtttcccaagtctcctttttcaatttcttcaattgtcttagctttcgtaataattgtaggaagtaggtctacgaatttattctgcgaaatatgtataattaataagctcg

SEQ ID NO: 106563 - DNA, 739 bp, Cannabis sativa
agagcaagagtgaggggaggacggtgatatgtcagaatctgctgaaactgagtatgggtaacgctcgcatccttcaccatgaagtactcatcagcaaaacgccctattttgctgatggccttgtcatccgtgtcggtcaaccacttgaaccctggctgagaaaaatagaagtaccccgacctgccttgtttgggagtagacttcaaatcgaagaaccaggcaacctcgtgaggagaaggagtaccccatccttgggaaacgtagaggacaaagagggaaaacaaatacttaatgcccttaggagtgaactgggttcggcagagaccgaagaagtccgccacatccttgaagtacttctgcaagggcatcaacgctccttgctgaccatgggctccagaccaggcatacatccccttgtaagagtttgtggcgcgattattgtggtcaggaatgtagcagtccagctcgcctaggtatccgtcctggtcaagagttcgaaggcgcgcctccgtaatcttggacagaggacttacccatctggcgcccaaggcaccctgccttttatgaggaacctccgcggaaactcctcactgatgtagtccaccccctcgaccaggatgtctccgtcagcatcgactggctccccagcctcattgtacccctcgtaatttgggagctcaacctcttcctctccctccgcctcggaggggctaccaggacgcacatcgtccagctcctc

SEQ ID NO: 106564 - DNA, 915 bp, Cannabis sativa
  modified_base (52)..(60): a, c, t, g, unknown or other
  modified_base (595)..(597): a, c, t, g, unknown or other
  modified_base (689)..(689): a, c, t, g, unknown or other
aaaattataactaactagattctttctgaaacttattttaattatttcattnnnnnnnnntatttaagttgaaaattagttgtttctattttttttatcaacttatattggaatatcttttgaattcaaattaagttgaggaattctagaaattggttattgaagattcttaagatattttttttaagttgatatttctttcaacttaaattgtaattttttttttttaaaaaaaattaggtggttacaacctaattttaatatttaattaaattctgtttgaaaatatttaagttgtttttcagattctttctataacaacttaaattagatatctttcaaacttcagaaaaacacttaattaatatattctagatagctatttctagtactagttatttttctaatgttaaataggaaaatattttagatcaaaattaattgtttaataattgattttgaatcaatctaaatatagtatattttcctagtattaaattagaattaataattaagttttcatttatacttaattatttatttcttgtatttaatacagttaattaaattgaaattaaatatctaagttgatttnnntcatgatacttaaatattattttttttcatgatatttaatagaaaattattttaagttaaaaatttttatttcataacaacttaaatttgantaattttcaaaatatattttaatcattttcgaattgcatttaatatgcaatttttttttgaaaaatagattaaagttgaaagttaattattaattaactttggacgaacttatatcaataaatttttttcattcaaatgattaattaaaatatattataattagaaaataaattaattagtcaatgaaaatctagatagatatttttttgcttgaagtacttttct

SEQ ID NO: 106565 - DNA, 569 bp, Cannabis sativa
  modified_base (431)..(435): a, c, t, g, unknown or other
catgtggagatcgactgccacttctttcgagaaaaagttcagtaaggatcactcaagcttcttcatgtctcatctcaacagaaccttgcagacatcttcaccaaagctttgctaccttcatctttctcaagcattgtatccaagttgggtgtcattaatatttacactccaacttgaggggggctattaaaatgtaattagttgagttagttataggcttttcacttgtctgccatttctgttaccagttggtatttctattattaactaactgattgattagttatatttgaccaactaggttcttgattattgctgctataaaagcacttgactctgtaccatttcattttcaattcatttttgagaactaaagcacttttctttttttctctctcggtttctctcagactatgagaaaaaatttgacnnnnnaattatttcagatactaaaatagataagtatcgatgcatctcttttaaagaggtaaattatagaatttttctataatatatataagggaaatttgcggcaaaagtctccaaaaagttcactttgatacagataa

SEQ ID NO: 106566 - DNA, 682 bp, Cannabis sativa
ttttcatcaacatcaaaaatcaaaattatttatgagaattgagagaaaatacattagatatattttgctatcatttatatttctagttttttttttcttttttttttaaaaaaaaaaataaaagaattagagaataatatcattcattgaaattttttgatgaaaatttatcaacggttaatagaaggtatgtatttgatatttactctttattcattatatgtatctatattttttattatttttaatttcatatctgtatttttgttatatatgtatatgttgtaaatttatccttgtttaatactataaattaatcatatttttgtaaactttttttttattgagattcattgttaattgttatttagttaattactttttatgtacatttacttattctaaaaatataattgcataaatcagaaaatcaattttaaatgagcattgggcaattggtgactatgacttttctcaatttgaagtttcaaactttgaaaacggaatcagcagcgaatatcaggttttttcttccctttttgaacttccaaattaataattattattatcttgattgttttttgaaatatgatattagttgttgttattatttttttttactatgtctcctaaaattagaaaatatgagtttgggtatgaaaagcgtaagaaaaagaaaaaa

SEQ ID NO: 106567 - DNA, 552 bp, Cannabis sativa
tgacaaggaagaaaatcaaaacgcgagtggttcgagaacgcctcgcaatatcttaactatcattggagggccccatatcgcaggcgactaccgcaagttgcaagagcgatatgccaaagaagccaaggagaagccgttcaccaatgtaaacaatcttagtgagcggccagagaaaatgttcaagaaagaatgcgacgacatcacctttatggagtgtgatgcgagatgggtccatcacccgcattctaacgcactagttatcatcgccaatattggcggagataatgtccccagcatactcgtggacaatggaagttcagtgaatcttttgaacttccaagccttcaaacaaatggggttgcaagagaaggacctgcgacctgtgacgtcgagcatatacggttttactggcgacgtcatcgcattaaaaggaatgatcaaacttcctctcactttgggaactgccccagtaacagccaaatccatggatgacttcgcagtaatcgaccagtattcggcatataatgcagtgattggtcgaccaattttgaa

SEQ ID NO: 106568 - DNA, 657 bp, Cannabis sativa
tattgttgttttactgaaggcagttcatgacccagcacccaagttgacatccagcgcccaagatgacatcccagctcccaagttgacatatgacgtcaacttggacgctaggtaagtgtaaaaacgtccaagggaagtactttcagatgcctatgtggtattttgacatcacttaatctgttttagtggtctggcaaagctggtcaccaattctcaaagatgttattgctctacgaaaataaaagactcgaaactctttattttcgagtgagtttcccatgttggaaatcagaaatgcaaaattgtgaatttgagttctctaacttcatggatcctagttattatgaaaaactagacaggcagtcgaaacggataaatcacaatcggataagtagatttcagcacaccaacccatatactaaaaatcccactaaaaataagttactaaaaatgggcgaaaagatgccatttccttcactaattaagcaatctatactcatagcggtaaaattgtctaaaaacataacaccaaacaaaacctgacatttcaaatgtctaactatcttgctcttctaaatctaagatactacattgtatctaagtgactctaatggccaaatcatcgtattctactattagcaggcataatagcaaaaa

SEQ ID NO: 106569 - DNA, 653 bp, Cannabis sativa
agatgcatacagttttatattttcatatatataattgacatttgcaaaaacacggtttttcaaactcatttacttaaccattacatggcctagtatctcttttggcgtatataaactaagtcaatttttatccaatccgagagctccccacctcgttgctgctcatagaatactataatatcttaagggcacctctggccaagggctaattttttactcagcatctttagctaacttatctgcttatgctgaaactggtatgtcaaacatagactttcatctcaaaattttttcagatgctgattgggcttcctgcagtgacactagaaggtctgtttcgggctactatgggcttcctctttttttccctatatatatacctcatttgtaaatcctaaactcacttttggcatttctaccatgtgaataatagcagtaaaataaagagatttcatttgtattacatactcatatgacataagcataatagaggaagaaaaaagaaaacacgaatattgatcatgaaaatagttcaaaagagtccattaaatattctaaataattaccacttttaattaactaatcaattattttctcacatttccaaatcaattaagggcttttttcataaatgtacaacaaaaataacataa

SEQ ID NO: 106570 - DNA, 565 bp, Cannabis sativa
aatggtattactacatctatatacatttaacatattttgaatcataataattaactcgatgaaacaataattaatatacattagtattaactcttttttgtataatattataatactaatattacatagcattagcaaaatacttgaatttttattaattaatatcaaatgagttttatttagggcacaaagcccaacataatcacccaataattttaatactataattaaaaatattgaaaagttagtgaaacccttggtagaaatcgatggtggagatgattgagacaaagtctgaaattcatcattacaaaataataataatcttaaaaaacaacaatttttgttgaaaagttttattaatatgagatttataataatttttttataacatatatttaattaatcctgaaaaatgtaacaaacatagtaataataacaacaataacaaattacgagagtaaaatgataatattattagtgttgaaaaatatatctaacacccaaatattttaataaagtagttacataaattatcactctctcctttaaaaatactcccata

SEQ ID NO: 106571 - DNA, 1522 bp, Cannabis sativa
ttagagattcatatttaggatgtttaaataacatacatggtagtaaatctagatccttgtaaaatatattccaacaatatgtgttagagagagaatattttgtgtattcattgtattccaatattgtaggaatgaggtgtccatattctagattgtaccatttgttgccctagtggctatatattgaaatcaatacaacagtagctcaatgagctaaatattcatcatcttccttttcttagcttggtatcaaagctctagctcgatttcatggcaactgaagaacaaactccaagaaatggttcagctcagtctggtagcaatgttgctaaccaaaacaatagtgtgcatggagcctcttcctccactatttctgtacctcattttgggagcactttaaaccagccattttctctcaaacttgacagaaataatttttcgttgtggaagacaatggtgatggctattgcaagagtacatcagcttgatggctatttaacaggagccagatcaataccagaggagtttttaccagcatctgatgctgaaggacaaccaaaagttggatctgagattaatcctgagttcgaacaatggatagttaatgaccagttgttaacgggctggctctatggctccatgactgaaggaattgctactgaggtgatgggatgctcttcccttgcagatctatggagtggtttagaagctctctttggagctcattcaaaagctaaaatggatgcgtacagaactaagatacaaactataagaaagggatccatgaacatggctaaatatctcaaacaaaacaagcagtgggctgatgttttggctttggcaggtgatccctaccctaaatcacatcttgtttctaatgtactgtctcgtttggacacagaatacttgcctattgttctgcagattgaagtgagagagaaaacaactcggcaaaccctgcaaggcctactactaagctttgacagcaagcttgacataggtacaaacagaggttctcccactgccaatcttacaaacagaggtacctctggtggtggaaattttggtccaagaaaaaacagaggtagaggaggaaccattaacaacagcaacaatcatggtagatctggtggcagaggcagaggttgcagaggaggtccaaaacccacttgtcaagtgtgtgggagttatggacactctgcagcccactgctataatctatatgatgaagcatatatgggaacaacaccacctagaagctcaaatgacaataacaagattggaaaaagtgttcctaccattgttgctactcttgagatgcttcaggctgatgcttggtatactgatagtggtgccagcaatcacataacttttggagctggaaacataaaccagaaaaccaagtactatggtaaggattctctcgttgttggtgatggtaataagttgtctattaaacatatttatttggttttatttccacaaacagtagcaatccccttattgttgggttatggtttta

SEQ ID NO: 106572 - DNA, 1395 bp, Cannabis sativa
  modified_base (371)..(372): a, c, t, g, unknown or other
aatagctcaaatctaatccaatctaatccgtaaaagtgcagattagattacttttcaatattaaattatttaatatttatgaaaaaaatatattttgtcatataactatattgttattttatgtctctaacatcaaattaaaataaataaaataacaaattcaaaggaagaaaaaaaattgtatgtataaaaaatgtttaattttattttaaattttatgtagaaaaaaaaattatatataagaatggaatatatatttaaatctagggaaattatagtaaatgaccccaaattataggactatgttagtaaatgtcttcatttcaaaacttgaagcaaaatgacacttttagattatttattatttatanngtcttttgccacataaaaaaatcaataatttttttatatttattttgaattataagcaaattagttaaagattacggtatatctataagttttgttaaaatcttttttatttgaaagttatgtcaatttttttaattgtgggttgttggtgttatactcgaaattcggctgcacttcaaaagttcacgtgtcctgcagtggaatataaaccacttgatattataaaaatgcaagataaaataactcgttataaaggtttaatagaaaatattcacaactcgctgactatatagtcttaagcgagataaggataaaagctattaaaaccaatattgacgagatacacgactacctcggagtacatagtaaggaagatattcatttattcgagtagaataaatataatcacacggtgacctcgaattacatataacgagacagtcacctcgcaatcttaactcaaataaagagacataacgaggtgaaccatctgctaacacttagcattttttccacatcaagatggataaggaggataactcatgttaagcgagatacaatcgtccaaatcaacatttaccatcgaaataataaaaacaaaaggcagttaagcagttatctaatattatcccacatgaaattaaatgaaacgtggaaattgtccacgtttcacgaacaattacatttcaactgatcccaagaaaataactaccaatctatattcctataaataggggcaaattccacagaaaagacgacgagaattttaggagaaaaatattattattctgatattgtattttgtactcaaaatatcattaataagaaagactcgtagggtacgcaaattttaattgcaaaatcacgtaaaaacatatggagttattaatttatcagcatctctatgatatatttattacgaaaaagctcattaattttagttaacaaaaatctgcgttaacaattggtatatagattttattgtacagtatattgttgttttgttgtatagtatattattat

SEQ ID NO: 106573 - DNA, 934 bp, Cannabis sativa
agttaattgaaagacctttctaagtataaagatcatcaaaattggagttataacctaggagttatgcatgttttcgtaaaacagtttctttaaaatcatggatcatgccaatttctgaataaaccccaaaaataaaagttttaaaaatagttacactccgatctagacaatacttccttcataaaaaatgtagctattttcctaatctttaaaacaagataaagatcttttaaaatagatcaaaagtgtgagagatattgaatttttactgaagacactttttctgaaacaaaacttaaaacgaaatatcctaactgagtaaagatactgacttttaactggtaaaaatccgaattagggaaaggtttcaccaaacaaaatatggattattgaattatctttctaacagtataagaattgctggaaaataatagatatcgagagagatatcacacttttactgaggcaatatcggaaagaaatttgaaaattgtaattcgacaagaagcatgaaaacatgaattttttgacatcgaaataatcataattaggaaaaagtccctgcatgaaaaatatagatcattgaattatctttaaaatggtacctagatgactgaaaacggacctatggggagagagatatggtagttttaagcctatttctctgaaaacgaaaataaaacacaactacaaattttacctgaagatttcgaagacacggaacgatgatcagataagagtggttgattgctgaccccgaagctcttaagattagaacaattgatttggtgcaatagagaggataaaaaaatcgagagatggtgagaataacaaaatacgatactatctggctgctaggattctagagtatatacgtatataacatatcgtataataggtttaaatttaaaaataaaaatctaactaatcagat

SEQ ID NO: 106574 - DNA, 738 bp, Cannabis sativa
tctatgtgtgtccccccctgagtaaaaaatctcaaaaaaaaaaaaaacgtgagagggggaggtggctgtaaaaaaatgagagttttgtcggtttaagtttaaataaaatgatttaaaattatacatatatttacatagatatttaaaaatatatatatttattttttgaagcataaatttaaaataaatttatatatatatagagagagttaattagttaattatataatattatattacatgtatagataattatgttagatatttttataataaatttattaaaataatactaaattatcaatttatagatttatgctttaataaaatattaacaataagagagaagaaaaaaataagtttgtaacgattttagatagccacgtcactgtctcatagttctcatttatgtatatatatttgtaccatatattcttatattatttaatttttactaatttgtgatgtttttctactttatgaaaaaagtcttatagttttattttaattttaaaaaatataaaaaatttcatgtatgtaaatataatttttaatcaaatttaaaataataataatttaaataaaaatcatcgatgaaattttatagtacatcacttttgtcaaaactttaaaaattatttaattatttaaacaaatgaaaatattttattaatttttgacatttaagtttttaaaattataattttttttttcatttataaaatatctaaaattctt

SEQ ID NO: 106575 - DNA, 825 bp, Cannabis sativa
  modified_base (92)..(96): a, c, t, g, unknown or other
tgagtttttatacctcacgacaacatgatattttaaatggtatagattgaactcacaaaattgactatgtctaaaaaagcttacgagcaaannnnnagtactgaaacaggtaccgaaagtcgaggttgggtatatatataattattagcagcgggaccgctattaatgtcctatcgctaataattctaacgattattttttttaatattattagcggtggggctcgccgctaatactattagcggcgaagtctaccactaatagtttttttttttaaaaaaaaaataaataagtagaattagcggcgaatcatggttccgtcgctaatgctaccactattaggggcggattttgcccatcgataataatattacggctattgataaattttattgcagtgatagtatataataggacgacatttaacttaactataaaatattagcatgtgagtatataatatttattttagatataaattattactcattgtgtgaatatattgctccacatacatataagttagttcctgaaagtttaaatttactaaataaatgagttacattaagttggagtaagttgaaatataccggttttttcattagttaattaaaaataggcttattttaaattcaattgaaatgtaccactttaataagtccattaccgattataccctcacataagtcaactgttcagggacgtgaggaaggtttgttcattacataaagggataatcgggatataacaaataaaagagggtataaattaaatatatagaaaaagaaaggtaaaaatgaaatgggttaacaaaaaaagggtata

SEQ ID NO: 106576 - DNA, 873 bp, Cannabis sativa
  modified_base (123)..(123): a, c, t, g, unknown or other
  modified_base (281)..(284): a, c, t, g, unknown or other
  modified_base (847)..(848): a, c, t, g, unknown or other
ggatgttaaataacatacatgatagtaaatctagatcttggtaaataatccccaacaagatcatcatgctccttttatagtgttccaactaggacttagggctgaattatatggattaaaaangaataaaatattaggcaaaaattcactctaagggccaatcataaatgaccaatctctagttacaattttgccatttttttcaaccacttattcttctttcaataatactatattttttaattcaatcctatatatgccaaaattatttatttaataannnnaattaattatcaaataaaattgtgcaaaataaatgagttaaacatatacaaaagagaggattgaatatgtgtccctccaatcattaatgcatgcaaattaccactaacatgtagaatttctttctatagatataaaaaataaaagagaaagaaatcagtggagtatccatattccaaacagagggctacctatatattcatatagctacgtattaattttcatcaaaaactttatcacaataaatggttagagtataataatcactatcaatctattaattaaatattgacttcatatataatcaaattaaaattaatgaatacaatatttttaataatatatatttatacttaaaatatcctaagtacttttaattaatttttaatacaattccaaacttattttatatataggaaaagtttttctaaaactcttgtatatttacaaatacttttataaaaaaaaatacttttacacatcatattctattaataatttaataaaaattattagaaaactgttataaaataatataacataatataaaatagatgagaagaannaagaagaagatgaagagagaaagag

SEQ ID NO: 106577 - DNA, 734 bp, Cannabis sativa
gtgttgtctacatagtaaaaaataatcataattatatgtttcaaattatttagtctcatgatttattagtgcatttgatttacgctgacatgataatcaacgacgtagtttacttatacttggacaagtagaatgttattttcaggacattatagtaaagtaaacttgtatcgaatgtattagctatacatcagactggaccgatgttaacaatgtaaaagatatcataaacttacatttatatcattgtgtaaaatagtttgtttggcaatcatccacatgggactcggcctactcggcctgggctgacccctaatgggacacttggtctggtgtaatatttacgggacaaacacttgtgcttcttatattgatatcatttgggacttcatagttttggtcacgtgtgtacttctcaacttgtagttattgtatggagattgacccatcaacacgaacgaattttgaatatgcaagacgaaccttaaaaccctaaaaaattagccatcacccatgtccaagtggagacaaagcattgtattaaagttgtacgagaacgagagccaactccctcttgttgagagaagactcgatctaggccaacccatacttggtttgggtcgtgccctaggggcagggacggaggtacttaagccattgtgtaggcttaagccctcactcaattttataatatataaaaaacttttatgttacatatatgtatttaaattttt

SEQ ID NO: 106578 - DNA, 1145 bp, Cannabis sativa
  modified_base (229)..(239): a, c, t, g, unknown or other
  modified_base (366)..(368): a, c, t, g, unknown or other
gaccataatgtcagcctatactcaatatgctagtcatactctaaccatattgatgtgacatcatcgatcagtatttcaacaaagatacatttatcagtattcaatacaactctaagtatactattactgctatcaatgtaatctaacaggcataaacaacatgtatgttaaacatgtaataacatatgcacgacattatactaatcttacctcaattctgaattcaggnnnnnnnnnnnacctgagtggaacaacagctcgacaaattacaggctcctaaatcacatcgataacaacatggataagtgacacgctaaatcacaaccggggacttaggttttaaaccaaaaccctatctactacaannnaatatggcaataccctaaactagcagggaattaaccaaccgaggctctgaaactagaacgagtcgaccacatgaattttttgggaaaccctgctgcaaaatccgggtaaccggttttacaggcattgtaaaaccggttagctggttttacccagaaaaccccaaaaaattcaaagcctaaccaaatcgattccaaacttaaccaagctttcaagacctgcataatataccctgataaatattttccaagcaataaaaccattacccaagctcagaatctaaaatcaccattaaagctccaagtttgagttctaaaactcaacacttgcttaaatctactaatagacatcaaaacatgcttgaatcaacatatctaaacataaataaacttctgaaaacaaaaccaaacactaacaacagctacataactcaatttatcaaaatcatacaaaattcttaacttcaaactcaagaaaaccaagaaggagttactagaagcttacctagagcttgagaccaccaaaatccttatgaaactagcttaaatttcagaaaaacacatcaaaccctagcttgttctagggatttcgagatagagaaggagagagagttgaaagagagtctttttgatgtattttctaattttgaataaatgaattaaaggtttttttttaaaataaatatcagcttaaaattgaattaaaaatctgattattaaacataatataaacccacaaaagacaaaacatgatttgacaaaatgatcattttgcccctt

SEQ ID NO: 106579 - DNA, 605 bp, Cannabis sativa
agcctaatattatttttatctcttctcaaacccaacccaaatgttctctcttgttagtttaatttaggagtttttacaaaaatattgaattttaagtaaaaatttacaattttactgtcacacaactaaaacaaaacagaacaattaaaacaacagtgagacaattaaaaaacaaccgtagaacaaccataaaaacataacacagtataaaacttatatagtatttttgaaaaaaattccaccctacagttaaaaaaaattgaaaatttatgtggtgtaaaaactcctttaatttattatcaaataatttgaattttgacttgtacttactttgtttatgtagattcgtatccaattgaacttaatcttttgattattatttttgttgtattattattgctatgttgaaagtatcttaatttattattattgtttattgtttcgtttatattaattttggaaagaaaagaaaaaaaaaatactttcccagcctattcctacaatatttgaaggccataaaccttataactggtgtatgtttaacatattatttaactatttactataatttaacccccaaaattgtacttctacatataataact

SEQ ID NO: 106580 - DNA, 1190 bp, Cannabis sativa
tgtcaaccatctacaagcaatgttcgaaatactgtgacgatacagaatgcggctaaatcctcttaagtgtgtctttggggtcggctcagggaaatccctcggggtgaatcagcggggaattgaggcaaaccctgcgaagattaaagcattagtagaaatgcgatctccgactaagccagaagaagtccaaagtctgacaggtaaagtcgctgctctaaatcgtttcatatcacgatcctctgacaaatgcaaggaattttttcaaatcttaaaaggcaatcagaagttccaatggaccgaaaagtgcgaagaagctcaagcactaaaaatgcatttgcgacagcccctaatcctgtcaaaaccaatgctcggagaagttttatccatttacctggcggtatccgaatatgcgattagctcagtactaatctgtgaagaccaaggtcggcaatacccggtatactatgtcagtaaacgtttgctagacgatgagactcgttaccctcaaatggaaaaactggcgtttgccctggtaatagcatcaagaaaattgcgacaatattttcaggccgatagcattgaaattttaacgaactaccccttgaggcaagttttatcaaagccagaagcatcgggatggttgttgaaatggtcagtggaactaagccagttcgacatcaagtacaaaccaagatctgcgattaaggggcagcccttggcagatttcattctcgagttcccaagtactgaagtagaactcgtagaagaaaaaattgatactgatataccaaatggcaaaggatggactttatacgtcaatggagcctctaatagcaaaggctccggcggcggcataagactcatcagtcccataaattttaaggtacacgctgctttacgatttgaattttgtgcatctaacaatgatccgagtatgaggctttgatcgcaggattaaagctcacccctgagatgaagatccaatacttacaggcttttagcgactcccaaatcgtcaaatgccaggtaaatggagaatatctggccagaggcgggcgtttggctaagtacctcgccataacatgcgagttgttgcagaaattcaaaaaggtgattgtctcacgtgtactgcgtgctcataactcacacgcagacgcttttgcccgtttggcctcaacaagagaagctga

SEQ ID NO: 106581 - DNA, 2003 bp, Cannabis sativa
atcctatcatcccatcacatgtttctgctgtcatacctgtgtgctgtcactttaaaactcccttttctgcaacagatttagttgcaccagcagaaactgatactgcttctgcatctgtatttcttgctccatctgatgctgctgttgagttgaatcatgttccaactcccactcacaatgaccaacatgctttatttgatactgccattccatctaacctttttgttggacagtttcctactaacagcaggtgtgcagatcagtgtccgaatgctgatacaggtggcttttcaggattgtctccatgttcttcgaatgctggttctgatagtgttactcacactgatcaaccttcctcaacctcccctcgtgtaccaatcataccagattccagaactgctcctgtttactcatctcctgctgctttaccattagttgctggctgtgttaatgctccagggaaacacaacatgcacaggatgcaaaccaggtcaaaaatgggtgtttttaaacccaaagtgtacctggcttctagagaaccaacttctctcaaggaagctcttcaacaagaacaatggaacaatgctatgagtgatgaaatacttgccttagccagaaatagaacttgggttcttgttagacttcctgaagggagacaagcaataggctgcaaatgggtgtataaaatcaaggagaatcctgatgggagtgtgctcaaaaacaaggctcgacttgtggctaaaggttttcaccaacaagcaggctttgactttacagagacttttagtcctgtggttaaacctgtcactattagggtggttttgactctagccttgtctaatggttggcaaattagacaactagatgttaataatgcttttctaaatggtgatttacaagaggaggtttatatgactcagccccccggttttgaaatcccaggtcaagaacagcttgtgtgcaaactcaataaggccatatatggtcttaagcaagcacctcgggcttggtttgacaaattacaacagagtttgacatcctttgggtttactccttcaaagtctgatcactccttgttcattaatcactcacctacatcaacaacacttgttcttgtgtatgttgatgatattttaataacagggagtgaccaaactgttgttaacactcttgttgcagacctgaatactcggttttctcttaaagatcttggcaaacttcgatatttccttggtatagaagttgagcataccgattcaggccttcatctttgtcaaaagaagtatgcacaagacttacttgtcagggctcaaatgtttggttccaagtcttctccaacacctatgacaagtggtcttcggttgtctgcacatgaaggagagcctcttgctgatgttcagcagtatagatccattgttggtgcattgcaatatctcaccattactcgacctgaactctcctttagtgtgaacaaggtgtgccagtttatgcaaaagccattgtccactcattggcaagctgtcaagcgcattctgaggtacattagtggcacaatgcattatggtctcaccttttccaaacctgaatctcatgatcttgttgccttttgtgatgccgattgggcttcggatcctgatgacagaaagtccacctcggggtatgccatcttttttggttcgaatctcattgcttggaagagcaaaaagcaacaaaccatatctcggtctagtactgaagccgagtatcgcagtgttgcaaatgtcactgctgaattgacctggctgcactacttgttttcagaacttcacattcacatgcctcagcctcctacaatatggtgtgataacctcagcacgattatgctcacacaaaatccagttttacatgctcgcactaagcatatagaattggatctatattttgtcagagataaggtgttaaacaagatggttcaaatcaaacatgtggctgctcttgaccagattgcagatggtctcaccaaa

SEQ ID NO: 106582 - DNA, 655 bp, Cannabis sativa
  modified_base (262)..(262): a, c, t, g, unknown or other
aatcacttcccggggaataaaactaggaactaaaagtttccttatcgataaaaagcatggcaataccccaaattacgtaaaaacgaggaaatctagggttactgaaatttccccaaccggtagaccggttgtccaaccggaattccagttctgggaattttcaaaacccatccggaattccggttcctggcaggcagaatttcaaaaattcataactcaaccaaaacaaatccaaaaaacctcaaaccttccagacctgttntataggacccaaataacatttctaaagcaacaaaaccacccagaactcacagattcaaaaatcaccattaaagcatcaaggtttgagttttaaactcaaacttgatcaaacactaccaacattcaatcaaaccagtccaaacctacttaaacatgcataaaatagcctctgaaaactactacaaacatcaacaaaatcacagcaacaaattttaacaatttctctttgaaaaccatagttttgagctaaaaacttccaagcttgaaatcaaagcaattatcaagcataacaccaactctaatctacttaaaacaacaagattaatccactgtaaatcacaacaaaatcacagccacaacaacaaccaattcaagcatgcatacatcatctttt

SEQ ID NO: 106583 - DNA, 554 bp, Cannabis sativa
tattattattattataaaatacgggcgttacattaactgtcactatagactacttatgtgtacaatcttatacacatgacacgtttatattgatacagctaatattattattaaaaaattattttcaaaattcattttaaaatcaaataaaactacaaaaataaaaaaataaagtatatttttaaaaataaaaatatattataaattttgaattaatttttatattttttaaataataatattcagtgtaccaatataaatgtacaaaagtgtaccaatatattgattattaactctgaaaaatagatgacactttaactttactagcaattcaatagtttgaaggattttaccgttaaaatttaagcttataagcggactgatagctgagagaatttaaccgcaaaaaactcttatcagacactattaataacgtgtaacactactcttttcatactcatctgttataaataaataaatatatatatacataatattatttaaatttaaatacgttcacactttaatttctattaatcaattaaaaaaataaa

SEQ ID NO: 106584 - DNA, 1261 bp, Cannabis sativa
aatattagaatataaatttataatatatgcgtttatatattaataataagattaataatgatttttcattggtttgtatatccttgttcgatttagttatgttgttataatcttttaatttgtgggtacggtacggcggcataatatgattttggagcttaatttgagatgatgatattgacacaataatagtatattagagaagaattttcatttgataggatttaaaaaacaaaaatgacaaatgacaggatttaattgtttaacttaattaatttcttttcatatatatgtatgtatattttgtttagaatttcaaggacatttgtctttttatattgtgcaaggccatcaacttattattataattattatttttcttctttctttttttttgttttttccttctatataaatttttgctctgagatattttgttgcgtatgtggttcaaatttgtcacttatcatgagcattattatcatattcagtaatttattatttcatcatcttcttccctttcttttgctacaaaataataataataatttactgaatattggaagacttcaattagaatcctggctattaatattggaaccaaccaatcaaaactgcatttgaattaaatttaaccattatttttttttggttgtttcgttatcatgatggggctaaaagaaaaatcaattagtcatcacctgaaatcagccgaaagaggtgctattgagatttgaggaaagatcctcaagagtacacatatcatcaactacattagcaaattaatttcttattttctttatgctttttcttttaggcacgcaattccaaaattgcaatttaaggtttgccccctcatgaactttttttttttttctttctaaactgattcggattgtagaatcattatattttgatttattttattttattttccttttattctgaacggattgtaattttatttactatcaaggattcattaccctttatttcttgctcttattgttgctttatatagtaggcaaccaaataaaataataatgatatatttacatgcataagaagatttattaatttagtgtaacgttagaggaaaatttcaaataagtacggattgttatatttttgaaatgaatactactggaattataattgcaagtttgtaaatttaagattgttgaccgagattttcggcaactattaaaatatgattatagtagtgagctgtaagaaagcgagatgaggatttttacgtggt

SEQ ID NO: 106585 - DNA, 1020 bp, Cannabis sativa
ataaaactctcttctgtgagtcgatatgttcacttcaacaagcagtattactttcgagccaaatgctagcgagaaaggagtgtgtcccatcgctgtcttctcgaaagttctgtgggctcagagtacctaaggtagctcgtcaacccatctgcctttggtggcatccagcttcttcttgatagtatcattctaggttttattaacagcttccacttgtccatttgcctgaggcctggatattgatgagaagcttttgataattttgttcctctctcaaaattcagtgaacaagtcgccatcaaattgggttccattataggatactatcttcatgggtattccaaacctacagataatgttattgacagcaaagtcaaggactttcttgcaggttacggaaataaggggctcggcctccgtccatttagtgaagaagtcgactgctactatcgcatacttagctcctcctcgcctagtgggtaatggcccaattaagtcaattcgccatatagcaaatgggtagggcgaggtcatcattcttagttttgttggcagcacgcgaggtatatgtgaaaacctttgacacttatcacatttcttgacaaactcgtgggtgtccttattgatctttggccaataatatccttgaataatgatcattttagacagactttgccgacccgcatgatccccacaaaagccttcatgaatctctctgatgatttcattcgcttctgcagggagaacacactgaagtaggagcatcgagtaccctcttctatagagtttgccttcaattattgtgtagggacgcactgaatacaatagtttttgcacctcgtttttgtcatttggaagttgcccgtcgagtaagtaattgataataggagtcacttatgtaggagagccgtctatcatctcagcgtcttccgtttcacatatacttggctcactcagcatgtaatgaccgctgtagtaatttggattagtaaaggcaattagcactaatttctgttaatt

SEQ ID NO: 106586 - DNA, 537 bp, Cannabis sativa
aaataatgcgtgaaaagcaactgtataagaagttggaggctcgctgtcgccggagaagaagggttcgccggcgtaactccggcgaagatccgatcaacaccttctgtggtttattttctggattttcttagattttttatcttacttaggtatttctaggtctgctatgaagttttagaattttcttgcaattatttaatttattatgaattaattgatttattttataaattaattatgaaaaatagctaggcttctcagaaaattctagaataattttgtatggcttaatatggattataaactgttagaaaattaatagattagatttttgatcgattttgtatttttcatgaattatttgtattatttcttaatttaattatgaaaaatgcttagattgttcagaaaattcaaagtaaattatctgggtcttagtaaagactataaactgtgttagaatggttagatttggttttcggttatttttatatttttcatgaatttatttagttaatacttaaaataattatgaaa

SEQ ID NO: 106587 - DNA, 908 bp, Cannabis sativa
  modified_base (184)..(186): a, c, t, g, unknown or other
aactcaaaattaaaatactggaaattatttataatttttattgttgtaatatctcagaaaatatattgatattttaattgggcatattttattaaatatgtgatttagtgtgtattagagtaggattataatcctacttaaactaattacgagttaattagggaaatatgagtaaatgaataannnagtgtaatttattaattacggagattgtattgggaatatgtgggtatcgtagataccataattcgaataaaatatttttgggcctggcaatcgtggaactcaacagaatggtcagaattttcacgatggttgaaattgtgctatattggaattttatcggactaggttaaaatattgagaagtagattaaatcgggaaagttagaaaatgaccaaaatacccttaggttaagttataactcaagctttagaggaggggtaaaatagtcattttaccaagtattaatttagttttgtcttatgtggattttgaattttggttggctgaatgagaattataatttaggtttttctttttatttaaattaaagatagaaaatgtcagataaaagccaagaaaaaattagaatacatatatgttgctctctctttctctctctcgaaaatcctaggaagccatctgaagttgagtttttcttcttcaatcaactaagtttagattggattaagctaaccctaggtgctgcccaagattaaaggtaagattaatgttctttccttgaaatttcatgattgaattgagtttttgcttagggtttagttcaatttcaaggctgtaatgttaaggagagttgagactgtatttgtaggctggatttagagtttatttaagtttaaatcagttagaattagtggttttttaatttgaattgatttaggtga

SEQ ID NO: 106588 - DNA, 907 bp, Cannabis sativa
  modified_base (462)..(464): a, c, t, g, unknown or other
ttaaacaaataattttcagattaagttacttgtctaatgctatcaaataaaacacaacaatttgctctttaatgacctgaaatcaagaacataattttgtaaagataatttgtgttccaataagaaccaaaagaaaaatgcatggaaaattaaaaaatgttaagagctaaaaaaatatatatacgtacacataatatacatagagaaatgagtacattaattaacatctgctacaacaaagctaaaaataatgaaagaaaactacatatatatatatataaagcactaacaaaaacataatttacaacagaacaaatatatttaattatttatatgagagctcatatatatatatagtacatagtaaacatttgtaaattgaaagattgtcactaaattttattatcattaatgctatgctatgatagctcttaataataataaataaatttacattgtaannnaattaataaaatttgtaattaattttttattaacactatttgtttgtaataaaattaattaataacatgttataatcaattattagtcgtatatattagatacttttcatgaatatataagaaaacatctaaagttacaatctaatataaaaaaaaaaataaactgccaattatatattgtatacatagtacacaaataccgagataatcaagtaccatttctgataattcacttctaatcaaaaaaatactaattgataatatttttttgggtaataagataataaaaaatatagaataaaaagatataaggttttcaattgtcatattacaataataaaatatcataagaatgagagttataaaaagaaaagtggctaattttctcaataaaaaaagattgaatattaatatatatatagttgaataataataataataat

SEQ ID NO: 106589 - DNA, 744 bp, Cannabis sativa
  modified_base (704)..(707): a, c, t, g, unknown or other
gcctactccccttagattgtatttgagagcatagaacacagtgcttcctatctcaaagttttcacaatgaaatctctaagtatttctcttagatctctctctaaagcaattctttcgatcccctttacagtgaagctagatcactatttataggggcttgatgcatgagggaaggtttcccttttacttaaaatctctataattggaaagaacatttattacataattagaatacatgaaatgggggattgaggcaacctgccatatccctctgattcaatcccatgattgtagggattgccttcatacttgggcttcacgataccattttgaagtagtcatgtcctagtacacaactcggaaaaccaaacttattctctactgagataatctgccctttaccctactcggataagcagatgttgtgcgtgcaaatgtgctaactgaagcccgtttctgaatatctttcctttcatatgcaaggaatgctggacacgtgtcactcgtacatgctaccacatgatagtgcaaaaaataggataacatttgcccccaaagtctgtgcgagactttcgaagtcgcacgtgaacttcaatcaatttggatccttatctgaatgggtggcacatgctcgaagcgtctgttggtgatcctgttgggttttgtgcccaaataaaacgtatttcaatataatcagatttacnnnntaataaagatcaaaaatcattttacgttgcatggttc

SEQ ID NO: 106590 - DNA, 736 bp, Cannabis sativa
gaccactcttcccgagcagatactccaagtggattccacatgtcaccattcatgtggtgccatgttagagtacaaaagttgggataacatatataatattgaatatattataaaactgaaatttatactgttattacaaaactatattaaacgtcataaactaaataaaagtattttgagttcataaacagtaatattatatagaccacaagttaaaaaaaaaactacaaatcgacagtgtcatcgttgtcatcatctggatgggcagtctgtgaggaggacccaacagcatggccaggaggctgaagtggtcgaaccggtggaataggaggcatctcgggcatgttaaatccttgaacaacattggccaattggatcattttcttctggaacgcactcatgatttgattctgagtcatcatcatctgttgttgccactcgttccatgcttcttacttttccacccttcacttcagtgcctcatattcctcttgagtgacagtgggctgcccggatggacctggcgtaggagttgctctttttgcccccatcttaagtcttggcaacttgcctagtcctctcaaatggcgtgaccactcacccaatacctgtgttataacatgcatatctgtaggaaattaggtggggtcgacattgtactggcgcgagacattggttggcgttggttgagtttcacgaatcttaaccattttggctgttgggttctatgccctaa

SEQ ID NO: 106591 - DNA, 1057 bp, Cannabis sativa
ttggggattttaatgattaccttgtctttaacgatcgaaatactcacggtttaccacctccccatgccatgcattcttttcaaagctttattggtaaatactctcttttcctgctcgctttctctggaagccgcttcacttggaagcatggtaccactttggagcgtttggattgggccattgttaatcaaaaatgggctgatctatttcccatggcctctctccaccacttaggtttttttggctccgatcgcagagctctaaaagtgttgctggagggcaaacctttcatgtttgctcgtaaccctacttttcgatttgataatcatggttacttgagcctgatttccctgagcttcttagagatagctggaaaacagaatctaattcttccacctctaataatcccattctcactttcctttccaaactgcaaaattgttccgtttccttgtcctcctggggtcgtaataaaaatcaattctcacatcgcatcaaacgtatccaatcggatatggagcgcctcctggagggtcctactgtttctccttctgatgtcaagaaagccaatgatctccaacgtaatctggataacattttggtcaaagaggaaatcttttggaagtagcgctccagagtaaattggcttaaagcgggtgacaagaacactaaatatttccataaccgtgcttcagcgaggaaacgtaccaatttcattaagtctctaactttggacgacaactctcaagtcaccactctaaatgatattaccacctcttttgttcagttctacactgatctctttgcttcccaaggaactaacactgatgctatgacttttgctacgcaaggtctctctaagcgcctcactcctactcaatcagcgttccttatctctcctttcacttttgatgaagtcaaagttgctcttttccagcttgctggtgataaagcccctggttccgatggttttaatcctagttttttccaaaaaaattgggactctgctggtatagatctctgccaggcggccttatacgctctcactaccaatgct

SEQ ID NO: 106592 - DNA, 1600 bp, Cannabis sativa
cgtgaagtcctttcaacgtatgtttcggtccattgtctagaagcatgcctctcattcgaaagagttttatcttgagctgatgtggagatattgttacgaggaatttgttaaatcataactgacttaacaacttagttattgcagtcactaactttgggatccttattacttagaggttgaagattgagaacgcagagaacagagagagattgagttttgagatttgtatgaagaatcttttgtagatgaataagattcttaggtaagactatgagagagaaacactttgagagaatgcaaatagagaatcgttctcgactatattatacttttactcttgctcaatcaataaagatgtttcggtggtgttccagaactggagtagagtcatagatcacattgatttataggacttgaatcagtatatatcttggtattgattttattgttttattgttttaagcgtttttagttttaattactttgttcgtctatattttatctctgattcttagttcatgatttgttgattttgtcattactagttgttttgtgattcaattttagttgatttgattgtgcatattaattgtaatttttccacaaatcaaaatttggtaatcgatcaagaaagcataatcaagatttttatttctaagctttgctattgggtactactggtacccagtaccttctataagtgacgtcttatgattaattatatggactaattgtaagttatataaaactcgatatttaattacactaataacaatatgacactaaaaaaaatattaggcaccaaaaatattttttagcatcctttgctaactaaattgttagccttagccatcgttcttccaaaatttaacctatgctcaagtacctaagcaattctttgaaaataaaggtggaatccttcaacttcaactacctacttcctagaaagtccacaactacttatgtcacacttgtcattctaccattggaaggagacatttggacatagatttgtcacttaattaataaataaatttctaaagccgacagaggtcaaagtcaaactatatttccaccaaatttccttaatttctttcttctttttaataaaattaaggtttcgaactggagaagacaacaatggcggaaaccaaagaaaaagtaatcatattcccattcatggctcaaggccatataatccccttcttagccttagctctccacatcgaacgccgaaaagggttcaacgtaattttcctaaacactccattaaacatcaaaaagctccgatcttcactcccacctgattccaccattcgcctcctcgaaatccctttcactagttccgatcacggcctccctcccaacaccgaaaacaccgatgttctctcttacaccaatgtcttccgtcttcttcagtcctcaatttcactcagacctcctgttgagaaaatcctaaaagatctcatcagagaaaaccctagccggaaacccctttgtttcatcgccgatatctttttcgggtggacggccgccgtagctaaggaaatgggtattttccacgctttctttagtggctgtagtgggtttggtttggctt

SEQ ID NO: 106593 - DNA, 542 bp, Cannabis sativa
ctgttctagcgaggaagaatggagcagagggtttttactatcttaagactcacataggcgatcgcaagatcatcgtgggtttgccaaataaaacttttttcaaggatgaattcttctggacgaccagtctctcccccatcggcacaaccactttttgcattatacataagtgattatttgcactagacttggttaaattaatacatggcttttattcgagtttagctaattgtatctttgttatattttagatagttttcttgaaaagacccgtgcctactcctgagatggccgagcgacacaagctcctgttgactctcccatacggtcttaggtcatgtgactttcttctgaacgaggtcaacctaaggtctgtggatctcctaactgacaaggagtttacttgtgattataaatatcccaagtattcttcttgacagcaggttcctatcccagatgaggagaaagctcaagatcgtgtggctcaggcacaatacctccaaaatactaccccttgagaagccaaagaaggagcatcctga

SEQ ID NO: 106594 - DNA, 506 bp, Cannabis sativa
taaacatttaaacaataaataacagtaataataaataacaataataataaatgcccccaaaaggtttttttttttttttttttttgacataaccctaaaagttatgaatgataataaaagttataaattgaatggtgatttttcttattttttaaaagacattattatagagtactaatggtgtaccaatgtctagcaccacttaaatagtgttttgcaattgattagtgatattttataaaagttaatattaaattatattgaactcgatatttaattgtactaataataatatgatattgaaaatcaaaatagttattatttttttaaaaaaaaaaataaaaaataaaagttaaagactgattatttagttagtttttttattataaacctggtcatgtgtctcacataggggtgtgcataaattgatcaaatccaatgagaaccgaccgatccaattacaaccgaccgtcaaacattggatatctaattgtgattggatcaga

SEQ ID NO: 106595 - DNA, 636 bp, Cannabis sativa
tacaatctaatacggcgttccaaacgagccctaaaagtcttttgggatgcaggactggattggattatacaaattaatttgtctactccaatgtttagatatgttggaagtctaaataataatctcatacaggtgagatttttttaaatttttattttgttaatatattttaaatttaataagaatttaaattatagaattattacaaatttatttataatttttttatcaaaaatttattcattaaaattattgaaaatttataattttgaattatcatataaggtttcaaaatttaaaataatattaattaaccgatagttactaaattaattttaagagaaatgatataacaataaaattatatattctttttaaattataagaaaattaatatttgtattaaattaggatttaacctaaataattttatatttttgaagtatttttattttactattttaattattcattaattaaaaatataataaattattttattgtatatttatgatatatattttaattagggcaatttacactaatgtatacattatataattttattacaatatatgtgcaaaataatttattttcatataatcatacattttatctattatgaagaaaattatt

SEQ ID NO: 106596 - DNA, 1447 bp, Cannabis sativa
  modified_base (121)..(132): a, c, t, g, unknown or other
  modified_base (326)..(327): a, c, t, g, unknown or other
taattcaaacctaaacctagaaggattcctataaatagatagtgatggactcaaaattgacaacctaagtcacattagccttcagtcaaatatttagcccacgcatagcaagttggtactnnnnnnnnnnnngtaagactatgaagaatccaatcaactgaaggagaatcggactcagattttggtgatactctgctacagaaagaatacaagagttagagatctgagcggaaggagtcatttaattctgctgcaaccaatgtaaggcttcttgaactttatatgtgttcaaattccattcttttagaaattcatatttaggatgnnaaataacatacatggtagtaaatcgagatcctcgtaaaataattcccaacattaagaacgttctcataggaagtacgaccgctgtaccacatgcactaaagtaccgacttcatactcgtgttggtagggccattgttgtacttcctagagttactatgtgttataccacatgcactccgtacccgctagtactcgttttggtaacattgtaactaccctcaaataccctacactttactaacaccttcattactgcaactaatccattgttagtagtgtaaacaaataataacttccattcattcattcaataaatatatatatactttatgccaatcttacctcattttcgtgctcaggtgtgccggtcagcctgagtggaatagcagctcgacattttacagggacctatatcataacattcgtaaaattgatgagtgacatgctagctaaaacacttatcggggacttaaaatcaaaactagaaatttctttatcgatggataacatggcaataccctaaatatcacaaaaatgggaaaaactagggttggcaaaactgccccaaccggtaaaccggttcccaacaagaatttcaatttgatggggtttcctagggaccaactggtcgaccggttgctacaggtcctcctgaagcggagttccggttcagtacaagaaaacccaaaatcgaccccaacacctcaaatcaaccccaaaatctcaaaagtacctgtatataccgtaatgaacccaattcaagcaataaacctcatcattaaacacataaactcaatccaccattagagggcagggtttgagttcttaaactcaaaccttacttaaacatcaccacaaccaacaaaactaacctaattcaacataaataacctcaattaaacttcagtacacaatatcaaacactactagacaacacagcaaccaaataccaaaattccaacgctaatctcaatttaagctctagaaaaataaagagggaggtgctaaaaggattttaccttgagttaggacactcaaaaccaattgagatctcacaactgaagctgagaaattcaaaccctagctggttccttagtgaattcgagagagagagagagag

SEQ ID NO: 106597 - DNA, 605 bp, Cannabis sativa
ttttgccctaactgaagaaaatttgttgacttcttgagttctgacttttcttcaaacttagccgttctttgatctgttgagtactcctggtcggcatatttgcttgtctattgttcgatattctgaccaaacactcatctcgtgtcttgtcttttgtagatgaactcaggtgagtcttgggaactcagacatcggatcgaccaggatttgcttcaacttctgcatgaggataatcctcgcctttgttccagtcctccttcctctagcgaaggacattcttctagccctgtacccagccatagaatgatggctcgtacaagaaaaactacacgtctggctgacgcaaatgatcctcaagtggctcagctcgccactttgcccagcaccgaacatgattcagctgtccagatggaggaggatcgtgaaggggacggtgaggtccacgagattgaggaactagacgatgtacatccttgcagtccctccgaggtggaggaagagcaagaggttgaacccccaaattatggggtgtacaacgaggcttgggagccagacgatgctgacggagacatcctggttgagggcgtggactacttcagtgagga

SEQ ID NO: 106598 - DNA, 526 bp, Cannabis sativa
  modified_base (117)..(125): a, c, t, g, unknown or other
tgaacgttatcagctcgtgtctagcagttgcatccactaactagtcgattctttgtagtggaaagcaatcgttaggacaagccttgtttaaatttgaaaagtcgatacaagttctcnnnnnnnnntttggttttgggacaaggacaggattagatatccacgagggataaaatgcctcgggtataaagtcattagttaacaacttatccacttcctccttgagtgccccttctctttcagaatccaagggtcgtcttttttgtctcttggctggataatttaggttgatattcaagtggtgacaaataactgtagggtcaatccctatcatatctgagtggctccaggcgaactgatcctagtttgccttcaaaaacttattagttgctattttagtttttcatctagatttttcccaatgaatatacacttattgggattttttggttctaaaataacttcctctaattcctcgattagtttcaattgattcttttcatcttgaactcgaggatccagatcttcg

SEQ ID NO: 106599 - DNA, 630 bp, Cannabis sativa
  modified_base (43)..(63): a, c, t, g, unknown or other
  modified_base (217)..(221): a, c, t, g, unknown or other
tagaaataaaaatatgaacacaaagttttttacgtggttttgnnnnnnnnnnnnnnnnnnnnncacgagtcaatcttattcaaatttttttattgtttttcaggagctgtctcgtatgagttctttcgtcgtctttttcatcttgtctgccactatttataattacatagtgggcaataaatctcaaaagttgactgtaatctttacaacaattatnnnnntcaaatcatgggatttgattacaaattatgctaagtaaatgtaatttttatttaaaatccacacagctgtgagtatcgtgcttttattgggccaagatgaacgcatatttaaagatatacggtaagccttatctcatggggatgcctcgctaggaatggagctgagttaactttgatggcgagctgtggctcgtcatatgacttctcgagattaatattgctttaattttgataactacattttctggtgtcgagatgatctttctcgcatgcatgccctcttccagcaagatagacgcctcgctgtctgtcatcttgattcatgaaactgtttatacttagtttgtataccttgtaatatatgctaagtgtttttatcgttatcgtttctcttccatgcgacgaggtt

SEQ ID NO: 106600 - DNA, 633 bp, Cannabis sativa
gttctgggtctaagtcctgggttttgatcatagtttggggtcgtgttcgggtccgggtgtaggtctaggttttggtctgattctgggtctgacttcgggtcttgagtttaggttcgatttttaattcgagtctgggttcgtgttttgtcctggtatgggtttgtgtctaggttcttgtccttgtttgggtccggggaaggtttcgggtctaggtctaggtccgacttcagattcccgggtctagttcaggtcctagtttgggtttgagtcccgtttagatctgggtctgggttctggggcctaggtcccttgtttaggtcccccatccaagtccagttcctagctcctgttctaggtccaggttcgtattcgggtcccgagtcttggttttagtctaggtcctagtctgagttcgggtccaggtctcagtcctagacttggtctgggttctggtttgggtccttatcagggtctcgatcctggtctgggtcgcgggtctcaggtcccgtggagggtttagggcaaggtcaagtccaggtgctagtacaagtcccggtctaggttcctatcccaggtctcaggtcctagtcctagtcaaggtctcggtctaggttttggtctaagtttgggtta

SEQ ID NO: 106601 - DNA, 790 bp, Cannabis sativa
  modified_base (182)..(188): a, c, t, g, unknown or other
tttagccaacgacaatgagttttatttagtagacgataagtgatttatagcgatcgatatatagtaaagcaatataaagacacaagaattttatataggttcaaccccgagcaaatcggtaatagcctaatcctcgttatttgtattgactcaagagcaaggagaaaggttccttttcttannnnnnntacaacagtatctctgaatatgaattcttagataatatctctagggtaaagtctcgactaaactgtttgccaccctttgcctagtgaacatgcgtcactatttatagagctgtgaacttggagaggaagtgtttcccttctcgttacaatggatataaatagaaagatcgtgggataaatgcagaatacactgattgtgggataaatgcagaatacactgatcgtgagatcgtgggtatgccatatctctgtaatctgatccccaagttataggcatttcgttgatgactcacaatgcaaaagctgaatttgctaagtgttggttactctgtgcggattgctgatcgcttcgctccgggtatgccagcgaggcatccttttcagactatatcctccaagcagatactcaaagttgattccacgtgtcaccatcgtttgatgccacgtcagagtgcaaaaattgggataacatttccccccccccaagtctgtacgggacttctgaagttgcgtgtagacttcatccgggctgcttctggctttggatggggacacgtgttgggcgcatctgtccgagactcgatgtgaagctgactgggcat

SEQ ID NO: 106602 - DNA, 882 bp, Cannabis sativa
gttgttttttaattgtttcctttaatatcttattgactgctttaacttgcccatttatttggggatgtgccactactgagaaacttttgatgatcccatgtgtcgtacagaaatttgtgaacatcgagctatcgaatttttcccaatgtttgaaataattttttgtggaagtctgtaccggcatatgatgtttttcactacaaaatccaaaactttcttggatgttattattgccagtggctcagcttctgtccattttgtgaagtaatccactattaccactgcgtattgtactccacctttgcctttaggcaactgtccgatcaagtctatcccccatatggcaaagggtcatggactttgaaattgtattagcttatttggtggtgctcaagggatcatggaaaatctctggaatttgtcacactttttcacatgggccttgaatcttcaatcattgttggccagaagtaaccttgccttagtattttcttagatagactttgtccccagcatgattaccacaaaatcctttgtgagcttcggatatgagctgtgcagtttcttcatttgttacacaccttaacagtggcatggagaaacctcttctatacattacaccttctactataatgtactatgaagcctttttcatcatttttgagcctcattcctatttcttagaagttctccattgttgagataggctactatgggagtcatctagtttggtgtgatgtttataatctcgatttcctccatgcaggtaatactaggttctttctgaaattgaattggtattaggttggacttatcagtcaccatgttgctcgcaagccgtgctagggaaccaacaattacattttcttctcttggaatttt

SEQ ID NO: 106603 - DNA, 533 bp, Cannabis sativa
cttatagagcttggtcgtactgaagtaattttaaattcagtagatcctacgtggatcacaaaacatacactcacttatcattttgaggttgtgcagtatttagtgtaagttttagagccatatttctttttccttaaaaaatacaatctgcatcttattggttttaagatgattgtatagctaaattttatcttttatctacaggtttcgagtgtatgacattgacactcagtttcataatgtagatgtgaaggtataataaatttttcctcttacctacagatgattttgagggaatgttgttgaattacatattgcaatataatattccaaaggcatgtacaacctatccagatatgtggacatgataaaactaccctctgtcttgctttatttaatgagcttaaaagatttccaggttcatatatttctattttcttttaaatttttaaaactataggagagtgagccaaggcctgagcattttttatctttttacttacctgtaaacattagatacttactgtctagcc

SEQ ID NO: 106604 - DNA, 585 bp, Cannabis sativa
cgtttttggccaatctctggaaaaaattgcaactgtcttgggcataaattttgaacttaaagtctttatagttgtgatatgtgtgtgagacatgacttgatagatagatctttgaaatagcttcgaaatgctagttgtatcgcgtcaattggatcaatattgaaggatttatggttgttttactgaaggatgttcaacacacagcaaccaggttgacaacccagcgaccaagttgatatccagcacccaggttgacatcccaacattgggggtcgagatgtggaccctccttctctgaacatccctattcttgtatgaacaaggaaaacaaaacaaagatagagagccgtatactcccaaagtcgtgtctggagaggggattagttccaactgggtgttgcagaaaggaaacaaaatgcaacaaaaatcaagaattactgcaataataaactttagtacaacacagcttgcaagaaccctaaggatcaatatttttaatagaaaaagcttgctctgataccaaatgtaagttctaaaaagcctagttactaagtttgattaccaagtttcactttaatcctatta

SEQ ID NO: 106605 - DNA, 1712 bp, Cannabis sativa
cagagcatcagcctcgcaacccctttgcccattctcagtttccatttccgcagcatgattcaatcttgcttattgcatatgaaatgctctgaatccattcggcattgggtcatcgtccttaagccaagcaccatattttggaacaacagtcccatccacatccgtttcagtcacttcctccttctctcagtcagtatgctcatgtccccatatgccacatttgaagcacaatagcgacaccgtctcaaatttgagctgaatccaagctttattgccattagatggaatgaatctcaccataaaaatactttgataaagtggaaatccaatgcgaaccctcacataattattcaggaaaacttgtttggtattcgtccatttaatatccgattacctataccacccccgccaacgaactaatccgtctaacattcttgattgtgaatacatttaatggaaacccccttatctttacccaagaaaaaactgtatcaagctttgcatcttgccaattccccgtacctggccactcttctagaattagaaaccccccattgaagagccaccactttttttaaagtacccattgggcgtcctgtgtcgattggaacgaaagtccaatcagatttgcatccgtagacccttcgagcaccttcaccttccagtttaaaacattcctccaaattcttgtaaacatattctggaataaattctcagtgatctctcttttatccacaatcctacccattaatgatattttaccgaaatcagttgctgcatcttcattcacctcccaatcatcctcttgctccaccacaagtttgttagttaaattaaccaaatctttaacaccatcagagttatcaattccggccattaatccgattagtattaagattccaatccccttcatcaagatatagtcgtatagacaaagcagttgcaggacccttaagaccattttatagctctctattcaaagtactctaatctttttttaacatttttctaatatatttatacaaaaacctaacgaaaaactgttactaatttatttatttttattattagacacacttaattataaagtgttgctaaaaaattcttgtatttaaaattttaatatataaaaataaatagtaataaccaataataacacttataaaaaaagtgtttttattcatactagatcaaagataaaaagtgacacttttcaataaatgtggtcttataattaattaatataaatttatatatacttatatttcgtgaaagataaagataaatacgtgagtggagtataacttccgttaatttagctacaaagttaaaaggaaaactacccactatcttttaaccactatataaaccaatctttctaaaataaaaaatcatacaattcaatcgagcattaaggaattacataatgtttgatgttcttcatcaatattctttatcaatgttatgtgagaaagctcatcacatttacaggattgtaatattatacttttggttcatgtgaatgtagttttctattgtttcaatttatttgaattattattttcatcttctatttatgattacacattcatgtgttgtttaatctgtaaatgaatatcttttatgtaaatattttttttttatcaagaaggaacaaacttcattaatcacaagcaattacaaccaactctaagcaacaaaaacaagcttag

SEQ ID NO: 106606 - DNA, 1013 bp, Cannabis sativa
tttgatgaacagcataatcctaaatcttctatattataataaaccttgtaaaagtatgctgtcaaatttcatgaaattgaataatatttctacatgtaggtctgataagatttataatctcatatttttgattagttttgttttgccttaaactttcaatatattttaccatggttaaatcagagcaattgggtaatcggccaaaataccaagcaattactgtatggtaatatacgagaaaagaggatcaacctgcactgcatttagagggacatcaccagaggacacagcagccacaacatttattacaagtgcagcaacattaacagtgagctggaactgaataaatttctgaatatttgcatatacagagcgtccccaacgaacaacctacaaacattaaaaaaaaagtaatatgaagaaacattaagtggtttgttaaggcaaacatataagagaaaataaaagagagaaaattccactaaatgcacacttccaaactaatgcaaaaagtgcatactcaccttgacaacagaagcaaagttatcgtccaaaataatgatatctgaactttcttttgcaacttcggttccttgaattcccatagaaagtccaatatctgcctaaaatacaaaattggtataaatgcaattaactattaccaggaaacatgagaataatggaaacaagaaacaaacaatggtatcccctaataattgcattgtgaagacatttcatatcccggaaataacaaccactaaatatcctatttaagaatatacaaaaaacttcattttgcataaagataacaaacctcgtgaagtgcaggagcatcattagtgccatctccagttacagcaacaacttctcctcccttccgtaatgcttggacaagcaaaagcttgtcatttggggaagaccttcccattacctgtgcatgatttcctcacagttaatcactgttcataatctgtgttattttccacattttcttgtatttattaaatctctga

SEQ ID NO: 106607 - DNA, 591 bp, Cannabis sativa
caccacaataatttgtacactttaattattataaccatactcttctaactagaaattaagaatattgtatctatcactatcattatttttttaaaatgtatatttagacataatttataagatatattttgaaaataattaattctctaatcaaattcaaattttgtcaaaatattttctaatataatccttatgcatagagagatcaatataaaatacctataacaatgaaatttattcttttattgtatatataaaatatgtatatatataatcacatctaaagagcacaccaatgtagccgcaatatagctaaaaaaaaattctaaaaaatcaaaatctcaaaccctatttaaaaaattaaaaaagaaaaatacattacctaattagaaaaattttaacgtacatgtattgcacttaacatcacttaactaaacataattaaaaagaaaattaattatacgtgtattgcacgtcacatcaaacctagtatataaataagtatggattaagtatgaatcgacatctaatatcttagtgtacatgttaaatatttcaatccaattagatcgtaaattaaattgaacattt

SEQ ID NO: 106608 - DNA, 1078 bp, Cannabis sativa
  modified_base (531)..(533): a, c, t, g, unknown or other
  modified_base (717)..(720): a, c, t, g, unknown or other
acctcgagctctgcccaacgagttaactcagatgcaaagtccgtggccttttgccatctggggaattgacctaatcagacaattacccaaaggcaagggatgtgtgtagtacgcaatggtagcgttgattacttcactaagtggacggaagccgaaccacttgcaaccattacttctaagaaagttcaagactttgttgtgaagaacataatctgccggttcagattgccgtacaaaatagttttggacaacggcaaacagtttgacagccagtcctttactgatttttgtgcaaaccatggtatcatcaaaagtttctttgcagtggcgcatccccaagaaaatggtcaagttgaagcagtcaacaagaccctgaaggatacattaaagaaaagactggaggatgtgaaaggaaactggccggaggagctccctgaagttctatggttgtaccgaacaactgaaaaaatggcaaccgggcagaccccatttgccatggcatatggatatgaagctatgctgtctgtagannncgagccaccatcccacagaagattcacgtacaaccaagaagcaaatcacgtactcttggctgaatcacttgatgaaatcgaagagaagcgaaccacaacaaacttaaagttgatagcccatcaacaaaaagtagctcggtatttcaataaacaagcgaaggctcagaaattctttgtgggagannnngtcctaagaagagtatttctaaacaccaaagatagtacgacaggtgtactcaaacctaactgggagggaccatatcaggtggtcgaagttctcgaatcaggagcatacaaattgggtaagtatgatgaaaaaatacaacttgttctagtaccacggtattggaatggggaacattaaagaaaatacttcggatgaccatattaagtactgaaagaacatttacttttaagtgaatggcctgttgggcgaaatacgcccaaaggttcggatataattgaaaagtactcaggtcggatgaccaccatctaaagtacaatttctaatttttgcaatttgttttatttcatgttaagctaaa

SEQ ID NO: 106609 - DNA, 729 bp, Cannabis sativa
tggtaaaattgcaatatctctttcaatataattccaatttcaaagattttggtgtcattggaaagagaattaaagttcctaaaactttcatgaagatattatcatcttgttctgtacttttcaatgtcaaaagtttgtattttcactgagccatgtaattcattactccatattctttctcagaaatagtttcagtaaaactatgataactccctcattttaagtccatttttagtgatttttatatcattggaaagataatttaattgcttatattttttatgaagacaacgtttacctaattagtgtagttgttggtcaaaaatagtaagttttctcttatactataagagtacaaattttgatattcgggccatgactcatgttttattataggtagcagtgacgagataacaagtcttaagcagtgggacttgaggtaaggaaattatatagttttgtatgtgtttatctgtataaatttgaattctttgtgtattagaatatgatttataaaatatgtatatggtactgagaatatgaggtatggacacaatatgagtttgtaaattgataaatagattatggttgttatgacttgtatatgttgtatgttgtatgttgtgtgttgtataataacgtctcaggtaaagtgagggactatggtggggtatgatacagggtaaggccgttcaatgtagagataccctaccctgcattttactgagt

SEQ ID NO: 106610 - DNA, 3994 bp, Cannabis sativa
tcaggtaactaagcacgatcatggcttccatgtcctaactgtgttgagtgctgtcataaatgaattacaaaacagtttaagtttaaataacatctgtttggggaacacataaatttgttgaatttagtgttggattatttattattattttggcaatttctgttgtatatttttaacattactgcattcattcttactcaaagcaatcttgtagttgacgaggaggacgtaaccaagaagcgtagggtggagcgatcgcgaaagtaagttaacatttctcataaatttggaggattatgtttgcatcatagaaaccttattctgaattatagaatctttttattatctcctgagaatcccattttgtatcaagcctagatttgcttgatattatcacataagaaccacttttaaaagtaggaaccctctttcatccccaactactcctaatattgttttttgtttcagattttgagagaacatgtagtcgattaaattttattcttcacgagtaacttttttgttgatgtttattagaatggcagaagcaaaagaaagaaacttgagtcctattgttccatcagatatgcaatctattttgaagcggtgtgagaatctggagaaggaagtgcgatcactaaagcttaacttgtccttcatgaacaggtaaaccagtctaatttctcttaattatggtttttcatagtcggataaacaataaataaagaacaaaacttacatcatcgtatctagctttcactttaattgttatatcaatcattggttaagaaactatacagcatgccatgatagtatgaaaaacttgtgcactcaccaaaagagtcattaggaatttatttacaaaatccttggatacttcaaatataaacctagaaatagaaaatgcatcttattatagagacatgggaatctagagttggaagcatacactgatgcgaaattgggcaagattagttattgataggagttaaaattcaggactttgtagagagtcttgagagagaacttggtttcatagagtatcaagaaacaagtagttgcttgattgatcatgtgctgaagcaaaaattataagtcatgggaaaaggaacttgtgaattattatggttgaagattgttcttgatgatctaacaatcagataaaaaggtaccaacaaacatcactcataatcttgttaggcatgatcatacaaaataggtagaagttggatagaggtttgacttgtactcgattagagacataactagctgatattctaatgaaagggttctggaacacttgtatgtgtatgtccgtatgagtttttcgagccaatttcctttctcctttagccttatctgtctaaaataaactttggtttcgtgttaactcattttatggtaattgtagtttaacttactgttgcatttatttcaggaaggattctgagcagaccaagcagattgaggagcttcaaaaacagaatgaggatttactagacgaaaaagaatgccttatagaagagattaaaaggatcatgtcagaaactgacaagatatgaaacatttgtttaggttttagggaaaaagaaatccttgtgagagatggattatgttaatccttttgaatagtaaaccagcattggcttattttttgatcaaatcaaatgtgtaaaggagctggtgtatatttgtttagttatagtgtatgctatattctatctatgtgttaaatatatttgcagaagatttataatttcaaaatgcatgttccattttttctttaaatcgacaattatcaaaactatgaactgataaattcattggtagttaaaatgttgcaaaataagacttatcataagcaaacaattttactttgataattcgtataggcattcataatttagtgattcaatccaacatgagaaaatggattttttttttaattttgttagcaatttattttagtcttcaaattttttataatgatagtttgagaatcaatttgtattagtttaaatttaaataggcggatattaaagaataagtgtttaatgatttttttgtataacttcaattcttatttgattgtttgagaattaatttgtactagtttacatttaaataggtggatatgaaggaataaagggtttaatgatttttgtgatacagtagtgatgttgatgagtcgtggttagtttagtatatgagaatagttttggtttagaagaaagaattgtaagcaaagtagtaagcttttattgatagtttgtagcttttggctttttggtattggttacaatttagaacccttgataggtatttatagttgctagacttcaagctttagtggctacaattgtttgtctagatttaagaattttatccatacacttttacatatttcttaagcatgcataactaaaaaacttccacactaaagttttttagaaatgcatatgtgctctattgtatttttcacgtgtctagaaaatttcaaaatattctacaattatctaaaatatttagagtaagtttttctacaaatgtgtagaatattctagacttaattgagtattatagaaatctgtaacagtttctaatactcctccttggtacacaattttgtaactctaatcatgtcttgtagcaattcgacctttcctcttggtagcacctttgtgaaaatatctgccagctgttctttagtcttgcagtgcttgagttctatttctttgttagcttttgtttctctgataaagtgatacttgatgcttatatatgtttcattctgttgtgaaatacatgatttttcgtcattgttatagcctatttactattgcataaggacaataagggtatcagggaaagcttcccttgaaattgctaggagaggttccctccagactcatcacccggaagcgtcctcctcgtgaaatgtcacctttaaatattaggttaggaacccacaaaaaattacgaaacaacaagaagctagaaaataaccccattcgaagccctaatgacttcgaatgggtaaataaagaataacataaatgcatgaaaatcactcgtacaagtttcaagatttcaaaccaatttacccagaaaacacatgcacactcatggaaagacaatctcattactaataagttctatattattaatctcttagatactcttcctaacggtcacatgcaaaatcagttcagaacatagcttgaacgaaaatttctaccctagtgtgaaatcgaaaagttcaacaagttttgaacacttacttgtatcatggttcaaaggagggtgtaacaccctgccagcttaggcgtgttatcgtgatttgaagttaactgtgcagttcattgctaatcaacaggtttattgaaaatcgtgtttaattaaaacttttcttaattaacctttacttgaaataaaataaactttacaaaagtcaggattccacatttcaaaagttacaaacaaaatacaacatattaattacaaaacttgttgcctagaaactaatcaaaatccagcctaatgtctcgaacatcgaaaactccaggtctaaccgcctcgacatgtacaatcttcaccggctcgacctcacagctgttcagccttacctttactcttacctatacatgaaaataaaaactgtgagtcgacagactcaatacagaaaaaaaaaaaatcctaaaattagcatgaaaacttaactcttttcttaaaaaattttaaagaaaggaatgaaggaaaatttaccttgggttgtatttaactttaactactagaaattttgcaggaatcctctaaaattagctagaattgaagagaatgtttgaatgctcttgggtttttctttggccgaccatgaagagagagaaagggagagtttagtttttgattcttactttgaataaacattaatcttaattaattcatcactaaatgttttctacttaggaataacactacgaaaccccataaaact

SEQ ID NO: 106611 - DNA, 769 bp, Cannabis sativa
  modified_base (539)..(540): a, c, t, g, unknown or other
  modified_base (699)..(703): a, c, t, g, unknown or other
ttatataaaaaaaatataaaatttcagaaattgtaaaatatattaaaataaatacttgaaaaaaatatctaatttaagttgttctaaaataacaaaaaattttcaacttaaattatttttaaaaatttaattaaataaaaaattaagttactaaccacttaatttgaaaaatattccattttaagttgatccaaaattaacaaactttcaacttaaaaaaaatattccaagaatctttcaataactaattcctagaattcctcaacttaattttgaatttaaaaaatattcaaattcaagttgataacaaaaaaattagttataaataactaattttcaacttaaatagaaatatttaatgaaatatttaaataattaagcttcaaaaagaatctaattagttattaaatctttatttaattaaatacagaaaaaatgcatttagtttatattgaatttgaatttcattaaactaagtgtgtttttctaaattaatttcaaaatattcaaatgtaaaattaatttcatatatttcgaanntaattatgttgctaatcaaatttattacgttaacctagtacagttattgaaatcaggcaaatgggcattcacagttggggttgttaatgtgagggagggatgggttcagtatgtcatacctactgctatgacccgctaactctcacacaaggcccaaannnnnggaatttaaccttaaaatgaaccattgttatttactgaataggcccaaatactaaatgggcctaaa

SEQ ID NO: 106612 - DNA, 1053 bp, Cannabis sativa
ttcaacatgcaaatgcaacatataaaattaggcagcacataaatggaatgagcggaaaatatcatcatcgagcataacgctaggccacatgaaaactcttaaatctctcaatgtcaaactaacaaccacataactgacatgacataaaagttttaaaacacaaaagacaacacacaattagcacaatacaaactaaaaatgacacataacagaaaaatataaattagcttaggtattagaaaactccttctactcagagtcctcgtggggctcctctagatttgaagctgatggctcagcccacgggtcgagaacttgctgagggaattgcgggaacttaggctcaaattgtggcgttgtcctcctaaacgcacgctccatgactgcgtcgcgcttttgctcatattcccacatcgcatgcaatcgaccacacatttgctactgcacttgctcaaagtgagcaaagcaatatgcggaaggctttgttgctgagatcgacgcagaagcaggagttgttttcggatctcgtggtggaccaaaactgataggcccccgaggattcaatgctccttcttcattccacatcggtacacccacctcgcgacagagagcagtgatagtagctggcagaaataattttcctttcccctggtgcgcacaattagcaatttcttgggctaggacagcccctacatcaacatcccaacccatcttaatgcagtataacatccatgcgcggtctctgctgacagtagaatcatgtgaggtggggcatagggcggtttgcacgaatgtgtaaagacatttcaaatcgtgccccaagtcagtgcactgaaaccgaaggtttccataattatcgaggtcccactcggactctggcttggcgatctcaggcatcatgtcattcaatgtctcgtagctcacttgaccttttagggaggagtaatgacattcgattgattgtaacccaaacaagttgttgattgcttcagtggagaatgataccggtacttcacgcacaaccacttgagtaggccattcttgggacaaaaa

SEQ ID NO: 106613 - DNA, 715 bp, Cannabis sativa
tgatcagccataagtgcaggagctggatgaagaatgtacatgtccgggccatatcggaccaagcgggttgtggtctaccagtgtggtgattttgagactctgttttgctgcttaggctggctgaaagaaaaggacttgtaataatattttataaatgtttttgggatcccaacttttgtaacttttagattataaagtttaaagtattacaagtttattttcattccaattattattaaagtttaaactccgcgccattttttttattagtaatcccgtttaggggattagggtttaataagtgacttgggtagcgtgcctaattagttagggcgttacaagttgtataggcgacgattataaaaaccgaggggaatactttaaacaactgtttataaacatcgggaaaaactatttttatagtagtgttcataactcatatatatggacatatatatatatatacattcacatcacaaagaaaaaggttaaggggcaccataagattttatgcattacaagatgtggtatatcgttattgttgcatttcaatatcgagtcttaaatatttttcaaaaaataggaaactgctaaccaattataaagcaccacatcggtataatattagataccttaagtgttgtgaaaattgtgtacgcaagtatacgcagtcaagcaagtaataaagtgataagtaagatcgtctccacaggga

SEQ ID NO: 106614 - DNA, 1056 bp, Cannabis sativa
  modified_base (480)..(483): a, c, t, g, unknown or other
atatatggcttgttaagaatctcttaaactactatatttacaaaaattatttagtccttaggttctgtctcattattccatttaaatgatgatgtatttttgtcaattagcaattttgtctcttaaattttgacaactattaaattgtacctttcaaaataaaaatgagaaagattcaataattttttaagtaaatcttaaataattaatttagctattaagaaaaatcatttcgaatgattaagaaaaataaaattttaaactaattacgcgttaaaaaaattatttgttttttttattaaaaaagtcatttagatattaaaaaatacattaaaaatttaatttgtaaaaatatattaaaaactaattaaattttacaggaacaaatttgaatatattttttatcaaaaaatatagatttgtttgagtaaacataacatttttttagtttaatttataacttttttttcaaaataattnnnnatttttattgaatttttaattagtttttttataattttaattttttctttaaaaatcttagttcatttaaattatttattagattctcaataattttggtttgattttttaagatacgtgttgataaataaaataaattttgaaaatatttttttaagtaaaattaatagttttaattaatttaataattttatccaattttttcaaatttttttaataatttttattattatttttgaattaatagaatattataattgctttaaaaaagatagaatattatattacttaaaattatttttcttttaataaaaggaggtaaaattttgtattggtcaaaatttaaggggataaaaatactaatttttaacagtaaaagaaacagaacctaacaaaaagggtataattatgcaactgttatattttagggaaaatttttaataagccgtatattttaagaagcaaaatcagatagtgctaaaaatttaggggacaaaaatactaattattttaaaaataaatgacattaaaaaggtaaagtggtaaaataagctaaaagtgaagaagagtctt

SEQ ID NO: 106615 - DNA, 591 bp, Cannabis sativa
accctcgctggtttgggatgaattgactatagatttcatagaagggttaccccgttcacacggcatggacattagggctgtacataaacttttgtaaactaccaaacccgaataatccgtccaaaccaaatcgagataacccgacaaaaatataacccgtccaatctttatattaggcgggttgaaaataatactaaccctcccaatcaacccgagctaacccgaccaacacgattaagagaattttttttatatatatatatttattatttatatttatgtatcatataatttatatgactatttaaaaaatataaagttgaaactaatatgtttttttatggtgattgatttgaactttgaattcaatatatatatatatatatttgtctcattattacatttaactaaaatataacaatggaatgtagaaataaaaaaaatatattagtggtcggtttggacgggttaacccgaccaaaccgactaatttcgggcgagttactattttcttttttcttaattgggggttacagttagatttttataaccttatgggcgtgatcgtccagtgcttcttcgttaccaaaa

SEQ ID NO: 106616 - DNA, 580 bp, Cannabis sativa
aaaaaatatgtgtattttttaaaaggtaattttttttttatttgggctcctaaaatgagtggaccccaggcacgggcctagcctgcctatgcttaaggcctaccctgtttactgggtggggcctaaaatcgagtctcatttgggagatgttgaaactcttctgctccaccaagaatccatactagcaaggattaaaattttgaatatcggtatggttacccatgctggtggtttctagtgaaaaaagcttcagatgcatgggaacatgagtgtagcagtagcctttgcccgagcaagttgtttcagatgacatgttgaaattttcactgcattacaagaggcaatcactagcgatggtatgcttatgtagtgtagtagtcattatcgttatcgtgttacaaccaaaagtcatgaacttgttctcagtgtttgagaacgtcatgtagttgttcaatgagatgtttttaggctcagagcttgataccaaacccctctatgggcctaagacgaattaactcttgggaccctaaaaaatatataaaaaaatatcaaaagaaagtgttatgggatttgaacccat

SEQ ID NO: 106617 - DNA, 742 bp, Cannabis sativa
tcagacaccctaccccattcttcgttggaaacttcaggcatgaatggaatattgacataacagcctttaagtcatataaggcttgtcggcctaacatgacgtcaaaggctgatggaatgtctaataccaaaaattgtgccattatagttatgctcgtcagagcttacccaacagtgaggggtagacaaatttgccctagaggtgcgaatccttgaccggagaaaccatacacaagcaggagacagggggttagatctttgagctggagccccatcttttcataggcagtcttgaataagatcttggaagaggctccattatctatcatggttctggccaccattttcttggctatctggaaccccacgaccaacgggtcattgtgcagaaacctgatcttgacagcatctttgtcgttgaatgttatggtgggctatcctgcctgtgggactttaggcttcctttcttctacggtgaggatcacttaatcttgttcgtgctgtgctgttcgggcatacctctcccgagctttgcccgaatcttcagctatgtgggggcctccaacgatgacttgcagatgtccatctactggtggaggtagcaagtcttggttattatcagccctctgattctgatcggccttgacatacttctgtacatgcgggttatttttccttatccggaattgaatttcccgcttcagattgttgcattcactggtgtcgtggccgtagtctccatg

SEQ ID NO: 106618 - DNA, 681 bp, Cannabis sativa
  modified_base (46)..(51): a, c, t, g, unknown or other
  modified_base (141)..(141): a, c, t, g, unknown or other
atgaagcctagaaactttcccgagatgactccaaaggagcattttnnnnnntttagtttcatgttgtatttcctgaggactttgaagcattccatattcctgccgattttgtcttgaaacatcttgttgaccaatctttgntatgtagctccggcattttttagaccaaacggcatgactttgtaacagtagagacccatgtctattcggaaacttgtatgttcttggtctggcagattcattttgatctgattgtagcccgaataagcatccatgaagcttaatattttgtgcccggctgttgcatcgacgagctgatcgatccttggaagtggaaagcagtgtttagggcatgctttgttgaggtctgtgaaatcaatatagactcgccatttcttgttctgcttaggcacgagtacggggttcgcttcccaatctgggtaaaaagcttcaatgatgaagttgttgttgcgcaacttttcaacttcatctttcaaggctactgctcgttctttatccagaaatcttcatttttggtgaattgggtggatgttaggatcgatattcaggacgtgtgaaataatagaagggtttcttctgaccatatccgcatgtgaccaggcaaaaacatttaggtttgctctcagaaatgttattaactctgattttacttcgagcaac

SEQ ID NO: 106619 - DNA, 1414 bp, Cannabis sativa
tttattttctctggagatgttgtgaaaccaactgctgggggcattgattgcaggatccaagatattcgatctgttttcgataagaagtttgttctgaaacctatgaagaacaagaatggagtagggggacatatcaccaacatgttcactttgactgaaaacttttgtaccaatgctggtattctaaaattatccaaaagtatcattgaactgatctatcatttcttccctcaatctatcgatattattgaacccgaaacctgtatggtccctggtgaagctccaattttacttcagtgtgagacgaatgaaaatgcaatcataaaactttttgggaagggtaacagcacaagcagaaacgccaatggttttggtgccgagcaagtaattttggtaagagatgaaaaaacccgacaaagtataaaggacattgttggaaagcaagctcttatcataactatactcgagtgcaaggacttggagtttcaggtaactgcaatgtataatgtccgtgtataatctctcaaaagtttcgattttccagcactattttctcttgttttttctgcattccctaacagaaatttcttgtgagatgctttagtctaaatttatgtaattgttaatgtgttgttttgtaggatgtattgctgtacaacttttttggatcctcccctttgagaaagcaatggaggcttatgtataaatacatgaatgagcaagatctgattgaatcaacatcactgcaatttcctcatttcaacgagtgcaaacatgggattttgttggctgagctgaaagaattatatgttgccattggatgttcaaagaagaggttgtggatttgtgataacactgaattctccaaacctatgtttgactattggatgaagaagtgtcttgtgcaaattcaacaactcgatgattcacttgctcagtcaatgcaagtctcaagcagtccgcaagagtggaaatcgaggggtgttgaggtttgtttgtttgtttgtttcattcttatttcttttttttctttcctgcatttttattgtcacacatcaagaatagtgtttgcgaatcttctttgatgtgcaagtatacacaatcacatacaagtaataaaatatcaaacaacttggtatgaaaatcataatgatagaataataatcagataaaagagtacttcaatgaactaagtaaacaaagcctataaatactgagagttagtcttgtgagaagggaggaatttcgtgtgaaatagttagagtaaaatattactcatggagtttaccaagtttctcgaataacttgggattttgtttctactcttgctcttatcaataaactacattgctttcaagaataattgtgcacaagtgtgtatcgcaatgccaaaatgatggtgaagattctaaaa

SEQ ID NO: 106620 - DNA, 576 bp, Cannabis sativa
gagagagagagagatggctgagatcgagagagagggggatcgagagagatggcacctgggtcttgggttgctactcgctgctacctgcgagagagagaaagagaaatggcattagaaaaagaaagaaaagaaagaaaaagaaagaaaggaaaaaaaaattattatttataatttttttaatttaaattaatttttttttaaatttttttaaataattttttacgttgaccaataaaattgtgccacgtgtatattgtgtccacatggacaattcaacctggcaattaacagctaaagttggacgggagtgttaaattgctaacagaacacgactatggggttttaccgtccaaatttagattttgaggattaaataaaaccaaaatgaaagttttagagagttttgccgccatttacccaaatatttattctccctactcatatacttacaagtattactagcaattagcaagacggccaaaataacaatactcaataaataattctagagaaatgctaaaaaaatagtatttaatataacttagattctatataatttaagaaattaatttttaa

SEQ ID NO: 106621 - DNA, 1024 bp, Cannabis sativa
agaaaagaagaagaagatgaagagagaaaaagacactgaatgagaatttctcagttgttcatttcaatgggtggaccccaatttatacaaaaatatgactaaaagaatgaaaaactaaattaatgtaataaaggaaaatacaactaaacattaatggtgataattaatttggtgatttaaacatttataaataatcactactacaaaaattttttttagaggcggttttttagccctttcaatttcggttttggcgaaattcgctaccaacgttgatcagggcgaaattaaagggttttaaaaaaccaacgccttatatatatgtaactcatatgtagtcggggcaaatccacatagtgtctaaaaaaaaatctaaaaaaaatatatatgtattttaagtagttctaacatatatttataataaaaatgatatttatagagataatattatatttattatatttgtaacttagaggtgaaagaatcaaatcttactgaaaatacttgttgctattggtgataatcatatgatcgaatagagtttatgtaactatgagtgcacgtagcattaatacaagaattttcattaattaaatttagttctttgaaagaacttaatttttaaattaaaaaaaaaaaaaacatttacatttacatattaagaaaacattttttctcagaaaaaagaataatgaatattattattattatataagtaatggttgaatcaaaaatccttaagaacctttctgatctgttccaatgtaacgaacaagaccacagtaaaaggtccttgcctagaaatggtaggaataaatcccttatacaaagccataacaccctcagctctaaccgttttaaccgcacaatccaaagccccggagtaaggcggccccgccccactctcaaccctcatattcatcaccctagtcttaatcacatccaccggattcgacgccaccgccgccaaaaaccccgccgcaaagctagccgccacgtgtgtcccaatcccatcgttcatcaa

SEQ ID NO: 106622 - DNA, 785 bp, Cannabis sativa
attaatttatataataaattacataaatttggtaatatacaattaaatggacaattatacaaattagcacaattattacaataaatcacgtaataaattactaaattaaaacaaatttccactttcaatttatactatatatatttgtattaaataaaaatgaaaaattgaataaatgtaatttattgactaaatttaacataaattaagaaaataattaatattccaaataaataaataaaaatataaaaattcaaaatttttcctcctttttttttttgaaaaatacactaccataaataaaaagacatgtcatttttgctgaaggcaaaacgacatgtcgtttgaaaacttgaagggctgcacacacaagaaaacgacacaaggggaaaaacgacacgtcattttattgactgaaggctgcccaaatcgacgaaaaacaacacgtcgttttcaataaacatgcgctgtcttaaaataaaaaacgacacgtcatttagagcttcttcaatggctgccaaaaatgaaaaatgacacgtcatttggggtcgtcttcttcagccaatcgggtcgttttgacccgtttttctgcatgcaggtctgttcgacccgacccaaaacccgaccacaaaattgttttttgatgtccaaaattcatgaaactaattccaaaataatctccatgaaaaaattaaaagatccatattgatttcaagcatcgaaaatatgtaaacttatactttcatttcacaaaaaaaaaatcgggtccaaaaaatgggttctca

SEQ ID NO: 106623 - DNA, 501 bp, Cannabis sativa
attttgagtttgtctctcaaatgcccaccactgctggcacgactcatggtgttgtgattacagcgccaacatggcatttgagccttagatggggatatcagcggacccaagattaaattttaagatgggtttagttatacatttaatataattcaaaacaataaataaatagctaaatttgagtgcaatgatggtttaacaacatcctcctattgtagtggtcgtaagtttaaacctaatttgaaccttatatttcattttttttttctaataattaaaaagtaaatacacatagaaaaaaggggcaatgggattcaaaacatggtcttctttgtaaatttaaacaaacattgtgtattaatatattttcaaatctcgctttagccctccctcaacactcctaggtccgcctatggatattattaagctacccatgaagatgattattttttagagatacttgtatgcttttccaccagcatccttcactccttcagaaga

SEQ ID NO: 106624 - DNA, 1027 bp, Cannabis sativa
ggccagccaaaggcaaaatgttgactgaaattgcacgatggtcacacatgaaataatcaaggtggtatgttgtaattggtttaaaaatcccttgccattgatcattaacaaaacaccagtcgaggcgctcctggattgcattcacattatgtcttcctctaatcaatgtatacggatcaccttcatattgttgttcatgaaggttgcaaaggtcaaggactttgcgaaagttctccatttgagtctcgcttcgtaaagctccaccatttttgttttaatttgataagatttcattgaaatcaccaatcactaatcatggcaacaatggttcaacatccttacatttctctaaaaagcttccaagtgtgtattcgattatgagtttctagtgccccatagaaggcagagaagtgccaagttggtccattatcacacaccatgtagcagtcaaaaagatttgcattaaaatttgatagggttacatcagcattgtccttccataataaaaggaaacccccacccaaacctactctagggacttcaagtccattattgaaatgtaaagactaacgatagcggctaactacattacaagctaattttgtttccataataaataaaacatgaggatttttctctttaacaagcaactgaagaagacggaatgcgcttggattccccaaaccacgcacattccaactatcaattttcatggctagttgcggggctggaaaccagcacccaaattgttgttgttgaaactgaatgtatctgtagcagaattagaagccatctggtttgtctaatcatcagttgacaattctaaagttgagagagttggtatgggtcccctcacccgcttgagtgttttttgcaaagatattttttcaggttgagttttacaaactctatttggtgattgatttttttgttcttctcataatcagcaattatagttatcattgagtatgatatttttgggtaagcaggttgagagtagacaaatatgttggttaggttgggcatg

SEQ ID NO: 106625 - DNA, 622 bp, Cannabis sativa
ctcaacgcgttggctttcaatgttccttcaatttttcacgaactagtgttaaaactgttcatgttgtttatcgagagagtctcacagctattgttgcaagtcaaccacagtttatttgagctgggcaacccaaggattgaccttctcaaggtcaataatatccaattaaggctacttaggtggaatctggtcattagtgctagtctcaggagtctttggtggtggccttggaggaagagttgaggatctggtttcgaggcctgctcttggcacctagggtgcaggagtagtctcagttccaacttcatcaactagcatgcccccagttgattgcccaattattgggattcctctatcaacatttgtagagtgtgttgtaaccatcttgctagtaactttctttagctgtgactcttaatgaaggaaccaaaatgttgactcagaaatctagactagatctctaacccacatccgctcgttagattggcgagaatgaaaaagtagttaagtaattacatgagggacacatcgaatttatagtagttcatgttggaaatattttaccaggatctagatttactaacaagtatgtttcattgacatcctaatatgaattctaaaa

SEQ ID NO: 106626 - DNA, 821 bp, Cannabis sativa
agtagagagagtctcctaatttggctctcttaatttaattgattatttttttaattattattattttaaaatcaattattcttttttaaattttttaaaagaataattataatgaaataattataattttatttattctctttttttcgttcaacaataagtgtctagaacaatttaagatttggaaagctttggtggaaactaaaacaaacttaaaggttaagacacttagaaccgataatggtctagaattcatcaacactgagtttgataggttttgtaataagcatgggataactaggcatgggacaattgtgaaaactccacaacagaatggagttgttgagcgtatgagtagaaccattttgaacaaagtgagatgtttacttctttgtttggggttgggaaagccttattggggagaggctttagctactgcttgttaccttgttaataggagtcctaatagagtcatagacttgaagagaccttatgagaagtgatatgggaagataccaaacctgaaacacttgagagtgtttggatgtgcagcatatgtacatcaacccaatgataagcttgatgctagatctgtcaaaggcatgtttctaggaaatcttataggcacaaaaggatatagaatctacataaaccagaatggaaagcctaaggtaattatttctagaaatgttgtgtttaatgaatatgattttccttacttgaaagtcgagaaaggcagtgtgttacctgatgcagattcatctgacaagagagaagatttggcaaagtttgaaatcgagctcaaaggatttgaaccagca

SEQ ID NO: 106627 - DNA, 580 bp, Cannabis sativa
atcgtgcggattggattggatcgactattttatgaacacccctactattcaccacagctaagcaagtgaatattttgcacaattatcttttatgtgatctttttatctttttccattgatatttttttaatcttcttctattttaaatctgcaaaaataaaagataacaagcttaaaatttctccaaacacgagtaaaactaaattaaaaatacactaaaattaatctaaaaataataccaaaaataacctaacaaagtcccctaaactaaatatttacttgacctcgagtaaaatactaaaacgaaaaataaaagttaaacaagtcaatctctagaacatgagtaatttttaagtagactcaataacatgataatgaaaaattttacttatgcataacaatcaagaatttcagttcaattacgcccttgacacacttcaatttattttcattcagctcatgaaaccatagaacgcgatcaactaacaattgaaccactttatgcatgccaattacaataattaatccactaacccaaaattccaaatgcttgcagtacttactattctccactaatata

SEQ ID NO: 106628 - DNA, 516 bp, Cannabis sativa
aagagccattattccgtgggtgtaagggctcaatagaggcttgaagcggggacgttacagttaacataattcattaaatagttttactaaactactaaattgatcacattaaagatatatttataactgttaaaatttgtgtaatatatatatgtacatatatatattatttatcagtaaatctaaaaggaaattaaatatatatgatatgtgttccttattaaataattaatcagatctttccaaaatatatatatatatatatatatatatatataaataagaaaagcaaataaatcgataatattgctgatattattaacatatgcatgcatggttcaatttgctcagtcatatatatatattatattttattttctacgttgaccaaggaataacaagtcaaaaaaataagaatatatatattgatacaaattttagacttttctccttatgatataacaaagtataataaccaactaaattaatatgtatatatatacacatcaccgtcaa

SEQ ID NO: 106629 - DNA, 607 bp, Cannabis sativa
  modified_base (520)..(525): a, c, t, g, unknown or other
gctcgctgctctctcaattctctagttttctcaccctgctgccgaatagtctcttgcattgcagcatataactctttccattttggtggtggtggagggttctcgccctcaccagtagccccgagcccagctagctcccgagtacccctaccagtccgccttgggtgcataatctatacacctgcggtcacattccaggtaataacaatactgataagtatttccatatattatagtcctgcccacaccattgtgatatcagcacaattcagataatcaggcaatcagaaaattaacaaactatcttttaagtaaaagcttactgaaccatgagttgatcaagtcattgcagctaatgtacatatcaaaccagtctccaggatctaaaaaccttggagctctgataccatgttgtaacgccccgtccaatagggacgccacgtgtgtgcttttataaaaatttctatatagatactatattattttaccaaaagggtaggtaattaaatttttttgtaannnnnntcaagcatgtaaaaacttctttatagcagaagataagtaatgagaactatggggaccccctgttttcaaaatattacaaact

SEQ ID NO: 106630 - DNA, 748 bp, Cannabis sativa
ttatagcataatatgtatataaatgaacgcaattatagcataatatgtatatatgaattgtaagcgaaactatgtgtatatattgctaaatacgcatataaatatacatataatatgtaacacacaaatttaagtagttcgacagaatatcatttgcctacgtctacggttgcatttaagctatgattaggttttattaataaaatggagatgtatagattttaagagtttattcttaacaatggtctcagctgtgtgtaaatgggtattttagtgaatagaagcagtatcaacgcaaactattcttatgtagagagaaataagatgaagaagaaaggaaaagaagaggtagacaaagagcgtgcatataaatacgcttgtttgaagtttatcttttctaaaagaatttgaggtgaaagattcaagatagtttgtatacgagtatgttgttatgcttcgacgctacaagcagcctgtgtataggaagagaaagcaaggataatttctttcaagattgataagacaagcttgataggactagacgccttcttttcctctttccttctctttgtccgtccctagctaatagcttgggtgactgtatttacagaggtagcttatcgtgcctcttcgaggtgaattctatcttcgtaaaaaaaatcaagtggcagctgcttttacctttatgcattcacacctaaacccaggtatacattcatctcaagttttgtgcggctactattcatat

SEQ ID NO: 106631 - DNA, 1487 bp, Cannabis sativa
  modified_base (26)..(27): a, c, t, g, unknown or other
aatcactgaaatagtaaaattgaatnnaattagataaaagtccttaaatttaacaatctcaatagttcgggaagaatttttaatgaccaaaagagtttaagaacatgatttcttacatgtcaaagttcggggagaaaaattactaaataatatagtaacctacaaactaattttttccccgtgcgtctcctacaccattcgtgaaagaaaaagtcccttctttctttcatattcccttttcacctcacaataccatcatatctccgtctctgtcctcggcggcgtggctgctgctgtaatctcaacggcgtgactcttctaaaccttgaagacgtgatcgctctattcctgatctccctctcctcttgttttccttgccatcagctgcataaagaaaggtatcacttagctttgggcttgaagttttaatcttttacctttgaattcgctctcagttttcttttcttctttccatttcactctgaattatatgtatatgtcacggtcgggggctgaattgagatcttgctttgtgctttgaaagcggcggtggataaatagatttctagggttttttctttctttccttttccctgattctagattggtggtgtttgtgatctcactgaaggactgtttgatttgtgtaatgaaaatatcacctgatttttgctgactaaaggaccactgatttcgcctgggttgtacccacgaagcagggtgcaggtgttacggttactattgctgatctcaaacaatcaaaatagttatgtgtacaatttgagactttatgaaatctgtaaatattgccatgatgaactactgataaaaatgttttaaacacccgataaaatattggaaacggaccaccgatttaatagtttcgttttggcacatcgcaataagtcatattcatagcatagggtttggttgatgatagttcttaaggataggtgagaaaaagaataacatacacattaaatagtggactcattactcatatataatattctgtttaaggtgtttatatatgaatcttagctgtagtcttcatttgttgtagtttttttagttggtgttgtagaaaagcttcgctgtgcatgattatcataattgtgaggattgtgttagtaggcatcccataaacaacagatgtatattttagttaaagtgtttggtgttttcggattatatttagcttaaatcaagtatactgtctcctttatcttgtatgacaaaataatatcattttatattgatacttcggtttttttaacattccttacattttgaacttgaaacttgatagcagcggaagaacgaatcaaattgttatctgttttagtttagaattgttgttgaactatttactgtgcgttgtagattttataatttcatataattatgttagtttcaagcttgtgtcatagatatgatatgtttaatcatgttaatctcatgtgtggggtcactgtttattatacatg

SEQ ID NO: 106632 - DNA, 517 bp, Cannabis sativa
aatattttcatatataagtaactcatatgcttacaaagttcaagtgatatacaattaaatttaagaaacatccataaaaattattctcattttttatattttttgttaacatattattattgatatatatatatataatatgtaatatatatgtatattatataatttttaagagacaattcaatacaataatttaattagtatatatgttgtgacgttaaaagtttgatagatattttttttttcttgtttaatagttgaaactttattagattattaatttttaaatttttaattatttaatgtttgataataataacagtgtaaatcgctatataccgcaccgcactataccgtatttttgcggtgtagtttttacgttttaaagatcttgtgaggcagttgcagtttgatcaataattgtaaaaaccccatatgcagtttgatttgaaaaaaatagcctaaactcccactacttacactgcaaaagtatccttaattaaaagtcgatcatact

SEQ ID NO: 106633 - DNA, 523 bp, Cannabis sativa
caccctttcccacgtggcccaccatttccatcaaatctttccttaccaattaaatccatagtgatagccggcctcactaaattaatggacccatcagtccatttggattccatctctttcccacggcccagcccaccaaccaaagcaccctcatttagtatatcaataattcccctgaatacaatcttatgagaatggtcaaataactttaggaagcacaagtaaatgagacggcttaattaattagaagttttatttttctttttaaatttaaaagtataaatactaataattcaatgaattcaataagggatcgatcgaaactagaagtcttaaattaattttctccgtgtgaacttttctctatctaataataatctccgtctcttttcttcgaatatctcgaaaaattgtttctattattccgattctgcccctgatccccgccattatttaccgtcggcaacatgaatcctatgatgctggtcaactgcgccggctgtcgtactccgcttcagctacc

SEQ ID NO: 106634 - DNA, 820 bp, Cannabis sativa
tccttaataaagcatgaatctttttgaggatcataccatctacttgatcgtgaagttgatgaagatttgtcatgtggagtggaattgaaaccataagatgcacttgtttgatttatatctcgaattctttgtctaatgtcttttattttagaagctatgtcatgttggtgttttagtttaataaccaagcaagcatttttacgaacaatgctaataaatctttggatatggggatgatttccttgttgtttcaccataagatgtgtgtaatcgtcaataacatcttccacttcaaatgctgctcttctaagtttctctacccacactttaataccatgattagtattgttgttgatttgatttgtatcgactcttgcatctgcatccttaaggaatgccaacaagaaatctagatcacacttgattccctcgacatctttgtgaatacctctcaacaaatatgcttcattagttagtaatgggatcaacttgtctacagccaagcctacagcaatctctgccatctgtcataacaaatatttatttccttatataaatattcatatatagaagtaaatggtagctaattaaaatatttaatattttattaagatgttgagtatttagtggagtcacgagaaattaataagttgaaaatttatttattgaattttagatctacgagcttcattttataagtccatgatccttacaatttttaggatgtttaataatagggcttaataattaattaattgatttaatcaattaaagttcatatcatttttgagaatttttactaagttgacgaaaaatagaa

SEQ ID NO: 106635 - DNA, 687 bp, Cannabis sativa
  modified_base (155)..(158): a, c, t, g, unknown or other
cacttcttttatagcaaaaaaaaaatgataaaataagataaaaatcgctgaagagaaaaaacctattctccttaggattagaaaacctattctgcttaggattagcagagggggtgatttttctgctgcgttaactgatagtattttggccatannnntctcgatattgcttggaattggacgattcaagatgttctgcaaagataaaagagtgatatagaacttttatgttttgactttttctaaaatataatcataacatagtcgtattcaggcttgaagtttcagctttattttcttccacaattatctctattttaaatatcatctttttgtgagatatttttatctttttttttttccatatttttcctctgatatatttctaatcttcttttattttaaatctgcaaaaataaaagataacaatcgtaaaaatcctccaaacacgattaaaactcaattaaaaatatactaaacttaatataaaattaatactaaaaataacctaacagatggcactatgtgccttggcttcaatttcacgttccctcttcctattttcaatcaaatccaggcttcagcatcaagtgctttatagatcccttggtgaactagaaaagattcatttttattctccataggctgaaatcattggaaccagtgaacttatccacctcaaacctt

SEQ ID NO: 106636 - DNA, 632 bp, Cannabis sativa
  modified_base (565)..(569): a, c, t, g, unknown or other
ttattatctgattaacccataatataaatataaaccctaattatttaccattagacttatctggatattacaatctgcttgaagtgtgtttgcttcctctcgagataagacttgaaccaccttctctcgaaggtttggagaatcttcgcccgaaggctttacactttgttcttctcctttgctaacttgtttaatgactcaaaataatcactaggagaccaagtgcagaggtagagtcgaattacactctcattcacatagcaaagacactctttctataaaatatgaataaaaatacaaaagagatgaaagagataaaaaaaaactacaattgccaatatgagtagttataaacaatatactcctattggatagcttatacacggactaagtcatccacaacccaacactagtatggtagcggtacagagtgcattagtacagtatatgatgtttaaagggtacgatccaatgttaccaacactagtacgagacgagtatgtagtgcatgtgatagaacactcaatggtactcgaggtatgattcagccctaccaacactagtnnnnngacgagtacttagtgcatgtggtacaaaggtcatacttcttttaagaacgttcttgatcatct

SEQ ID NO: 106637 - DNA, 629 bp, Cannabis sativa
ataagtaatgagaatcaatggtaatgtaatcatttccttacttttgtttacttacattattaaaattagaaaagggataacttgattaaataagggagaaaagaaagggagaacttctcccaccaattttgtaaggaatgtcattaagggtaacagatttttattaattttattttattttttaatattaaatagataatgataattttgtcatttaaaatatatcttacaaaataactaacatataatatagtttaactcaaaagagcaatttagtcaatttaagcattccgattacttttcttaataaagtaaacaagataaatcacaactattccatctccaaaaagttttagtaaacaacatattacaaatattgattccgattattttttatttattccgttacatttctctattaatttattttgattctaaatattgtatagtaaacttgggattagtgagataaatggcacaaaaaaactgatgaaatggtgagacatggaccactttctttttgcattaatttgattgaggggttgatgagaggtcaggtggtataaagttgggacacgtggtggcttctgggcgtttttcgactgccgaaagaattgcattaggagaag

SEQ ID NO: 106638 - DNA, 801 bp, Cannabis sativa
caaccaaaaattcagtttaatttgcataaaactaatgtcctgactttaatttttagatccatgaaaggaggatctcaaaaagttgaactggaattccctaataatccaactcaagtataatctaaaaaaaaaattacatcaatactatagtaaaatgtttatccatgtgtatttttgttgttttccaaatttctaatggtgaatttgttcatattaaatcataaggagacatgtagatacagttacgtgaaatgttctgatttttaatatttcacagcagttccattacagttgcataaacattttgctaacagttatttcgtctgatgcagcctttggccaaccacctaaaaactttcgtctgatgcaaccttcgaccaaccacccagcaaccactttgcaatcattgtctgattgaaaccttcgtctgatgtaaccatcgcgcaaccacgcagcaaccaccctgcaattattgcctgattgtgtaagtggtattttagtaattaaaatcacataaaatgtataaatgttatccttgccttataaaggtgtttattataaataaagtgacaatttatatttttttatgtaataatttctttatttatatacttattaaggtgtaagtacatatttttgttttatatgcctattttattaatttaatatataagtatgttgtaaagagttgaggctctatcctttaatgattttgatgcaccattattttgatggctttggtgcttttcaagaattttgtgcttatattatggctttcctaccataacatagttaaatggt

SEQ ID NO: 106639 - DNA, 913 bp, Cannabis sativa
tagcacttcagaggaggacacgtggcaaactgggagaatacgaactaacaaatataatgatatttatatttaaaaatggaataactcattaaatgtggaactgacatagtatatttacaacttgttgactgtaaggtcttaagcgggataaagatatacgaactgttgccttgtgtgttaacgagaaaccatacgacgccagtagtgcaaggcgaggcgtcaacctcgctacgcatgaagagacatagacgagacatgatgattgttaagacacgtagcgtataaatacacattatacaaactaagcataacagccgaacgaatccaaaactacgaatagtgaggcatccattttgctataggaaggcacactcatggtatcttcactaatcagctcagacatccttcaataagatccacagctccgtcgagtcagctctctcagatagaagctaacattcaaatgatgttgactgctgaagttcaccttgtcaccaagaactgcgattgtcagatggagcattatgtcttcaatagcataaacgacgagacttacattatcaacctcagaaaaacatgggaaaatctctggctcgctactagggttttttctgctatgctcctagcgagatgtcctagaatgatatgctttacaatgtatttaatgcatgtatgcactgacccagtaaaagcggacaaatcacagctgtgtgattttcaaataatgaccgcatttattttacatgggacgtactcaaatcccacaaattcaagggattattgttgtaagatattagtctgatttgtaattaactgccctcctatgtaactataaataggagaagtttacactgaaaaaaggatgaaaaaattcattagagaaaaagccctagaattgtatcagaaatctaat

SEQ ID NO: 106640 - DNA, 1401 bp, Cannabis sativa
taagagatgtgatgttgataactttgcccatatgggaaacttaagttgaacccctttaaagactgtgataatattgtcatgcaaggatatggtataagacacaagagtcatgaaaatctccaagtaaataaatactcccactatggcttttcctttgcctccaaaagcttcttctccaatatcactgtagcttcttgatttgggactcttctcaagacattttccaagtagaagacaagaatatgcgcatattattccaagtaataggagtaggaacactgaacaccatcctccattctctagggcatatggtactgataactgccctaaccctgtaataacacataaaaaattatgtttataaaacacttaattatacccaacttttatatatataggaaaagagagcgacgacgtctatgttaggtgttaaggatggaggcagacttgaactccaccaaaatgtaaagaaaaagtttaaggggccaagctaaatggaaacttgggcaaaaaaaaagttatatattttgtgagtaatgatatgtgcatacacaaatcagtgatacacatgtgtcaaattactttatatgagatgggtctcacttattaaaagtaatttgctacataagtgtgtattacatttgtgtatgaagtaagtgtaggtgcacatatcactatgagataattacataatacattatattttttgtaaattttttacattttcacgttaaaagatttttttaaaatatttttacggtattttgtaaaacaacactagaataataagaaaattacaaacaagaaaataacatcaaaataattacaaaaaataacatacaaataacaaaaaattaataacaaattaacaagagaccacataaaaatacatcaaaatgttatattttttgtaaataaaattataaaaatcgtaaaaatatttaaaattctgtacatatttttataattttttttgttgttttgtatatttgtgaaagaatccctatcatattgatatttaatagtatatatagtagtaaaaatttaaaatagagcattcctattacacacctaaaagtgtctaatatataataatgggtgatttataatttttcatattatttatttaattaaaatgtctagactaataataaattatactaataattatttcttatggaacttatacttctcttttaagatatggtactttttgaaaaaattataaagtatggtttcggaagaaaatctaaaatataaactagactttttgtttttaagaaaataatttgtctgtttgtaaaaagttaaaaaaataaaaataaaacataccaattttaaaaaataaattagattttcttgtaaagaatattttcgaaatagggcgagaagccttgggtg

SEQ ID NO: 106641 - DNA, 600 bp, Cannabis sativa
aggatatacgaatattcactctctttctatagttttacgactaaacttatcatttctcaatgatctgatgtattctttctcattttggtgagcaaggtttgaccgtcgatcatcgcataaccattggcacagggagtatttatttgcatttcttatttttatttttactttgaaccataagtttactgacttgatcgtcgaagtgccttcgactgacaccaccccagtgtcccaaggtttcacggtcatcctttatctttgttttgcaggttgtcggtgcccacaaacgttcattctgatcattgtaaatcttagcatctacaatttggcgcccaccgtggggccttgacaaattgactgtgagcaaggcgatctatcattaccacacttcagatggcagaataaggagagtttgttgcccaggaacaatccaatgtcaacgaacaacttgccacaataatggcctagatgcgcgagatggccgagggaactggagttcttgagcgagaaaatgcaacctttaaggaggacaaagtaacatttaggagtaaaaatgccacaataaaattacaattagagtcattgaaggctaccatgacg

SEQ ID NO: 106642 - DNA, 561 bp, Cannabis sativa
gatcttctagagcccataggctcttttccaaaacgacagttagtttcctcatgcggggtgttaatattctctggatcttcagccataaaggagaaggatttttttaaagaagggaaggctttttctgagtttttttcacagaggttctcaatgaaagtaccaaactgttaacgcagatttacgttaaccaaatttgagcctcacgattatgattcaacacaaaaataataaaaactatagaaaaagaaattaaacactgggtcttttacgtggttttgccgttaaaattctgcatagtccacgagtcaatcttattcaaatttttgagtctttttttagggcctcttgtataatagttttttcatccctttttcgagattatttgccactatttataattgcatagtggcagttaattacaaggctgaccaaaatgtaattacagtcactatcccttaaattaatcatgggatatctgattacatataataaaatgtaaatgcggtgcatgattttgaaaatcatttagccgcgattttctcgcttttactgggtcagaaa

SEQ ID NO: 106643 - DNA, 794 bp, Cannabis sativa
tttttttttttttttataattttcgagttacattctatatatgaatgcatatgatgtgctttcaaagaaaataaaaattaaaaagcatctgattgttaatataatatatatattttaatatatataatagtaatatatgtattcatactattacttccaagaaaaaaaaaaagaatgagctagcgcttctatatatatattgtgatacatatgagtaaatttaaaaatctggacgatgattaataaaacctaattgattaaactatgtagtaattatcattaagtgatctctgtatctctttcctatatatcttcgtttctttaaacaaaaaatcactaggtaggacctcccaaaaattgcaagtagcagtttaatttgccaatccgagctgcacaaaattaattaggtttctcattttatccaccaagctcacgtaaaagaattagtaacacaataataaatttaaattgttcactgatcaattatgatgcttgaagaattttgttcttaatttttttttttttttggaattcttttttcacttaactatataaaaaccatataagctacattattccgctcattttttaaaataagtttttgtgatatgacactaatataatgtaacattaacttagaatatatatatatatattaaatttaatatcatttaattaaatttggaatgtaacattaacttagaatatatatattaatatatgtaaattgtgatcaatattttttttaaaaaaaaatgtgtatatatttatatatatttcaataaaaaattgat

SEQ ID NO: 106644 - DNA, 722 bp, Cannabis sativa
  modified_base (26)..(53): a, c, t, g, unknown or other
  modified_base (374)..(375): a, c, t, g, unknown or other
tatatgtgtttatttcatcattttannnnnnnnnnnnnnnnnnnnnnnnnnnncatacttgtgagtagatctaaggtaaaataatttccaatacatccaacctggtacttttactggtattattttcttaagtgttccccattccaataccttggtactaaaacgagttgcattttttcgtcatacttgcccaatttgtatgcccctaattcgagaacttcgaccacttgatatggtccttcccaattcggtctgagcacaactaccgtactatctttggtgttaaaaaatactcttcttaggaccatatctcccacaaagaatttccgtgctctcacttttttgttgaaataccgagctactttttgctgatnngctatcagttttaagtttgttgcggttcgtttctcttcaacttcatcaagtgactctgcaaggagtacatgattggcctctaggctatatattaatcttttgtgggatggcatttcgagttctatgggtagcatagcttcatatccatatgtcatggcaaatggagtttgtccggttgttgttttctcagttgtgcgatatgaccatagaacttcaggaagttcctccggcgcgtttcatttagcatcttcatgtttcttctttagggtgtccttgagtgtcttgttgactgcttcaacttgaccgtttgcttagggatgtgccactgcggagaaacttcttatgat

SEQ ID NO: 106645 - DNA, 832 bp, Cannabis sativa
ataatgaagaagacatagatttaggtgaatttgaagaaacagatgacaatgaagaagaaaatgctgcaggtgatgaagaagaggagggtagtgaaggagaagagaaggatggtgaagctgataaaaattttaagtccaaagaaaaagatgataagggcagtgatgatgaatgcacttatagtgagaagaaggtagataattagacaatgtaactaggttttagttactttgtgtgttttattttgttgtaagtccatttaggtaatggatttgtaattctatgttgttgttatgtcatttcttatgttgtagtctttttttttgtattaatttgtaactaatattcagactatttatttgtatttcttatgttattttgatggctatgtttatagattatggtgttcgcaattattgttggtcttattattttattttttatgttttttattttgttttttagttgctatgtagttttttcttagttgtttaccactttaaaaaaaaataactttattttttttctctgttttttttttcttgtattttttctgtaccaagaattttattgattttaatgacggatctactcaaatagatgttgaggcaactgttcagtccgttgtgaaagcagttgagattatggtaatattaattttgtgttgttttttaattgtataatgattgttattatttagatttactctaattatttttttataagatatataaacaaatgtctttagagggaattggtggtgattctggtaactaggttactgtttctgaaaatgttgagcttacggattgtcgtgttgtttgtgttgaggta

SEQ ID NO: 106646 - DNA, 5433 bp, Cannabis sativa
aaggttcttgagctttggtcaagcttattgtatgttattctttttctttcttctctaacttgtaattttgatgtaatacttttatttgtattttaagtattttgattgtaatcctcctattctcttttgtaatgagaatattttttaataaaaacatattgaggagttgatattattttacatattataattaagtcattgttttattatttttcattactttgtacttgtttttttgttgttttatatttattttcatgttgtttgctaagtgtttttagagttattttttagttgttttatttaactgaaacataatatttttatatttttgatactttaacataatattttttaaaatttaatacaataaaaatgtaaaaaaaataaataaaaaagaatatattttttggtaagatctccaataaacaatgaagtgggcataatccgttgacccgacccattactctactgtaactgagctctagtgccattgctacagctactatcattacattccaattccactcccaagttccatggcacaatgacccttttcgctctctttcgccttaagcgcccaatcgaaacgccgtcgttattgctcccatttggcttgttttcagaattatctttcttacgatattcctctttctgtaaacgccactatttcccaccctcacagtcacaacaatcccctactcatccagtcccgaagaaagtcccatttcaagcctctgcccatggaagaacgtggcaagatcctttccattggatgtccaacaccaaagaccctgatctttctcgatatcttgatcgagaaaactcgtatgctcaagctttcatggctgacacacaaaacctgcaacgaactctcttctctgagatgactcaacgaatgcctgctacggtttccactcctcccgagccttggggaccatggtttgcccattccttaattttgacaaatttggtgtttttctttttgattggtaactgttcttgttttgacccaaggccccaagttacaaactagttaagttcattacaacctgctctgtactttgcatgaactcgccatgacctttctcagtgaatgctcccacgttctttaaaaattctgtgttgtttttattcttggattgaggattgaaagtgtgatggcagtttcgctatttttcaaattaatgctttgtttctttcttccttggttggtggaaatcatgttttgaagtatgtgaatgcccaataccacaaaaagtatgtcatcaatataaaaaactgctaacaattaaggggccagcttttgtaattgagtcatacttgatcattcaggttgtattaccaagacattccggaaggaaaggaatacccagtcttgtataggaaatcaaatgttggtaaaagtaattgggttaagactgctctccaatatgcaaggggtggaacagggagagaggaaattctgcttgattggaatgaaattgctgaggaatatggcaagttcttttctgttacttattcatatataaattttatatatttttctttataatatttgtaagtatatattagtaaatctgtgtgtacgttcgaaattgtaggttatgtgcatgtggggatgtgtagagtgtctccaaaccataattttcttgcatacacacttgatgtttctggtagtgaacagttcattcttcaagtaaaggaccttagaactggatgtattattccaaatttacaagttcatagagttgtgagtatagcatgggctcttgatggcaatacattgttttatacccagtcagatgagaatcaaagacctttcaggcaagttctttattttttttttgttacatgtagtgaaagatatttcctcacctttttttttttctctcagggttttgtactttaatttacactccagtaatacagatggtattcctgtatttacagagagcaattccagcttttgtgtagacataacaagcacaaaagacggcaagttcataactgtgaattcaaattcaaggacttcatccgaggaatgaatagaaatagctgtttaatcttttaaaatagtatgtgcattgaaacattatctatttgactgttgtcaagactaactttatgcatgtgaaactacaggtttatgtaatagacgctgccaacccatcaggtgatctgcgaaaaatacgtgagcgtgtatctggtgtccaatacttccttgagcatcaccatggtttgttttatattcttacaaatgatccatcgagtgtaaaagaaggatggtctggtgaagattattacctagctagatgccctgttgaagatatacagtcgactaattggcaggtcgggtttgtttttacttcatttcttaaagaggatgtttcatgctctttgtcatcctctctctctgagattgtgccattctttagttattcaatgttgactcgttaaatagttcatcactctttttcatcatggcctcaattctcttttattagaatatcatcattccgcgaggaggtgtaaccatacaagatatggacatcttcgatggatatctggtgctttttgttgacaagaagggtaaccctgctttctgttccctcagttttcctatcaatgttgattgcgaggtactcatattcagcttcttacatacataaataatatctacataaattatctaattcttgagttaatttgagtttatagctggattttgttctgtttgtaatgcatggctgcccacaatctatcataagagaaaataaaattttgaaatgtctagtgtttacataccaaaatctaatcattgttatgttattttcttgttttataggacctattggagactgagaatcttaatacttggtttttccctctgccttcaaattcatgtagtgtcactcctggttcaaaccatgacttccttagctctgtattccgggtggtgctttcatctccagtggtacgaatttaactagcttgattgcaagggatacaatattatatgtatacctatttatgcataattttcagcccctctctctcattttagtaatcagctttttgttcagacttcgtatcagtagaatccatttatgatgtttggggcttacaaattatttccttaatttttttctactcagtttgtgagtattacattaatacgggaagatataggaaatgtttattatggttttaaaattttgattggctttttcttgttctttttgagatttgacaagatgagctcaaggaaaccttcattcttttggttttgtaatcttgttatgaggtggccagaaatggaggatgaaactatttaggttgaggtttttacttttgtaactaagggaaatggaatcatatccttcttgattgccttttcagattttgtttagctatttttgaattatgggatatgcagatgcctgatatgatcgttgactatgatatgtcacgaaggagattctctgttgtacagcaagaggaagtgaagggtgtttcctgtgaagtagatacaaaagaaatttttgacttcaaacatgatggggaagaaatatctcagtacagtgaatcacagacgtggaaggaattttctaatgcatactgctgtgaaacaaaggaagttgtttcctttgatggcacaagaattcctttgactattttgtactctcgagcagcctggcagaagggccagtcccctggtcttttacaaggatatggagcatatggagaagttttagataaaagctggtgtacaaatcgcttgagtttgctcgatcgaggttgggtggtggcatttgctgatgtccggtaatttttattattgagtcgccatagattgattgataataagtttactgataggagtgtaccaaattcctaaaacatatgataataattatgtgtttgtttaattgttcaaaaaaaaaaaaaattgtgtttaaaaacagcagtgattgctttggttcttagttattgtaattggtatgcttctgcacttgactgtttatctaatgacttttaaagaaaaagtacaagttatttgattggccaccatcatgttagatgctatattagtggctatgttctcaaccgaaacagtaattttgtagtgtcactttggataattgtacttgtgatatttaaaaatgactggtttatattggcagtggtggtggcgggaatagttcgtggcataaatctggcagtggtctgtgtaaaaaaaactcaatatacgattttgtttggtgtgcaaacttccttgttaacgaggaatatgtgaataagcatcagcttggtgctattggatatagtgcagggggtcttctattgggaccagctataaatatgttcccgaaactgtttcgtgctgcaattttgaaggttgatttgaactctctaaagaataacatccctttaatgatattctcaacttctattgatgttcgcttaacatagattccatttcttgatattgtgaattatgtcaggttccatttcttgatatatgcaacactctgctagatgataatttgcctcttacaattctggattatgaagaatttggtaatcctcagatacagtcgcagttcgagtatattcaaagttactcgccctatgataacatttcgcgtggaagttgttatccttcaatgctcgttacagcttcccttcacgactctaggtaaattccttttgtatattctgtcatttataaattaaattatagaatgaagaatgctttcaaatacttgttgcatattcatttaatttttagtcatatttattaaaactgatggaaataagtaagagaagagaaaacaataactctttctccttcctttccaaaaacatatcacattacaaattttcttcttgttatagattagtaacaggcttgttaatttgttcataattacctctttatcattgtaattttcagggttggagtttgggaagctgctaaatgggtggcgaaagttcgagatagtacatgttctacttgttctgatttggttatattgaagacaaatatgagtgggggacattttggtgagggtggccgatatgctcaatgtgaggaatctgcttatgagtattcttttctgttaaaagcaatgcaggtagtgaaccatgatgaataaattaattattgatttcgaggataataataataataataactattatcattcgagtacacaggatattttgctcttaaattgtgattttttcttttgggtagagttttgttccttgaatttctttttaccaaagttttctcaaactaaacaagtctttgtaaatatttctctttagttacattctatttttttaaataatttatttatatggctttgagttacagtatatatgtctatttttaacaatttaaggtgccgtttagtaacactt

SEQ ID NO: 106647 - DNA, 888 bp, Cannabis sativa
  modified_base (192)..(196): a, c, t, g, unknown or other
gcctcaactagagaagccgaattactcaatgtaattcctgtggatgtattagctcacccgacagtgagtcgagaagaagtaatggagatcgatgacgccaaagaagtcacctggatgactccaataagcgcatacctggagaaaggtatcttgcccgatgataagatagaagcgagaaaactgcgacagcgnnnnncccgatatgtcatctatgatggaaggctatatcgcagaagcttcagtcaaccgctacttaaatatattgacggagaagagtgcgaatatgtactccgcgaagtacatgggggtatttgtgggaaccacgcgggtggtaattaccttgccttaaaaattatgcggcaaggatattactggcccaccctacggcaagacgctttcaacttcgcaaagaaatgcgacaaatgttagcgaatagccacatatgtccatccaccaccgagtcacttgcattccatcacaagcccttagccctttacggtttggggcatcgacttgataggtgaactaccaaaaggtaaaggtggagtcaaatatgctctagtcgcggtcgactatttcacaaaatgggccgaggccaaagcactagcaaccattacagcgggtaaactgcgcgagtttgtctataactccataatctgtcaatttggcatcccttacaaactcatctcagataatggaaagcagtttgactgtaaggaaatgcgacaactgtgtgatgacttagggattaaaaaggcattctcagcagtcgcctatccgcagagcaacggacaaaccgaagcagtaaataagataataaagcacaccatcaaaggaaaactcgaagaacgtaagggggtatggccagacgagctttcgcaagtttta

SEQ ID NO: 106648 - DNA, 1498 bp, Cannabis sativa
gccaaaacttacatagtttgaggccctgccacacaaataagcctaaatataatatatttcaacatatatttttaaactaaaaattataataaaaagttgatattattttaatcccacataacatgataaaatacaaataaaataattgtacgtgcatctaagatggagaagtcacgtgtgtggtagatagataatagatgatagatgtatttagtcacgtgacctgattatcagatcaagaaagaaagaaaaacaaaatccattttttattattaaaaaaaaaaaatagattcagtaagctgactcacacttcacttggccataagctattcgccaattattgccgctgcatgcgctctgaacatataaaattacgaaaacacccctgtccacaccctcaagaaagaagatcagttgttgataataatagctgaaatgctgagggaagcacacgtgtcattattatgcaaataaatattacattggcacacaatttaattggctaatcaattacaacgcgctacattaatatagtattaaaaattatatggggccaagaaatgttaagggcatcttatcgcctcaaatactacaaaatgtgagatatcactattgacataaattattatgaattttttacataatttaatttaataaataatataaacctgctaactaatcgcaacgtgctatatttgtacagtgttgaacaccttataacaccttatagtgcttaataacaatgctctaataataactctaaaaaatgttaagggataccttatagtcacaagcaccacaacatgagttatattgatattgatacatattattatcaagttctacacaatttggtttaataaattgatacttgcaccaaagtcattttaacatgtgtaattattacacatatgactataataaaaaaaagtgacgataaaagtattttattttacaattttattgttgtcagattttttttacccatcaaatctcaactcaaaaatacatagtaacaccattcaaaaaaaaaaaaaaatacgtagtaatatatttttttagtttatttaatacgtgaataattatcatcacgtgtttttgagttgacacttgatgatcgataaagtattttatcaccatttctttcaattaagattatatatgtagggacatgattttgtctcgtgatgtactaccattagatgggtctcgggtacattaaatgagtgtcaggtacgtatctaaattttaaccctaatcaccattagatcaatctcagccgtcagatcaaataagtccattatctgacggctgccgtacatcacgtaatgcattctatgaaagtacaatcacaaaacaaaatcatatccccctatatataataattataaatattaagaaaatttctcgtaaataaatttttaataatataaaaaaccgctaacaaatcgcaaagatggatacagcaatagctctctataaatagttggagctgaga

SEQ ID NO: 106649 - DNA, 547 bp, Cannabis sativa
aaacaactataaaaagtgacccaaaacgtaggctaaaaatagcctcacaacactaagttgtaaacttttgttacacgtaagtccaactatgtctaaaccacttgctaacaagattaacttcttaaagttattctttcagttccacatgcctacaacggacaacgtgccaagaaaagtctcagggaaggtctgtgaaacttggtgaatagcaagtgactaagagacctaagtctgtatagttacttgggggcacccataccgtacaatgcattaaactagcacaaagaacttatgcagagaaattgtaacgcttagaataagctactaaatgtgtctctaagtcatacatgcatactttggcttgacaagtaaatccagacacttacatgtcaaggccgtaagaagatagacatgacgactgaatatctgtcataaaaggctttaaggctaaataatagtaatatttcaaaatagagggcatataggccaaagtaagtgttgggttttataccctaaataaaactcatttcaataagatcggaagagc

SEQ ID NO: 106650 - DNA, 523 bp, Cannabis sativa
gccatcgagaccctgtcggtcgcaactggggaagctaggtctgaatttgcccaggcatatggggtcgcctgttggcgcaaacttcaaactctccttccccctgtttgagattttctcaatcttaggagtccaaaagagatgctttcaaggagcttggactgtcacttcatggtacgttggctttgttattataattatattattcttctttttcttacacctctttcatattcatctatttacagttctccaggcttcttttgcttccaaccgactactctctgagcggcttgagtacttggagggcgaggtccacaagttactataacaatgtaaggttgtgagtaagcaccgggaagactcccaacaggataatacccgcctcaagcgagaagccgagaaaccaaaggaggaagctgagaaggcaaaagaggaagctgagaaggcgaaagggggagcagagaaggtgaaagaggaggccaagaaggaaaaagaagaggccgagaagaccatcaaagcccaa

SEQ ID NO: 106651 - DNA, 2176 bp, Cannabis sativa
  modified_base (2125)..(2129): a, c, t, g, unknown or other
ttgtggaaaagatgataaaaacttctctttttggtgttgattttgttaaaagatgaatcctttgaaattttgggatcaaaaatgtaaaaattaagaaagtttttaaaccgcggcatggccttttgataccgtgtggcatgcccctttacagaaacattgaattttcgaagtttgtacacgggtcgcggcaagggattgctgggttgcagcccgcattacttgagctgtccaaaaattacacatgccacagtatggcattacttgagctgcgcaaaaaattggacacaagccgcggcccacgtcccttcaacaagaaaaaaattaggttttcaaatctataattgtgattttttaagaggcagacttagagggtgcaattttggaggctagaagcacaccgtggagtatctcaactcactctctgaaggttttttcttcttatttatgttgaacctaatgtttattttgattattattttatgtttagaatgaggattatgagccaaatctcgttttagggattttaatttaatcacactactacaaaaagaactattccctatcggtcctcaaattgatttttgtcgaagaccgacgctattaggattgtgtgcgggcttaaaactgacagctatagtttagtagtgccaacggtttaaaaatatcttaattaataaataaattttttttctcaaatttaccttttcttagtaaaactcataaatgatacatagtcttctttagaatgttagttgatttactaaatcaattaattgaatttacaaagcaatattactccaaataatgtgggggaatgggctatgtaaccaatatcttaataagtagagccaaaatttgctaagtaaatttcttcactttttaattcttcttaactccactatagattcggaattgtactcctgattatatagaacactctatatgtcaaatatagatacactataattaataattgttacaatcttaatagtcattgatcctctatggaggttttacatctagtagggacaaatttactatttttactactttatccttcaatgtattttatctcaaaaatacttaactcattgtaaatgatattttgagaaactaatataattaccaaaatgagcgctctatcatttatcgtgtttagccaaactctaaggaaactgtcatttcacttttaactagttataaaagctatagattccatatctatgatatgattaacactcccactcaattgcattaccgaattcccaaagatgtaagtatgggctattcctacgggtaagccagtaatgaacaagtcaaagaacttgtatagtacaattaagctagaacttaatcatctcaggactgagatcaattgacttaagatcaactaagtgatatgaagtcagaaatattaaatataacagtaactttataatatctttccttttttattgtacaatattgattcagactgatgtattgtcgatatatttgatacacgtttttctttgctaaagctctaaaaaagtcactccacttatccaagtgtgagcaactacattgttgatattatcttaccagtgtaaacttaatgtattgataaatcatgagactaactagtttgaagcatattatcatgattattaatttttcaatgtgtagacagctctataattatgaataataatatgttctgaatttaaccgaatttatatactaaacatatataattatgaaagtaacgtataaagtaagcaacataaaataatttctgatattttattaattaataaattagattatattgaaatagacttgtcaagaagattcttggcataaaggtgataaggaaaaggaaagaagagaagatgattctaactcatagaagctacatagagagagtgacaaagaaattcaacattggaatcttccaaagctatactgcagtacccttagctggacactttaaaaatgtcaaatgaacagtgtctaaagactaaggaagagagaagagaaatgaagaaaggaccctatgcaccctatgttatgactgtttaagggctcgtttggaatgccgtattagatcgtattgtattatattgtattatattgaattggtttnnnnnttatatttttatattatactatgttaaactttaagttatactaaaat

SEQ ID NO: 106652 - DNA, 1185 bp, Cannabis sativa
aattaataaaaaataaataaattttgaaataaccataatagcaaatttatataagaatcaattttcaaattcaaagtctcataatatataaaataaatttaaattaataaaaattaattttaatctaataattaaatttatatttaaaaaataagattctacataaaaatctaccaaaatttgaattttatttcattaaaaataacttttaaaacttaaaataatgaaagaataggaaaattgggcgcacattcagggaaattctaatttgattttttcaaaacttcaaaaaatcatatctttttcaattttaattcaaactaagttctgtaaaaggataatttgcttactttttcaccaatttttcaaataaaataattctagatcaaaaatcaaattatttttcataaaaaatttcataatatcataatcaatcatcaaatatcacataaactaacatgaacacatccaaattaattaaacattattttaaatccatattttatgaaaataaatcattatcatagctctgatactagttgttagaacttattttaccaagatctagatttacaaacgtgtatgtttgattataactctataatctaaaatcctaaatatgaatttcctaaaacaatgaaaaaacacataaaagtttataaaaaatattacattgatggcagcagaataatatgactccttctatttagatctctaacccttgatcctttctatcgcagactatgatcaatatctaaatctggatcttattctattgttggaattctatacaatcttccacaaaggcctgagtattgacttgaattgtgtaagaaatttctcaactcattatagggttcaaaaaatatgaagaagaaaggaagaggatttcaaactctaagagactctcactttattttctaagttgtctgacaaagtgaaaactaggtttttttttattattattttcaataagagtattttattctatttataggatttcatctagggttggatttggaattatatgaaattaaaaaagataaaacaatgactcttaattgaactcattggccgaacccttgatgggccctaaatgattttaattttgccattttatttaacaacttatcttttctttcaccaccgagttggaagttgacgcggttcaacctgcgtagtatg

SEQ ID NO: 106653 - DNA, 588 bp, Cannabis sativa
  modified_base (220)..(225): a, c, t, g, unknown or other
  modified_base (319)..(335): a, c, t, g, unknown or other
aaccatgaccggaccataaagctaagaacggtttggttcaaccggaccaccaacaacggtccctccggttacggtttagaatggtttggattgtcttggtccggattaaatccgcggtttgccggtccacatgaacacccctaactaaggtttgcatgtttgatagctattctaagtgattaagagtggaccatcccatggtcattaagataagaaagtnnnnnnttcaacaaatactacttttttaagaaaatgactaagtctgaaaaacaaagtagcaaagtagaggagataatttttcttgattccaaaagtgttnnnnnnnnnnnnnnnnnataagatggtcccactgcctttgttgtcttgtcacaaccgaagagaacaataccacttatgttcttagacagaaagtcacggtaccttgtcgtagtgggagggtatcaaggaactcaccctgttataacttgagagacacttgtgattaaaatccactgttagttgaaacaagtaattgatagtcaaaaaaaggaactaagaagtaaagataagagaactatggttgaaaccattcatatggagtaaccaaaa

SEQ ID NO: 106654 - DNA, 579 bp, Cannabis sativa
  modified_base (278)..(289): a, c, t, g, unknown or other
actcaaatcggtattggaacttgggactcgaatctggacccagggcttggtcaaaacctgtagtcggtgtctggatttgggacccagccaaggacccgaaacctgataaggacctgaacccgcatcgggacctgaacccaataccaaacccaaaactggacccgaatccgtaccctgtgaccaaaaattagaaccaaaaccggaagttgaccgggactagaactaggaattggacttggtatcataacttaaattggacttagatccagaaccgtaannnnnnnnnnnnccggactccaaatcagacctacaccctaattgggtgtcggacccggatcccaacccaaacctgaattcgggacccaagcccgaacatgaactcaaacaaaaaaatggaaccagactagcgacacaaaaccaggttgggaaaaagaactacaccccaatctcgatcgtaaacccaaactcagaaatggaacttgggacaagaaccataacaagatcgagacccgtggcagtgatccagatcttgactcgggattcgggtaacggggcctagaacagacccgtagtcggtgt

SEQ ID NO: 106655 - DNA, 543 bp, Cannabis sativa
gtccaagagatagaggaacaggatgatgtccgtcctagcagcccttccggggcgaaggaagaggaggaggctgcacctcaaaattttagggaatacaacgaggctggggagccagtagatgcggacggtgatgtcctggttgaaggagtggactacgtcaccgaggagcttactgctgcatttcctcacaggaggcaaggcgccttaggtgccaggtgggtgagccctctgtccaaagtaactgcggcacgcttaagtgacttggaccaatctagctattctgggtcaactagaatgttatgttcctgcctcaaaccaccgagccacaaacccgaagaaagggatgtgtgcctgttcgggtgctcattccaaacaaggggcaatgctgcctttacacccgtactttaggaaggtggcagacttcttccttctttgtccgatccaatttaccctaagggcatcaagtatctgtctgccctgttcgtcctctacaccacccagaaatggggtatgccttctccgcacgaggttagctggtttttt

SEQ ID NO: 106656 - DNA, 549 bp, Cannabis sativa
  modified_base (65)..(66): a, c, t, g, unknown or other
atggatatgggggatttaagacccattgcgttatgcaatgtgttgtacaagattgtgtccaaagnngttgctaatagacttaagagtgttacgccgtctatcatatctgatactctaagtacgtttttgcaatgtcggttgatctcggataacatcatgattgcttacgagattatgcatcacctaaagaggaaacgaagagggagaaatggttatatggcactcaagctagatgttagcaaagcctatgataagcttgagtggggttatctccgggctatgatggtaaggatgggttttgatggttgctggattaatttagttatgcaatgtgtatgttctgtttcctataccatttcacatggcgggaaggagttggggcccattatttctcagagagggttgcgccaagaggatcctttatcaccatatctgtttattctttgtgctgaaggttattctagtttattgcggagttatgaacaaagtggcttactcacagggtgtaaaattgcttgaggtgctccagtaatctctcatatgctcttt

SEQ ID NO: 106657 - DNA, 584 bp, Cannabis sativa
aaactatgtgttaaaatttattttactaagatctacatttactaacatgtatgttgattataacactataatctaacatcctaaatataaatttcctaaaataataaaataaacacatataaagttatagaaaaccttacattggtggcagcaaaatataatggctccttccgttcagatctgtaacccttgttcctttctgtcgcagagtatcaccaagatctgaacctaggtctccttagatgatggaattcttcataatcttccacactatatttgagtattgatttgaaatgtgttggcaagcactcactcactatagggcactcgaaattatgaagaagaaggagaggatgattttgaaatatgagaggtctctttatttttctcagttgtctaacaaagtggaaaactagggtagaaaatgttaaaagttattttaccaagatctagatttactaacatgtatatttgattatattttataatctaaaatcttaaacatgaatttcttaaaataatgaattaaacacatataaagttttagaaaatcttacattggtggcagcaaaatattatggctc

SEQ ID NO: 106658 - DNA, 514 bp, Cannabis sativa
tgggggtgcaacctcctcctcttcttcctcctcggaaggactaccaggacggacatcaccctgttcctctatctcctggacctcagcatccccctcatgattcccctcctcctgcatggatggatcctgtttggcgctgggcaaggtggcatgctgggccacgtgagggtcagacacgttgtaacgccctaaataattaggcacactacccaagatacttatgaaaccctaatcccctaattgggattactaataaaattagcgctgaaatgaaaatttaattataaacagaattaaaataaaacttgcaataatttaaactttacaatctaaaagttacagaagttgggattcgaaaaacatttacaaaatattattacaagtcctttttctttcagcctgcctaagcggaaaaatagagtctaaaaaaaaaacaacactagtagaccccaacccgcctggtctgatatggctcggacatgtacattcttcgtccaacttctgcactcatggc

SEQ ID NO: 106659 - DNA, 745 bp, Cannabis sativa
  modified_base (673)..(682): a, c, t, g, unknown or other
atgctatatttttgtaagaaaaaaaagtggaaatcctatatttgtaaaacaacaataagttttggcgaaaaagttgccggcactgaaaaagttagtgtcgccaaaaaagttaacggcgccagaaaaatcgttataaaagttaccatcgacggaaaaatcactataagtaaatatctcagatataactaaaaatataaccgattatatgaataaaaattaataacttaaatcggatataattgaaatattaccggttctgtaacataataaataaaaataaataacataaaataactcaaatcagttataattaaaatagacccggttctataacagtgttataatgaataaaaactaataatacgaaataacttaaaactggttataactaaaatagaaccggccggttatatatataacataatgaatacaaacaagtaacacccaataattcaaaccgattacaattaaacaataaaggaaaaatcagttcctaaaacactgaaacataaaaacaaaactatttctacaataaaaaatctcataacacataatatctcgtaaaatcgattataattttttttaaaaaaatagagatcgatttcaaaaaatattgacgcataaatatgaaaagaactatttctataacaaaataaataaatacaaataatannnnnnnnnnactcaaatataatataaagaaacgagttatatttatcaattagttaaaaatttaagacaaaaa

SEQ ID NO: 106660 - DNA, 823 bp, Cannabis sativa
aaaaaaaaaacttgtattatttggatatttaatgacaaaatcacatgttgtgaaaataataaaagggagtcaatcataccagggattgggattatgtcattgccttggtggagaagccacgccaaagctaattgaggagtggtacaagcatgtttggcagctagactggcaagtttgttgtataagagtttgttcttctccaaattctctccattgaatctaggatgcattgactgtgaaaaaccaaacaggttgataaagttttgaacgaaccatgtttatgcactgctaagattgaggtcatgcttgtttcaatacatgaagaagaagaactttgtttacttattattcatacttaccaaaagactctcatttggcaagctttctaaaactgcttttccaccaaaaaaaccgcgaccaagggggctatatgccactattccaataccaagttccctgtaaatagaaaatctaaacttgataaaaatggaattattttctacagttgcatcactaacgtgagcttatttgcacacaatcggattgacctccaatattagatagatgaatcaaagtccaaataatttatttacttaaattaagaaattgaagcccaaaccagcagtccttcattgatatgtttactttaatttggaataagaaacaacatcaactgagtcatattaattcaagtagcaccagtcaccaatgaaggcaaggcatcagaattgagaacaaacctgcaaagtggaatgatcccatcttcaatatctctactccataaagaatactccatttccaaggcagtaatgggatgaacagc

SEQ ID NO: 106661 - DNA, 694 bp, Cannabis sativa
atacggtttcacgaaattttaaatatttttatgatttttttaattttatttatagaaataagatttttttatgttatactcttgttaatttgttgttgattttttatctgtatgttattttttgttgttgttttgatgttatttaaatgttattttcatgttacgtttatgtagtttttttattattttcgtgttgtttctacattttatgaaaaaccgtaaaaatgtaaagaaaaactctttaaacgtaaaaatataatttttttttataaaaatgatgtattatgtgaatatcccttttttttattggttttattgtagtcataacaaacttgttgtaccaaggtccaaaaagtctttatataatatatatttaactttaattttgacattatctcaaaaaaaaaaaaaaaaaaaaaaactttaattttgacatcgaaatttgatttttcaaaaaaaaaaaaaaagaattataatctattttgtattttgttttaccgtgacaaattcaatgatcaaaaaatatgttgcatacgtcttaatttttctttacatgtgaaaaataaacatttagaattctaatttctgtatctgaaattattatattttcctaaaaactataaattttgtgtaccaatcgactctagtgataaactaaggttagtaataagtcgtgtcgagtcgtgtcagtatg

SEQ ID NO: 106662 - DNA, 851 bp, Cannabis sativa
  modified_base (245)..(246): a, c, t, g, unknown or other
catagtatatttaaaaatttattctaatattggtctatgcgaccatgtgcatatgcgaccatagtatatttcaaagtatatcttaatattggtctatgtggtcctgtgcgattatgtgcgactatgtgcgaccatagtatatttcaatataatcatttaaatacattgtatagatgacaataaattatttaactatattttctatgttatttcataaagtatgtatgtgtataaccatttagtannatttataaattataattaaagtatattatataattgtataattccaggtggctatttaattatattatatatatatgagattcaatatataaatcaaattattttataaaatatgtatgtataaccatttaaatataatccataaattatatttaaagtatttttataattgtatggtaattcaccattgaagtacattatataagtctaggtgactatttaataacattatatatatgagattcaatatataaatcaaattattttataaaatatttatgtataactatttaaatataatctatagattataattaaagtatattttataattgtaaaagaattttaccattaaagtatattgtataagtcttggtgactatttaattatacattttaaataactcaattattgaatgacatagtctaagttaatttttaactatttaaaaaattagagtacacactatataagtgtaatttcaaggtagagcaaagttaagttcttatcgaagaacataaaagaccatgatgatagtgtaaattcaaggtagtttatggtcgttcagagaaaattcaagtttttaaagtttgttgaagaacat

SEQ ID NO: 106663 - DNA, 511 bp, Cannabis sativa
ttttaggggtaaaattgtaagggaaaaatgttttaagtatagttttcataatgtaaaaaatgctagcatagttttagtgtactatttatttttaagcatatattgtcaaatttcccaaaatataactcatagtattttttttttttttgatagtgtgtagatatcattacaaaaatatatatatatctataatttatatttataacctttataaaagtgacaatctttttgttcttcctatattaaattaccaaaaaattcttatttctcactcttagtttattctgttgagattgattttatacaaaacatcatattatttttttaactaaattatctattatattaaataatttaatttgattcattaataaactaaattttattcgaaacatatttatatgcatataacatgttttgattgtattttttttctcaatatagttgcatgtatatatttatatctattctatataaagtgtgtctatataactgaaattcttggtttatg

SEQ ID NO: 106664 - DNA, 515 bp, Cannabis sativa
tgtttcatttctttgtattgattgtatcatcaagactagagtcttaagtggttcagtatattgccaaatcttcttcttccctaataaaaagaaaagtaataattaatgctatggccaccatatggtaccaaacatattgagtttaatatattttaatttaaaatagagaaaattatgtaaaatatgatttttttaaaaaaaaaattataaatatggaaaaattaaaaatttatttaatttatggctttttttttaatttaagttaattgtgtgggaaaatattttatatttataagtttttattaaataaaattcaatttttattttattaacttatgtttggaggtttgtaatatttttttttagaacaaatcattaatatgtgtacttttatattattttcttattataactgttttatttattttttatttgtttttattctatattttcattttttttcttactttaaatttttatttttattttttttcaaaaaaaaaaatctatattat

SEQ ID NO: 106665 - DNA, 547 bp, Cannabis sativa
  modified_base (351)..(351): a, c, t, g, unknown or other
  modified_base (448)..(448): a, c, t, g, unknown or other
atcaaattacttttgtttttattgtaaataattcaataattacatatataaatgtaaaattttctaaatactttattggaaatgctttaacggatagttaaaatactgttatgtctttaattgacttggctaaatataattagttagacacaataatttagcaggaatccgactccatgattagtctagttcagagataattttaaaaaattatttttagaaaatctataattaaaaatatttatataatttataaaatctgattttaaatataaatttttgggtaaatatcattttgggtcctgtgttttgtaaaagttaccaatttgactctctattttgttaaatganaaaatagaccctgtatttttcaaaatagtacaaataggacactgaactgattttttgtcaaaataaaatttaattattatccgatctaaatgtgttntgacaaaactgtttatattttttgtattggttcgtgtttgaaattatcttcaagttgattatattaaaaaaaaagttttcaaaaattaagctcagggtc

SEQ ID NO: 106666 - DNA, 541 bp, Cannabis sativa
cttatatttggtgagggttgtataaatatatttggtgagtggtagtaggttataaattcaaaattttaagtacttacagttaggggtgtattttggaccacattcaatatttttaggcttatccagatttaatccaattatatattggatgttaaattttaccatctgatctgatccaattagtttcgattatccaattgatctaacacctattgaatgttagattggatcgtatctatcaattgaatgtattaagtttatccaatattttagacttagtatgttttggatcagatcgcatctacataatattttaagtccagtatgtatttgattggattggatcaatccaattcaagaaaaaaagagtaaaatattaatgttaattttcatatatacatatatattttttacgtttaataatataaaatctaattactcttctaaactaaatgaaaatattaattagttcgattagatgttggatgtattagatttttaggcacttcatccgacatccgattcgatccaattggatatt

SEQ ID NO: 106667 - DNA, 2621 bp, Cannabis sativa
aatttaatataataatttttatcgttagccaatcgcaatacgacatgtcgagaatgtactgagcaccactggtgccttatagcaatgctccatgtatataactatatgtacaattaattttctcaataaccaacaaacaaaatcatcatgataatatattgaatataggttcacgtgcatggatttttcatctccttcatatctagattcgaggagccaaggccggaccggcatttgaggaactctaaaaagttgtttatatattaacattttgggaccatgtcctcattgattcattttgcatggatataatacttctggaccacctagaaatgtcataaatatatataatatacaatgaaaacaagaacttcgattagaaaaaagaaatataaccaaaaacaatactactcccgaaggtaataaaacaattaattgcagtaatataactattagtactaatttttgagattcgttattttatatatagagagatatattttcactctcatatatttattatagccaattaatgtttcaaacattatatccatatgattttccggtggaaattaataatatcaaaaagaacaaattatcattattttttttggaaaaggagcaaattaagatttagctagctagtacttgaaaatacctgtaattatttagtggctactcatgtaataatcttataacgacgtaatcaaataaataagaaaataactatatagtattatatagaaaacgattatatacgatcaatgtgaccattttatcattatgaacttcccaaataaatgaaggggagttaaagaaacaatttctgatttttccagagagtatacatatccaatatcccaatcaattatatacacactaattatcaaaaaggtaaaaagaaaaaagaagagaaattatgtgaagagaataattttgttctttcacttaagttctctaattaatatttaagctgggtatgaagaaagcaaattggtaggcacacaaggggacttcttccatgtcctagcatgcaatttcaaaatctctctagccctctcttttgtcttgcttccacaatcaacttgaagcaccaaacaaagctttgccaccactccaagctgcagcatttcttgcaaaactccactagtagccgaaaactttgaaatcgagtgaagaatcctcacagccttctcactcgccgtttgagaaaccctaagtatcttcttcgacaccatggctaatcccgcgctgtggtgtaggaactcagcgcggccctcagcgcagccgcatagcgtgtcaagcactgccatggccacctcgacacaccgccttttctctgaggagttagtctccaagagaagctcaatcaagactggtacagctcccgcttcaacagccttgattcggtttcttccccaagggcagagctggatcaagagctggagggcggctttaaaagctgccctcgaaacttgatcttggtccttcaaaacttggactaattcgacgaataactcgggtctcaacccgattattctcatggggtcagcaacttctagtagtgatttcaacaacacaactgcatgaactctagactcgcaagtcccacgttgcatgactttcgttaatgattcgactaactcttggtttcgagccatgagattcttgagaactgtttcggagagttggaggttgtttaaaatgcacaaggcttcgtcgctggctctagcgaagtggtcactaaacgacatgtcgttttctaattcgttgcaattgttgcctatcaaagaggctaagaagtcaacggcgccggcggattccaagcaacgtttgttggtttcgctttcggcggcgattgaccgaagtctccggagacatttgatctgagattgaggagatttggcatcgttgatgagtttgattatctgggtcttgttaatcggtggctttggagtcggaattctttcgattccgtgtgaagcgttcatggtacaccaagcttgtataagtcgtcggagagtgtggtttggggtcaaatcagaatcgggaataatgggctgtttggatactgggcaacactcgtttttcccggaaaataaccatttctcgatgctttctctgtcgtaggtgatccctgttgaaagggtcaccggatctttcatgatttccagtgagattgggcagatgaagaattgaggaacttcaatctcatccataataagtatagtaagaatatttagctatagtaccaaactgtttgtgtatttttgttgtagagaattatattatttttctttttggggcgttatgaaaagagaagtagagatgtgaatttgtttgaagatagattatagagatatgaagagtctttttatatatagagagagtaatgatattcaaattcccaaaagtcaaaacacggaaaaaggaagagatgagagagagagaaagagaaagagttattattacgacttttctaacctatcaaattgaagggctcaagaatgacaaactttaccaagtaaataagcacatgcaaattgatgcatgctcattcatggcctagtattacactttaaaacattaaaatactaaaatgaagaagaaataataaggtt

SEQ ID NO: 106668 - DNA, 993 bp, Cannabis sativa
aattccctaacaaattatttctcttcttctcattctctctctctctctctcattgccctaattccctagccgccatccccgtcgaagcaaccatcaccatccacgacaactggtgactaccgccaccaccaaccctcacaactgcctaccatcaccaccactgtcgaaacaaatgcacaccatcacaactgtcgaaaccacaactgctcatcaccactactatcgtcacctccatcctgattcaaacacaaccccataactcatatccaaacacaatcaaacaaacataaacacctatcacgatctcagttccaaattccacaaaaacaaacaaactccattcaaatctataagaaaaaaaatcttaaattaatcgaataattaaatctgtcaaaagaaacaaatgaaagagagagagaggtacgacagtgaagaagcttgcttactaaaggggcaagaactaagaccccacatctcgttcaggtgcaaagcaaaccctcgccattgttatcgttcaggtcccatacctcagaaattattctcatttttcatgtgacgccttaatgctaaggcacgctacagtaattttttaattatagtgctatctttgctagccaaaaaattttctcgaaaataatgtcaaattaaaacttttatattaaatactaaactttaaaatcttgacattaatatatacaaagttgggatcccatttcaaaaccttttacaacataatccaaaatacagatgttaggtcacacaacgactacaaaataaccaccccagatttctcgagaccgaacactctaggtcgcgccgccatgacatgtacaacctcatcccagttcaggctcactcctgttcagctttcgcctttccttcacctacacatgaaaccagaactgtgagtcaacaaactcagtaagaaaaacatataacatatcatataataccgacttatatctaagcgtccatacacatatttacaaggct

SEQ ID NO: 106669 - DNA, 1589 bp, Cannabis sativa
  modified_base (1522)..(1551): a, c, t, g, unknown or other
tttcgtgttattttttgaaaaaccgtaaaaatataaaaaaaaaatattctttaaacgtaaaaaatataaatattttaccaaaaattatatcttatataattatttcttatatattggtatcattatcgtgataaaaagtaacagtattgtggtgatatcaatgtcatcgcttctttaatggttaaaaataacaagtgatccaaaaataagtgtatgcagcatgttacacgataaactctcagcactaatcaacaataatagataagagtatatgcatacactaagctctaactagtaactatactatcttaattagagaaaccaaattagaaattaacccacgtagaaccacatgcgcgcatatgcgcatgcctagctctagctctagctccactcactacttttttaccaaatataataagctatgagaatcacatcgtcatcgatcatcataaattagaaatatctcatctctacaagacaattgaaaagccaaatttaagaaaagacaatataattatcatcataatagtaacatttgaattgattattattctattttgcctaaaaatgatgtattattctaattagtgacaaaaatggcatcattatgtatgtattttgtacgtggatattacatcctcaaaatccactttctcttcaacctttttcataacccaattattaataattttctccctagtggctagttgtatttataaattgacattatgtattaatgcacagtgttattaataatcttttattattatctcttaattaattttttagccaaacatttacatcagattttttttaaaaaaaaatttatggcgatatttattataattacaacactatcactgcaatttttttaaaaaatttcaaatagtttacgtgtcgaaaataaatttaaaattttgtaagcacgcatagtgaactctaaaatcatatacaataatgctaaaactatgaccaataccgttataaaaaaaattgaaaaaagatattccgacatttaatttttgacataaaaattaattaaaaaattataataggaaattataattaacactaacatcttcatattatcatccaaacccactttgttcaacctctttatggaccccattaattaccaaaattttcccaagctagctaatctattaactttatacacaacaccttccacaaaattataaataaataagcaaacaaataaataaataaaaccttctaattgcgattatgagatgaaggaagaagtttgtgtttctctccatcaatagcaaaaaagtaggtaacattatcactaaaaccaaacattttttttaacagtaaaaccaaacatttttaaacattaatcaaaatggtaatatatatatatgctaagaaaacattttagtgaacgcaaatttattagaaaagaaacgaaaaagttatgtatatatgatcagatttgatcttaaatattctacaaagataataatgtaactttatattagagttagtcccacattgnnnnnnnnnnnnnnnnnnnnnnnnnnnnnnagatgaatgagctactcctcccatagctaattggtttt

SEQ ID NO: 106670 - DNA, 1059 bp, Cannabis sativa
aaaacatacacttatcggaatctcgatcataatcgagactatcacaattataatcgttaactacaaacagtatatagtacttttcttaccccagtccagagattaagcgtgctgcaaagaccgcttagtttaaatttggaaattagtagataattaggatttaattataaaaattatttattgataattaaataattatttatgttgatttatttgaattcagaatgcattttatatgtcatatagtgaaatttcataattctgcattttcggtgcccagcaacatggaacgcggtgtatgactcagtagaatcacaatctaatattttagtatagcggggcggtattgttagacattgggaatgtcagaattggtcgggaattcagaatttcccaaactacccttagtaccctttaaattagttttgtgtgggcaagggcattttggtcttttttttgcccttttagtgttttgtctgtatgtggattaaataaatgaagtgttattgattttgattaattagttttggctgaagtaagtaaataaaatcattttatctatcattttacaaaattgaaaaaaaaaaaaagaaaagaagcaaaaaccattttctctcaagctctctctcttcggcccctctttaagcagcaaggatttggtgttttcctttgtaattcaagctgttttctcaaggttttagtaagctcaagttcttggtaagctttttgtaactcgttctttattttcttgaagtttatgaaatgagaaattttgcatgcttgaggatttggtggctttggttgttgtttgtgtttggtgttgagctctaaagcttaataatgtttttatatgatgattcaagcaaggttttgtggttgtttgttgattttaaccaagtttaagttttgaactcaaaacttggaactttaatggtgaattgtgtttctgtgtataggggcctgttttattgctttagaaatgatctttggggtctaattagcaggtctggaaagtttgaactggtttggggttggattggtcgagttatgaatttttga

SEQ ID NO: 106671 - DNA, 585 bp, Cannabis sativa
tctgtcgactcacaagtgtaggtaaagaaaaggcaaaggttgaacatgagtgagctctaatctaggatggtgtttgtacatgccatggcgacgcgacctggagtgttcggtcttgggacatctgagattttattttgtagtcgctgtgcgaccagattaaaaatatattttgataacattgtaaaagtttaaatacgagatcccgactttcgtaaataaatgtataaaattttataaagtttagcaatcaaatctaaagttttaatttgacacgatttttaagaaaatccctttaaaaagtgaaggtggcattataattgaaaaattattgtagcgcgcctaagtataagggtgttaaattttcttttctaatcactattggatcaccaccatccctaccataaccagaagtaggaagagttgtggtcctaccaacatttagagtcccttggggctcttgtagaaattgaaccgcaccttctgcttgaaaagccttcttaaccatctcagcataagcggtagtgtcattggtggatatgagtttcgcgttatattcttaaaaacgatcactctagattttacctt

SEQ ID NO: 106672 - DNA, 677 bp, Cannabis sativa
gaattctaacataagcttttggtaaatctagctaatattcaccatacaaggttatttaacactttctccatcataccatttaaccatatcttcacatatcaaaatgttgtgagtgatttgcttccctttaatgaaaccgctttgattttcataaataatagaaggtagaacttctcgtaacatgcttcaaattagcattgtggaaattttataaatcacattatagcacgtacaagcttataatcacttacagtattcggaaaaatagttttatgaattagagtgaatgtagtaacattgatttcttttagccatttaccagtatgaaggaaagaaagcattgagccaattatatgccaagcatcgatctttgaagaagttactcttgtaaccatcaagtctaggaactttattattaggaattaagaataaggcttgcttggcatcttccttagtaagtgtaatcattaatcaaaacatatgagcttgcatatatgtcaatcactttttcttcttgaacaatattatgtgttcacgcaatcgctaattatgagataaaattattcatcaattattttgggtgccccatttgttatcataaatttagtaatttttcccgctgaatattgacatgtagtaaatcgtgccccctgaacttttttggccgttaaaaactc

SEQ ID NO: 106673 - DNA, 522 bp, Cannabis sativa
aactgtgtagtcccatacctacacagtctcagaatcatccaacttgaccttccccaggtggtgtaagattgcacaacttaccccgtattttctcttacagatcacgggactactgactgtcacatagttattcatgattatagtaccgtcaacacagtagaatataatcatgattatatatttcaaagtttatatctcatgatttgtcattacactagatttagactgacatgataatcagcgataaattatatctcatgattttcagggcattggcaaagtatgctaggatcagatgtacgatgtatacatcagactgaaccgatattgaacttggataagatattataaacttaccgttatatctatctaattcaatatcagttagttgatcttaggtcaatagattttaatcctaatatggttaggttatacttgaatgtatcttctatgttgttcaagtttttcgttaaagctgaccaatggatcggcccaatacttacatcttaggaacatgatagt

SEQ ID NO: 106674 - DNA, 1950 bp, Cannabis sativa
cattatgggcaacaaaattataagatttgaaaataaacgaaaaattataacttaacaaaaagttagagagatgtttattgatgtacatagttaccaatactttaactgaaacaagttactttcagcgtcttgataatcgtttcagagtcactctcaatcatcacaaaatgatgtttcaacgaaatagctgtctccatagctaacaggcaagccgcaacttctccaatgagagggttagagaatttgaacatgtttgtcgctacccacaaaaccgatcatgtgtgatccctagccaaagccaccacacatattgaaccgtcaccaactttaacatcacagttgattctgatccaatcatccagaggaggggacggaacaagagactcaacagccttcgacaaggcaaataaacaagactcataatccgcataacaaatagagatagagtcaacataatgtttaatattactcaggtgtcttgagtgtatgattttgttttcatcaaataaataagtacaacactaactaataacaaagcttacataaattaattagtaattacaacacaaaaaattaaagtacaactatattttttattattatattattttattaaaattataaataaacacaaataatatatatacaaaaagtttacttataaatatattatttaaatattaaaattaatacaaaaaagatttagtggagtacatagtgtcacactaatattattgggacactatatacaatgttatatataagataacattgatcccactttaggctgctttgctttgcaacttcagagagttcatcctttcaacaaacactccattaaagggttattattcccttaaaaagagagaatcttgaagacttgtctttttctctttcaaaggcttttttgagatattccctgtaaaacatccacattgactttccaagctttcttaattctacacaaacataccttagaacattactcaaaacattaaagcacaagttctgaatttttactattttaatttcctcattaaaagttgtaaagtaatttgactaccaagtatagaagaagatcatattataattaagaacaactcaagtacagtaaaacaagaagagaagatgatcacatgtccatgagtgacctcttcccgaatttattcaataacttcacttgtggtggaagaataccttggtaacaaatcccacacaacaaacacaaaagaaatccacacacaaacgagaaaccgaaaaaaaaaactacaaatacaaaacagattactcatagaccacatcaacatcaatagaggatatgcagttttcatggtaattacattccaacttgtcaacaaacatccaatccagcagtatcagaaacaagatagtaaccgaaggagcagcgcgacactaggccaaagacatcaacaccagcaccatcaaaagtcacacaagtctgtcccaaatgacaccaatggctcctcagtcctcacctcaaaccaactacaagagagaaagaaaaattaaaaagaaatgttgtgtcacattattataccaattctaaagtttcattgcagagtatttttcaatgaaagtatttttatatttgatattatatttgcatgttaggtgaaataaattgaaatacaaattttatgaatagaaaagtacaattcgtagggctgacaaagaaaatttagctggtgaattaaagagattcaaaaattatgagttacattcattcctacgtagggatgcacattttccccatggggatgggccccgcggggacccgcccttaatggggcggggattccccgtctaaatggggaacgggattaaaaacggggcgggaacggggatgatactccccgccccgacggggacccgtttaatttattaattatttttttattaatattttatattttatatatgcgtttgtat

SEQ ID NO: 106675 - DNA, 931 bp, Cannabis sativa
gacccagctcatgacccggcactagaaatggaacaagactgggacccgagattggggtccggatctggacccaaggcttggacaaaacgtgtagttagtgtttggaattagcacccagccctggacacgaagcctcacaaggacccgaacccacacccggagcggaacccagtcccaaacccgaaagtggacccgaactcgtaccctgtgacccaaaattgtaactgaatcaggaagttgaccgggactggaactaggaattggacttggaatcataactgaaattggacatagatccagaaccgtaactggacccgcacccggatcccaacccaaacctggactcgggacccaaacctgaacctgaactcagactcaaacatggaaccagactagggacactgaaccagggtcgggacctagaaccgtgccccagtctagatcccgaacacaaactcaaaaatgggatcagggacctggacaagaaccagaccgagacccgagatagtgatccagatcttgactcgggattcgggtaacggggccttgaacaaaccagtagtcgttgtctagatctgggactcaaactaggaccagaacccagacgaagaagaaaacttgaaccaagacctagacctaggatccaaaattagaacctgaataagaagcgtcgaaccaggacctagtacaagactatgaccgtgaccaggacccaaacccagacgtagaaccgaacacagacctaggctcagacccaaactgagactggaactggggcccgaacacggtcgtgtacccaactctgaactcagacccgggcctagacctaaatgttggaccagatcccaaacacagacttggacctagatagagattcggatccgaacgtggactcggaccaagacctagactgggatcgaaatgctagacc

SEQ ID NO: 106676 - DNA, 579 bp, Cannabis sativa
aaaaaaaaaaaaaaagaaagttttgaagtttaaaaataaaaaatcctagtaaactctaccccattgtcctatcaatcaatatatataaaggagtgttttagggagtctatgtggcaacaccaatgagtttctttcccaatttttaattttctcaatttttctttcatttcaatagttaaaattttaattatcctatttaactattatgaggtcttagggagttgatgaatagttatacatttttatgatgtcttcatgaattgtaatgaaaagaaattatttacatctttatagtattttgtaacagtaaaattaattgtattaattcttccattaaaagaaagttatatgtgttctttaaacattctttacatctccttatatataaaaacttttctctaccatatgttgtggtaattccacccaaaagataatggaatgtttcatatatatcttacatatcttacattatataatacatatgtatatatatattgtggtaaataatccactctaaactaaaccagtttttatctccaaagttgttggaaaatcagttaatttcagttaagttctttc

SEQ ID NO: 106677 - DNA, 552 bp, Cannabis sativa
  modified_base (373)..(373): a, c, t, g, unknown or other
cctattggatgccgagtgtgagaacagcatgagacaagacaggttacacttcatgtctgatcaacatgagtgggagtagattatcgtatgtgaggacaatatgcgataagatactgtgttatgtgcgtgtatgtgtgtgagtatagcatgcattcagtttataatgtgacatgatattatatcgtatgtgggaataatgtgtaacgttacatgtgatatgatatgttgatatatgtatgcaagcatggtatgaatcgatttaatgttgtgatattgatatacttatggctatgctatctaattggggggctatgtcctacatagctctttttacaaggcgttagttcacgggtactctgtgtgcaggtagagncaaaactaaacagtgaggatggcgagctcgaggtgtggtttacatgttaggagattatcatgatgttttggtttaaaaatatttcgttgaagattatgattcaaataaatcttttgtaaagctttatattttaaaatttatgaataaattaatgttttgttttaaaaataatgagatct

SEQ ID NO: 106678 - DNA, 566 bp, Cannabis sativa
catttctaatagtaaaaattttagtggatatgttatgtgataaaatattgagatgttatacgtactattaaagagaaaagaatatcattttagaaatttgcatgcatactatgttgtagcattgatgctagctattcattttttcgaataaaaaattaaaactaaaaagttattataattatagtttaaaattaaaatatatatatattaaataataatgtgtgagtttataattatagcattttttaagagtgttatacattaaattatttttagaagtaaaagtgctaaaaataatgtagcagagagataaaataaaatattatatttttaaatgatgtgtaaatttttcgcatttttaaaaaatactatcattggaaatgctttaaaaaacactaacagtgtctaacacttgtaatatagttattaaattaattaaatatggaatctcacataatttaaaaaaacaatttttagctataaatcattggtcatcaagtggtaaggaagtttagggtataattttacttttctactaattattattttacacataattagctgtt

SEQ ID NO: 106679 - DNA, 522 bp, Cannabis sativa
  modified_base (103)..(118): a, c, t, g, unknown or other
gatcttagaaaatgggaaactcaacacaagatcagaataacagctggttagcaaagaatcaatgtgtaatcaaaacttaccatttttacctcaatttccatannnnnnnnnnnnnnnnaactttccttccaagtttagatacgcacaatagggaaaccaaactaaacataccagccaaaatttataggaaataataaaatatttttgtcaattaaatatgccaaaaatagaattaacacatttattgttagaattttcattcttatttgcaattatttgtttatttattttaatgttcattttaatattgttcattgttaagtaaattttcgttaactaatcaataaattttttttataataaatgatctttaagattaattaagtaataattaataataataataataataataataataattacaataaatgataaaaggattttacttagttttaaaaattctgagtctgttactgctcttaggtcatcgattattttataataactgacactataggg

SEQ ID NO: 106680 - DNA, 775 bp, Cannabis sativa
gatgctcacgacacatgactggaagtaaaaagttgctggttaattacaaagaggaaaaggagggggctgtgaaatttggtgatggaaataagggaaatattgctggtaaaggtgatgtaaacctaaatggtgtggctcagttaacaggtgtcttgtatgtaaaagggcacaaggccaatctcatcagcattggtcaactgtgcgacaacaactcctttgtaagtttttctaaaactcagtgtttagtttcaactaatgggtgtgttgtcttgataggaaacatgattgtagattcgtgctatgcagtatgcaatatcatcatgtgcaatcgaaccttcctggataaaccggacttgtggcactacaggctggggcacctaaattacagaaacctctaaagactgatgaagtttcaagcagtaaaaggaattccagagatgaaagtatccagggatagaatttgtggaccatgtcagtaagggaaacaaattaaggtatctcaccctcctatcaacaaactattaacctcaagtgtgttggaactaaagcatgtggacttgatgggacccatgcaaaatgaaagtctcattggaaagagatatgtaatggtccttgttgatgattattcacggtacatctgggttgagttttttagagaaaatatctgagacctctggactattctcatctctaatattgaactattgtaatctctcattgaagatcagttaataaagattctctaaggccattattgtggctgttttctggtcga

SEQ ID NO: 106681 - DNA, 1078 bp, Cannabis sativa
tggaattcacattgtataaggatcgatgtcattattttataataatcctagcttttggctctttggagcgctggtagtgttttcttagacttaatcctcaaaaaaaaaagaaaaaaattcttgtaactaaaatattcattattttcactagtaaattgtggtaaaatctttaaaattttaatcttactaggaattaatcctcaaattttattttttggtggctaaatcctctaattgaaattttgttagcaattagctatttcggtctatttttggttatttactgccatgttgaattatgtggacacattacacttgtggcacaatataattggtccacataatttttttttttgaaaaaatatttacgtggcacaatataattggactatccatgtggatacattatattcgtggcacagtaacgaactatatgtgaatattcattattttttcgagtaaattgcggcaaaaccctcaaaagtttaatcttgctagcaattaactcttaaatctcattttttggcggcaaaaccccctaaatcaacattctgttagcaattagtcatttctatctattttcggctattatctgtcatgttgaactatccatgtagacacattatacatgttgcacaatttaattggtccacgtatatatttctttaaaaaacaattaaaaataaatttttacgtggcacaatataattagactattcatgtggacacattatacacgtggcataataactaactacatgtgaatattcattattttttagagtaaattgtggcaaaatctccaaaagcttagttttcctagcaattaacccccaactttcattttttggcggcaaaatcccgtaaactggtattctaatagcaattagccatttttatccattttcggctattaactgccatgttgaactatccatgtagacacattatacatgtggcacaatataattggtcctcgtaaatatttattttttttcaaaaaaataatttaaaattaaaagtacattattttttactttctccttcttcttctttcttccttttcttttagagaaac

SEQ ID NO: 106682 - DNA, 569 bp, Cannabis sativa
aaaaatatgtataattttgaatgtaaaatattttttaggccttcaggctaaatgtgccctaagaacggacctaactcaccttaactcaagctggaattttgccaaaagagaaaaggcattaagttaatttttttttttttttggtgtacttgtcgacgagttagctatatagtctaagtttaaactaattgcaaattaatattaaacataaattaagaaaaaagtaccaaaaataacatacaaaccaacaaaacttaaagattaaccactaatattcaaaagaataaaacttgccaactacttgattattaatttgagaagatgtgttatatattcaaattgatacattaattgatttaatacctaagttatcataaaagattataagttgttgaattttgtatctctaatactagggtcacctatcttaatcatttaatgagacaaatttacttttgattgaacaaataatcaattatatatgtcattacaaattttttctacttttaattataacaaaatttgtaattaaaaataaaaaaattgtgactaattataaatcactatag

SEQ ID NO: 106683 - DNA, 1480 bp, Cannabis sativa
  modified_base (83)..(89): a, c, t, g, unknown or other
ataatacaaatatatttcaaaacttaagatatcaaatgtatattacatttttatatataattttttttacatacaatttaaannnnnnntaaatatttttttatacatataatttttttttcttcctttgaatttgttattttctattttatttatattaatttggtgttggatatataaaataaaaataattttttttattttattgctagttatgtaaaaaaaaaaaatattttttcataaatattaaataatttaatataaaaaaagtaatcaatctaaaataaccgatccaatctgtacttttacagattgaatttgattggatttgagctattgtgcagattggattaaatccaaaatatgaaatccgcacttaatgcggatcggatgcactatgagcaaaatagtgcggattagattggatgaattcctctactcttgtgttttatctaaatacagatttgaaattttatattttttataatacttatttggtaccttatattttaaaatcatacatattttcctaaactcaattttgattgataaagttttatcaatacgatcaatctctcatcagttatatgaagttgaattcaaatttaattattgaagagtttttggcggttaaactctcttaactattgtttcacttacacttaacctttcaagttcaaattttggaggtaaaaccctccaaactactaaaccgttagtaaatttaaggtatcatccgatcaactaccactatggactagttatgtgtacacttttatacacgtggcacgtttatattggtatatctaatattattatttaaaaattatttcgaaatttattttaaattaaataaaattataaaaaataaaaaaaaaatattataattttcttatataatttttaaataataatattaggtgtattaatataaatgtgtcatatgagtgtacacataagcaatccaagttggcagctaactatgaaaaatagatgacgtacactttaaatttgctaatggttttgtagtttggagagttttactaacaaagtttgagattagagggttaagtgcaagtgaaatgatagttaagagaatttagccgtaaaaaactcattatttaattatatataactgaaatctatttggtcaaattaataagttgtattgattaaattatactttaagatattaaatatatacaatttcaaaatacatgatactaaataaatattgtcaagaatttgatttggcgtgcaggtacgcagtgtctcccaaccatgtgtcaattgcttactaagcgggtggcagttagtgcgttatgtcctgtgtgtgaacttgaggaggagactatccttcactgcttgtttacttgccatcatgtgcatctttgctgggatagggtagggataggaactcagatacctgtcaatcataattttttaccctggatggatcttctttttgagaagcttgagg

SEQ ID NO: 106684 - DNA, 521 bp, Cannabis sativa
  modified_base (129)..(130): a, c, t, g, unknown or other
  modified_base (227)..(231): a, c, t, g, unknown or other
tgacaaagtttctcagccatatttcctgatttgatgcctcataacatgctacgaattctgctgccatagtggaagaagctatagtgtctgtttgatacttttctaggatatagcttctccagctaacannaaaatgtagcctgatgtagactttcttctatcttggcatccagcgaaatcagaatcagaataccctacgacctctaaatgatctgacttcctgtatnnnnncatgtaatcttttgttctctgaagatacctcataaccctcttgggtgttatccaatggtccataccagggttgcttaaatatctacatacgcaatatcaagacacgtacatacctgaagatacattagactccctacaactgatgcatagggaatctttttcacttcctacatttcagggctgcttttagggaattgactaagactgaatttgtctcctttagcaacaggggtatcacctggtctacaatcttgcatgccaaaccttttgagtactttatcgatgtagct

SEQ ID NO: 106685 - DNA, 915 bp, Cannabis sativa
  modified_base (351)..(370): a, c, t, g, unknown or other
tcctcacttgagtccatataattctcacaagttggatttcaagtctcaaccttgtagatttttgggctattctcctaacagggaaaggtaattgtgattatatgcttcaaaagattatgtcccatgattcatcagtgtactggacttacactgatgtgatagtcagcgataaagtttacttacaccttggataagtgttatgtcatttccagggtattggtaaagtatgctagtatcgtatgtatggagtatacactggactggaccgatattgaacttggtaaagatattataaacttaccattgtatctttctaagtcaacattactggttgatcttagatcaaaagannnnnnnnnnnnnnnnnnnnggttcgatctcaagagtgttacttatgttcttagagttgttcgttaaaacctaccaattggttcgggtaacacatacatcttgggaatatgatagtataatttagtaggagcgcaaatcataaataaggaatatataacttctatctggacataaaagtaaaatgatgatttccttcgagcttggcttaatagagataaatggaagagctcttatttcaataattatattagtttactgaaatattatttattggaagttaagtattttaagtatgaaatacattgaggggtagaacggtaaatttgtctctactcgatgtaaatcatatatagatgatctttgattatttggattagaacgaagaataattcataacgtatctatatcttggaacatatagagcgttctatataattaacagtgcaattttgaatctatgtggcgcaaggagaaataaataagttagagaatttacttggtaaattttagatttgcttattggaagcctgattatatagccccatgatccccacactagttgag

SEQ ID NO: 106686 - DNA, 1096 bp, Cannabis sativa
taataatataattcctcatttatttataattactagttagagttttgctaatccatttcctaattccaggatattacatgaatgatacattatgcgatgtatagaaacacttacccaatatgggctcttgcagaatatgcacaccaattacttacattgtaattatttaaacaatgatgatgagattattatatatgtacccttaagtagtactacaaactttattatccattaaattaataaagaatttatgtataaattattggatgaaaataatttaggtttgcatcactttaatgagttcttatgcacattttctacgccttaagaataaaacaaaagaactaaagcatacaatatcttcaccttttatatacaaaagtaccaaagaaccaaagcatacaaggcattttgtttaccttttttaaagaatgatgtttacctaaaaagtcatccaatattaggtaaacaaattgccttaaaataaggtaaaaaaaagcatgattttttttaggtaaacaacatgtgttaatttaggtaaataacgtgtctaaaataaaataaacagcatgcttaaaataaggtaaacaatataccttaaataacgtaaactatgattactaccctaaaacatatattatattataatttgtctaatttttataaataattacatacataattgatgacaatgttgttttaataaagtaaaaggaagacatgaaacaattgttgaaatataggcatttctctaaacatcgcatatgaaaaaaagttatgttcttacaattctgaaaccatatagtataaaaatgtcaatattagctcctacaaagtaagcatcataatatatttatatcatcaaaaacagaaatgcaaaccaaatgtgtaaaaaattaaaatgaaaatgtatgtctacagtcttaaaaagtgttgtcaaatatttgatttgattatataatgatctcaactcatacataaaacatgttcagcaattacaatccaacaagaaaataaaaaacaaatcaataaagctctgctatctttgcttcttcaactgatacatattattattaatttcaagtctaaaacataa

SEQ ID NO: 106687 - DNA, 826 bp, Cannabis sativa
attgtatcactttcaaataacaaacaaaaaaaactagcataaaatttagtatacgtggctcgcacgtagctttttactagtaaatatgaaatatacctacgacatattaaatttaaaatatatttataaatgtattaaaaatttaaattattttatctaatgggaatatattatccgtggccaattacttttaaattataattaaaattattacgatatacgaatcaatcagctaaatgagtcattatgtcacattcacacaagtgtttacagcacatataatcaaccatgaagtttgttctgtcggtacaataaaaagtaatttaccgcaatcactaattttaactctcggttataaataaatatttaagtgtcaaatcattattcacgtgttatttttttattagtatatttaaattaatttttaagtaaacataaaaatttaatgatgtggaccaatcgtaaactgacacacatgactattcacttaatacttaacgattagatacctacaaatgttccagtgagaaacggacacagtaataatagtaaaaaaaagttagtttaacttaaatatatattttctatttaattaaataattatagaacaaaaaatagtaaaatgtcccctataaaataattataattttaatgtaaagtaaataataaatatttttataacaattaaacccctacaaatcaaaaattttggatctgtcacaatttcagtatacatgtttcaaaaatataacttaatttaaatatttatatgtaatgaagagttaaacttaagagtttacagtgcaaattagtttacactataatg

SEQ ID NO: 106688 - DNA, 654 bp, Cannabis sativa
  modified_base (420)..(421): a, c, t, g, unknown or other
tagtgtatccgatccgcactaagtgcggattttattttttggatccaatccaatccccacaatagctcatgtctcatccaatccaatccgcataaatgcggattggatccgttattttggattggttactttttaatattaaattatttaatgtttatgaaaaattatttttttttttcacataattagcaacaaaataaaacaaattataattatgtctccaacaacacattaaataaataaaataacaaatttaaaggaagaaaaaaaaattgtatgtatatagaaatgtctacttttattttaaattgtatgtagaaaaaaaattatatataagaatagaatatatgtttgatctattatgttttgaaatataatagtattatatgtattagagttttaaattactattttctttannttaaaatattatttgtatatataaatttttataaagatgtgtggattgaattagatcagctacttttacatgttaatcaacatccaatccacacaagtatggattttgaatttttcaatttcaatccaatctgcaaatatccgtactttacgaattgaattggatcgactattttatgaacacctttagtaactaagagttaaacttatgctacaaattactctactttactc

SEQ ID NO: 106689 - DNA, 917 bp, Cannabis sativa
  modified_base (745)..(754): a, c, t, g, unknown or other
aaaatccagaaaatgttaacactccacatgaggaaactaatcaccgtcctgggaaagagcccataggctctaagaggtctaccaacccgcggtccagacagaccacacgttccaggaggactcaacctgagggtggccccagtgcacggaccacacgttcccggagaacccaacccgacgttggtcctagtacgcagacaacacacttgaggagaactcagcgtgggagtggttagaatcccgagatgggggatgaagagctcaatcatggaggtgcccggtctataggagaaggtcattatgaaatggaaaattgccacctgagacgccgtttggaagaggcgcaacgtcgaaatgctgagttagaacatgatgcagcctcggccagggcggcacatggaataaacactcaaactcaacctaaacctagagtgaggagaccacgaggcagacctcttggctcacgaaccatgagacaagaaaatgcccaagaagaacaacccagggaaaacgagacaccccttgaaaatcagaacgaatagctagatgggagacaaccagaaactgatgaatgagaaatccctcatggcaatgaggaggatcttgggactcaactggaagaacggaggtcacatgccagaaatcactagcattcttcccaaacccatatagcgaggactcgtacagaccctgacgggggaaatacgaccaaccactcttgaggggaaagaacagagcgtgaagnnnnnnnnnngacttcgaggcgatcaagaacccacagtcgatcaactcaaggaggaaaaactactcaacgaggtaatgatcaagaaagtatgggaaccagtaaatccgcgagccacttaaagacaaagtctatgagtaggacatgatcggtgagtaagacgaggtctgccagc

SEQ ID NO: 106690 - DNA, 563 bp, Cannabis sativa
acttacatcccaatataattttctcgtgcgcattagatgctagaggtcgttgtgtcaggaaaaagttccccaacaaattactaaaatattggaaatgtaataatttaattactatttatgtaacaaattatttaattaactaatgaattaaaatattgatataatttttcaaacagagcataccagcttatggggccatcaaatgtgtatcttgggttgttgcggggattttcattagcaaattgttcaagacaacctataaactaagaatgtagtttttatgttttgaaatacatgactgacagtgtcgttcgtgcaaacctcaaccgttatatacaagatcaaaaatctgtaagttttaattattaattatagtatttattataataacaaatattaatatagatagactaatataaattttttacttttttttgacagtttagagaaaaacatgcatacaattcaaaaactggattattaccattacaacgtgtaacgccccgatattttgccttattttacaaaaatactattttcatgcataatttgaaaagataaaa

SEQ ID NO: 106691 - DNA, 611 bp, Cannabis sativa
tgtcatcaacgaaataaatgtgagataacaggggcatttctacagataacaagactagaaaattctctagtggactctttaacacgaacggcagtagaaagcccctcaaccaccaacagaaacaaataaggggataagggatcccttgcctaatccccctagtagagttaaaaccttcagaaagacaaccattaaccaaaaatttaaatgagactgtggagacacatctgagcacaagggagacaaacctagaaggaaaaccaacatgcttgagaatggcttcgacaaagctccactcaactctgtcaaaaaccttctccatgtcgtgttcagagcagcccatcctagcttacctttcttcctacaattaatggcattaacaattttcttagtaataaaaatattatcaaaaatcatcctattagataggaaagcactttggttgctagaaatgatagtttttagaacaaacttaattatatttgttaaaaccttagcaaacaccttgtaaagggtagaacaaaggctaatgggtctgaaatccctaattctagaagcattttttctcttagggataagaacaatatatgtatcattaataagagagatat

SEQ ID NO: 106692 - DNA, 566 bp, Cannabis sativa
gactaataaaataaaggaccaagaaggacccattgaaggtgaaggtgaaggtgaagagtatgaaagtgaagatctgcagtactactccaattaaggacaactcattaatggatcagagttcttctacttctaataataaaccactaaacaatattactgtcaaagaggagataatatttaaagatgagtgtagtgttgtttagtaatactaattaatgcacacaaatatatattattggcctcctccttaattatacttttttatttttgtatgtattgagactttgttataatcacattttctttttaatatatagtactatataattagtttgttttttttttcttcttaattttaataattcaaatacttcaattgtaacgccctaagatttaggcacgctacccaatataattaagaaaccctaatcccttaaatgggattactaataaaataagcgcggaaattaaactttaaactttaaacgaaatgaaaataaatctgtaataattttaaccttacaaacaaaagttacatgtttcgggatcccaaaaatcattttaca

SEQ ID NO: 106693 - DNA, 722 bp, Cannabis sativa
attaaatagttcttacaaatattattattaactaacacaacttaaaaaatattataataataatttttttaaaaaaatataatagtaatttttagttctataactcaggtaaaaaatcatttcatctctcgttctcattgaactctggatggtttggtggctggcgcttgatgtggttgtagcggttgtgatgtatgcagtggctatagctatgatatatgtgatgattgtaacagatgtgatccaatgcggtaaaacaagaactaatttcacaaaaaataaataaataaataaacatgaatttatatacagaaatatatatatatacatacttatattatttaaatatatatatatgcacgcacaaatttatattcatatataaaaatacatatttccatatagtaaatacaaatatatatatactcacatactacatacatattcatatatctatatctttttttatatatatatatatatatacataaacacacaacatatacacatatccatatatatagatacacaaaaatatatataaatatacataaaatgtataaatatatgtatacgcacaaatatatattcatataaataaacataaatatatacatgtatatacagtaaaagtgtaaaacaaatagtttggaaaaaaaattaattttacactacaagaaattatattaatattggctgtattattcccggcggaacagatc

SEQ ID NO: 106694 - DNA, 624 bp, Cannabis sativa
tattatttcgggttgtattttttgtcggtttattcggtttggtttgggcggtttattcgggttgagcggtttgtaaattttattgaacacccctagtgctttggaataataagtggagaagaatgaagtctatatgttaagaccctctgcaaaaggatttccttcaaggcctcccatatgccccttaaccatgctcttctctgcaactccatcctctctttctctcacactctctctctcctgaattataaataaaatttgttgttggattaaactctttcttgaattggtgatggaggcgggaatgaatggtgttgtgttcacttgtctgttgaattactcttgtttaatgaaaagccacaaaatgatgaccggtgccggaggccgtcgttgaaaccgacttattgattgctttggtgagatttgatgtcgtttgatttgaaggagatgaccatggaatcgtcttcgctgccttcctccgtcgacagcctttgcctaacggagacggccgtgagggcggggatgatgaaggtgaagagcacgaagaaaatgtaagggggttctgtcgaagaaaaagaaagaaaaagaaaaaagagaaaaaaaaaaaaaggaaaaaaaagaaaa

SEQ ID NO: 106695 - DNA, 575 bp, Cannabis sativa
agccgtatatccattttctatcaatggattaaaaatgtatgttaatgtatggaatttaagtttagtattctgtgtaaccccctggtattttgccttactttataaaatactattttaatgcataatttgaaaagatttaaaaacgcttgaaatataacagtgggttttagaaataaaaatgcaacagagaaggatccttcatttgtaaaataaaatacgataagcaaatgattttaaataatatatttccactgtgttagaattatcgattgcttaaaataaaactaaggcaccactggcgttctagatcgtttgcctgtccatagccgctcacagtatacgtaccagaactcaccctgctcactatacatacttccctgtctaaaacctgtagggggaaaataaggggggtgagctaaaagcctagtaagaaaatgcttattatacaataccatataatgtcacacataccattaatgtattattaagttttagcaataccatacaccttattttataaccataaccaaatgactgtacacatagaaacatttatcatatacgtccatactaat

SEQ ID NO: 106696 - DNA, 813 bp, Cannabis sativa
  modified_base (772)..(772): a, c, t, g, unknown or other
ttgagagccttttagcaaattccaacaccatttggcaagaaaagccaaattcatttcctttgttttcctaaaccctagtccacccaaagatttgggaaggcacagcttatcccacgcctttagatgaagaccatgatttcctttttcaaaaccccaccaaaaatccctaactaatccatcaaccctcgtgaccatactactcgagagttttgtggtttgcatagcatagaccggcagcgacaaacctacagacttgataagagtagctcggcctgccttcgacagcgttttagctttccaaccctgcagtttagaggtgagattatccaaaataaagttgaagtctgcatccttctgtctggatctgaaaaggggagacccagataatttatagcaccttccggagattgaatgcccaacgctgccttaatctcccttctcataccatcaggggtattattgctcaagaatatagatgtttttagtttattaactttttgtccagaccacgagcaaaatctctccaagcaattccagacacaattagcttcatttagattggccctacccaccaggataaggtcatctgcaaagagaaattaaattaataataagaatcaaaaagaggtaaattaaattatttcatttttcttttttatacatatttatattcatgcattcttctcttttttttttacacgtattttctgggatataatttgtcccgggatgtactttcacggaatgtattccgtggtacattagatgggtntcagggtacattaaatgagtgtcagggtacgtttctacttt

SEQ ID NO: 106697 - DNA, 960 bp, Cannabis sativa
  modified_base (169)..(176): a, c, t, g, unknown or other
  modified_base (320)..(329): a, c, t, g, unknown or other
  modified_base (622)..(652): a, c, t, g, unknown or other
  modified_base (846)..(863): a, c, t, g, unknown or other
tcccggtcaacttctggtttttgttccaatattgggtcatagggtacgggttcgggtccacttttgggtttgggactgcttttaggcccgggtgtgggttcgggtccttgtcagcgttcgggtcaagggctgggtccaaaatccaaacaccgactacgggttttgtccnnnnnnnnggtccagatccggataccaatctcaggtcccagtctgcttccatttctggtgccgggtcacgagctgggtcctacgttcaagttcgggtctgggtctggtactaggtctggtatttcgtacagctcacaaattttttcgttttnnnnnnnnnnttcatgctatttcatagaattaacttccgattttttgtgttgttttgtatttatatatttactattcatatttcaattgtaattatcagaattaaattaattggatttttttaaaattaatttaatgatattagtgtaatttgaacttgaagctaggtaaatatctatttttttgcttaattatctatcttattttttaaatttgattatttcatcttatttttaaatttgaggtcagatattaactttgtttttaaattattctttttttaaaaaaaattatttgaccttannnnnnnnnnnnnnnnnnnnnnnnnnnnnnngatattttgaatagatataagatatttttctaacttttaaattttgttatttttttaaaattaaattattaaatcaggaaagatatttattatcattattattttttttttgaatatttaatttataaaataacatgaatttaaaagatggttaacaaatttttaaagctatatttaggttagttgaaacctannnnnnnnnnnnnnnnnntttaattttaaattttttatttattttattttaaaaccgaaaaaatatttttttattatttattattatttttgatttttttaaattaattaattta

SEQ ID NO: 106698 - DNA, 524 bp, Cannabis sativa
tccgggcccaccccttaaatgggtcccttcaaccagcaaaaacatgtcaaggaatatcgtcactgcttctgcttctcctctgggttcctgcctatggaacatcaggagcttctcacggagtgggttaggatccctccttatgagcagattgcgcctactcagctcttcctccaacgggccaagaccttcaccacatatgacaagaaggaccttgatgtcgggttgttggtcacgacggagaattgccgaaaggccaagctgatcatggggcatcagtcggtggaggactccaaccattccaaggttatctgcccgaacgtaagggttccgacagcggagaagacattccgggaggagatcattgccacggaggaagataagtaccgagagtacctcttccggaagggccaagagaaggcttacactaaggcccaggcggccgctgggaggccccttcgtattgggaccccggttgagaggagggcccaggcagctgctggtaggccccttcatattggaagccc

SEQ ID NO: 106699 - DNA, 2640 bp, Cannabis sativa
aacctcattcatcttatcccaaattctaacatggtatcaaagccacttgtgattcgttgtaagcccaaagtgccaccggtccaaaaattcatttacgatccgttgtgagccaaagtgctactggtccaaaaagatacttctgctgtctctcctttaacctccatttgggacgtttcggccaatgtgtgctaatttccagtgttggggtctttgacctgtttcaaaatccacaaatttcccaacgtgtacactcacaaatttcccgagtgggatttttttaaatgtcatgttcggtcctgtggtctcttaaaggtcgttcattatacatacactttccaggtccaaacgtgaggagggtgtattagagttagtcacacattgttaatgtgtggaaataaattgacatatataagatgagtgggctactcctctcattgctaattagttttgagatggaaccttattcatcttttcctaaattctaacaagaattcctaaattgttatggaccccatattttttggatcgatatttctttagggtcatcttgttcatggtcagtcgtgctatttaccttttattctagtttgaataacatggttgttattactcaatttattttgagagatttttggctaatagttagtgatatgtttaatttgtcacttgttcatttaggttggaaatctggtattcttcatactcttttgatgattcacaactagtggcttattagtctttttgttgaagatgttattaggattttttttctcttatggtgaataggttggttagccattttttcaaaagagaaaaggcttggttagcttatttttgttgagtatgttgtatgagcgacatcatcatgtaatgaattttgtctgatttacttataaatgaatatctttatttttctttcaaaaataaataaataaacaaataaagttcaaaatagtatgttgaacacgtgtaagtggttattagaattctatttttaacactttaaattatttagaatttctagattgcttagtataattataatatacattattatgtaaaaaaattatatgataatttctctatataccgataatattttaacaataggagcaaaaataactcctacctaaaacttttcccataattatatagctataattttaagtaattataaaatatttttagcaaatttatctataataatattaatgtcacgtcaacattaaatactagatttcaaaatagttaattattatttgaatttaaaaaaaaatgaagaaagaattcttggttcttaatatcttgaaaaaaattgataagggaaaaattattttagtttcttatgattctaataaaatataaattcatatgcattctaattaattattttgattaattgctttgaaaaccatgagtatatttttacattataatattgtttataaaaatttttgaaaactaaatataataagattaagttaaagaaaaatgattaaaagagaataacacacgatttttacgtggttcaagcattaatgacccttatagtcgacgaggcaattttataagcattttttaatggagttcttacagctcaaacaagcatctcttttttttttgttatgtattttcaaaccctttgcatgaattctgtattgtcctatttataggaagataagcttaatgggtcagacgggatctagtatgcattagggtttttactaataaaatccaatgatggtgtaaaatacattgaatttgtgctttcttaagctgttgggtcggataggtgaggttcaattctaaaaagggatctgttgtacggtgcatggtactgttgacagtgacagttggtgtgcgagtcattgttgggaaagagaatgtcagaatatgggtgcaatgcacgaaaaggtaaccacctttttgtcttgagcctttttggcatctgacggaggggaaaagtggtcagattctttgggattgtgttagaggcgtaccacgtaaaaaaatatctaggaggttagaccatgtcagacaacccttttagcttctgttattccaatttttgctcagggtgatgtgtcatttgataagaatgacacgtagagagcatttccaaagcttggactggtgattttccttcaacggtctgtccaaatagttatatgtgaacttgattaagttttaaccttcactaggtattatccagacaaagcctatatgcgactgtcaaagcagtcctcaccatccattgaacccaaatacacagctgaaaaatatcttcaaggatatttttcataaatattcacatttatacctcaattagatccctatttttctaggatcacaagttaacagaaagattataggaaactaacttagtttcccttttttattcctaattgttttgggaaatttagtttgtatatttttccctataaatagtggagtcatttcattactttcggatccaaaatcatatgttcttgagagctattatgttgtataaataattttaagctttttctaaggattattgagaaactcacttggctagctccttgtgatcttgataattttttgaagtaatacaagtaaaaagggagtaggctatttgtaggatattattttaccagg

SEQ ID NO: 106700 - DNA, 767 bp, Cannabis sativa
gcatacagcttgtggtctcataaccgttgcaatactaatctaagatgcaactcatgttcctcttctaattcagaattaagatgtcatcgataaacacgatcacacacctgtccagataatccttgaacacctgattcataagatccatgaatgccgccggggcattggtgagtccaaaagacatcacaagaaactcataatgtccataccgagtacggaatgcagtttttgggacatcttcctctcgaatttttcagtggatgatagcctgagcgaagatcgatcttggagaagaccgtcttccccttcatttgatcaaaaagatcatcaatccgaggtaaaggatacttgttcttgatggtaagcttattcaactcccagtaatcaatacacatttgcagagactcgtctttctccttcacaaataatactggagcaccccaaggagagtagctcggcctaatgaatcccagattcaataattcttgcacttgtatctttaattctttcaattctgctggagccattcgatatggtgcttttaatactggttctgctcccggaactaactcaattacaaattcaatctcccgagtaggtggcaatcctggtaaatcttctggaaagacgtcaaggaactcgcacaccaatcttgtattctcaggttcagatgtcacaggttggctggtatttactacagtgactacgaatcccagacaacctctgctcatcaggtccttagctttcaaaagtgttattcttggtat

SEQ ID NO: 106701 - DNA, 971 bp, Cannabis sativa
tcagcagaaaggttccaacaagagaaaaagattcagatttgagaatctctggattggtgacgaagaatgtaagagtctaattaagaattgttggagatctgaggacaatacaccactgatatcaaccataaagaatatacaataatgtgcttcaaacctggatactttgcatcaaaataagtatggatctttatttcgagaaattaaagatacgcaagaaaaaagtagttcaaatgcacaatttgcaaagtaaaggatgttccagcgaaggatctcaacaatcggagaataaactcaatgatctgctattaaaggaggaggtcttctggcagcaaagggcaagggtccaatggttacaggctggtaatcagaatatcaaatttttccacaagaaggcaaatgcacgaaagaagaataatgcaattcaaggtaattatttttgtaaattaaatagagagtaaagtatagtttggataagaattttaatataattgaaattggatgtaatttacatgtgttttaattagggcaattaaaagattgaatagtttaactagtgatcttttcaagagtggctcagaacagaacaggttgaggaaaggtgtttcaaactcagatcattaagattaaggttatgtaataataattatgctaatatgctttaaaatataggttatgttcttaaaggtgttatgaatcaacttaaatagattaggattgatggatccaagttacatcattgaggtaaagtacatatagagaaaatgacgtataaaggaatatgagttgttagcccataagtattttacaaatcaaatgcttaaggttatttttggttgtgcattttaggtttattaaatgaagatcatatatggtgtacaagtaacgatgctataggtgatatcacaaaaaatattctgcactctttacattgattatgccaacaaatgaaagtattgaggagttgttac

SEQ ID NO: 106702 - DNA, 548 bp, Cannabis sativa
tgggtcatagtggacaaattcacaaaatcagctcacattctgccagtgaaagttacatattcagtggatcagtacgctgaaccgtatgtaaaggagatagttcgtctccatggagcccctaaatccactgtttcagagagagatccaaagtttacatcaaagttttgggtgagtcttcagaaagctatgggtaccaagctgaaatttagcacaacctttcaccctcagactgatggtcagtcagaaagaacaatttagttacttgaagatttgttgcgagccattgtcatggactttgagggttcatggagtaagtacttgcccttaattgagttctcctacaacaatagctactagagtaccatagagatggctccctatgagatgctatgtggtacgaaatgttgctcccctattcatcgggacgaaactgaagaaggaagtaattgggtccagaattagttcagaggaccaatgaagctattgacaagatcaaggcttggatgcttgcttctcaaagcaggcagaaaatttatgatgatccgaag

SEQ ID NO: 106703 - DNA, 839 bp, Cannabis sativa
  modified_base (421)..(422): a, c, t, g, unknown or other
ttggttcctggcagaatagtcgtgttatgaatcccctggctgtgtgcagaattgtttgcacaccaggcgcagtttcagtaataggagctgtttcaccattcaccacgcttcccgtctgtacaggattgacagcaggtggaacccttgactccttaggtcctgcaatgtcggatctagcgtctgtgaatttgctgggtcaaacaggcctctacgagtttgcaccatcgtgttgaatatcgaaaagagcgatctacaatccttctctcaatgaaagcaccaaaatgttgacttcgctattagccaacgacaatgagtctttttgataagcgataaacaatatgtcgtaatgaatatataataaagcaataataagatacaggaattttatagaggttcaaccccgagcagttcggtaatagcnnaatcctcgttatttgtattgactatagaacagggaagaagattccttttcttatagctcttacaacagtaactctgaatatataattcttagataatagtatagtcttagcttagctgcgtatcgacttataatctttcccgtcctttgcccagtgaacattcactactacaaaaggcgaaattcgcgacagccccaaaaacagtttttttaggcgcccgtcgctaaaaaaattatctgagtgtttaaaaccgtcgcctataatacactataggccacggtttttaacacttgtataaattaggcgacggttaataaatgtagagaaaaaattaaaaaaagaaatattacactattctcgatggtgtagaaccgtcgggcaaagtattaaccacagttttaaactgtggcccatact

SEQ ID NO: 106704 - DNA, 562 bp, Cannabis sativa
aataaataaataaattatttaaaaatgatttttttttctttttctttttccttcttttcttcttcttcgtcttctcactgcaccttaaccctaattctaacgagccaacaccagctgctgaaacggctccagaatcacagccccaacagcctcaatcacaaagattcgcttccctgacgaggacgacgtagctctcgacgccgagaaagccccatcaccgtatttttgggccaccgttggtactgcaaaatccttcagcggggcgggattctagcgagacaaggtggccatgggaatcaacagaagtaccaccaagccgcttagaggcaccgacgacgacattggcagtgatgggggagctccaagagttgaaggagcagtgattttctctttattaagtgttgctgaagtagtagccattgtcttagagtggtgaaactggtattgttgcttagtgggtattatccggttgagccttggggtaataagtttgaggtagagagaagaagatgagtgttacgaaaattatgtttattacgcaagtgtacgcaatcaagtagta

SEQ ID NO: 106705 - DNA, 885 bp, Cannabis sativa
  modified_base (54)..(61): a, c, t, g, unknown or other
aatacatatgcatactgttatactaatcttacctcaatttcgaattcaggtgtnnnnnnnnacctgagtggaacaatctgctcgacgaattatgaaattatgaaatttcactatatgacatataaaatgcattctgaattcaaataaatcaacataaataattatttaaatatcaataaataatcttcataattaaaccataattatcatctaatttctaaatttaaactaagcggtctttacagcatctgtaaactctcctagaatttagaagtaaatttgggatcacggtccaaaacaatcgactttggggcaccatggagccgaactatatccttgatgtacaaatcaacatattgatccacagtatatataggtcactcacataggcagaaagtgcgttgagttggtgaatcgtccactatcactcatattgaatcatacaatctagtggtcttgggtaaactcaccataaagtccatggttatgtcttcccacttccattcgggcattctcaaaggttgaagtaaacctgctggcctttagtgttatgcttttacctgctaacaggtgaaacactttaaaacatactaaattatgtcacttttcattcccagccattagtataattccttgacatcttgatacatctttgttgtccctgagtgtaaagagtatggggtagtatgaaactcatcaaggatttctctattgatctgatcacccattaaaacacaaactctatttttatgtctcagtagtccacttggtgtcttagagaaatcctttgtagtacttgcctcaacttttttcttgtgttcagtcaattctagatcacacatagcaagtcaagtactcaatcatagtgagtaagacggtggtaac

SEQ ID NO: 106706 - DNA, 870 bp, Cannabis sativa
aagatactgcgacggtttaaaatgtgactcaaccttctcaaatgtgcctttggagtcggatcaggaaaattccttggctttatggtgaaccagggaggaatcgaggctaacctagcgaaaattaaagctttggtggaaatgcgatctccgaccaaaccaaaagaagtccaaagccttataggtaaagtcattgctttgaatcactttatatcgcgatcctctgatacgttcaaagaaggaaacaagaagtttcaatggactgagaagtgtgaagaagcttttcaggccctcaaatcgcatttggggcagcccccaattatttccaagccgatgcctgggaaaatcttatccatctacctcgtcgtgtccaaatatgcgattagtttggtactaatccgcgaagaccaagggaaacagtacctagtgtactatgtcatcaagcgtctcttagacgctgagactcgttatccacagatggagaaattgccatttgccctggtaacaacgtcgagaaaattgcgaccttacttctaagcccatagtattgaagttttaacaaactaccctttgaggcaagttttagcacaaccagaggcctcaggtagattattgaaatggttagtggagctaagccaattcaacataaaatataaacctaaatccccaattaagggacaagcccttgtagatttcatactcgaatttccaagcagcgaagtggcgattatcgaagaacgagttaatcctgatgtaccaaataatgaaggatggagtttgtatgttgatggagcatccaatagcgaaggctcagggggtggtataatactcataagccccagtaattttaaggtacatgctgcacttagattt

SEQ ID NO: 106707 - DNA, 543 bp, Cannabis sativa
acttggaaggtgcccagattgacagattgtcaacctgggcggtgggtgttcggggccccgggtgctcataactcaacttgctctaattttgattctaatgcctcaaatatgtctgtggtatatctagttgatgtcccaatgcaagttttgatccttttgcactaagatggtcccaaaaactgaaaccctagttaaggatgtcaacctgggtgttgagtgaaatcctaggtgcccacgttggctttcaagttgtaggttcatgtaattttaactctcggtgcctaaattaggttgctccatgtcttcatggtatataacactaaaagatagtgggttagattcaagttattaaagttcgaacttccatcccagagatcccgaagtcaacctcagcgcagggctagggtcccctcccaggtcgactgttatgacttgattctactcaactttgtgacgccattcttcataccacatgtcaaacattgatgtccacatcaccagggaaagtttctaggttaaaattttcccccaagtcaactttac

SEQ ID NO: 106708 - DNA, 504 bp, Cannabis sativa
tcatgaaagggcatttgtgctacattgtcaactgtcaggatcatagtgtttaatttaggtaacacatcagttgccaacacctccaaattcatttttggaacgaaggtcccaacctcgctacgagtatccttattagtacttggtgtaggactaggatcgatacacacattgttcttcaccaaagtcacaaataagggagtaaattcatatagcttctttgcaagcatagacaaaataaccttaaatgcttatcatttccaataacttcagggtgatacagtaatcctttattgtacttttaatttcaaggcatactgcactttttcaacatcgagttattcatacaaaagatcaaccaaacgtgagtaggttatgttcgtatcaatctcgaatgttaaattttcagctcgattataaacccaatctctatccttaagttccgaaacactattatacataacaaacgcaaatagttaaacctgtcatccacaaacattaaaaaaa

SEQ ID NO: 106709 - DNA, 2352 bp, Cannabis sativa
  modified_base (398)..(400): a, c, t, g, unknown or other
tgagtttgctactgctgcctggaatcgcagctcgatggatgttggggtaggctctgcaacatttagcagctggctactgctgttattcggcaggggacgtgttagtgagatggaggaagcggctatgatgagttgggctatttggcgtgcaccgaatgattttctttggcaacacaagaattgggttgcatcaaatattgttgcatcaacgaaaaacatgcttgatcagtataaatgtgctcaaggtaaaaagggcctttctttgtctcctttgaatgaagggggcgacattctgagcattggaatgcacctatgttacataaaatcaaagttaatgttgatggggctttgtttgatcaggagagtcagtttggtgtgggttgcgtagctcgggatcnnnatggtaatatgctagaagctttcattaaggggaagattggccgggttcaacttgaaattacggaaataataggcatcaaagaagctttaagcttaaaaagaagtattatatgcaatccatcttaaagaatcaggcaaacccaaaaataatagttataatttatgaataaaaattaaaattatattaatgttacttcaaaaatataataactaaatattaacgtttaaatattctaaatctaacttccataacaactttaatgttttacataattctttaaattcactacaattatcaatatagaacaaaatatataattttctaaaaaatataaatattatcataaaaatgtaacaaaaaaagacagtttgaagtgttttgttacgcaaaatatttgaaaccaaattcttcaagaaacttttctaaattttatatattgatgataatccagattaaaaaaaagattgtgaggttaatcaagactctcataatcatatttttttttttattgttcgattttcaaacaactcatgcatgttatttatttttagtttgataatgctatttggccgacgtcttactcagttacttggattggctttggtggttgaatgatcactgagcttacagtcttcttcagtggaatgttgcaactatttgtactatattgcgaattgcggtttattttatttagtagaatctaaatacttatattttgagcaaaatgtttttataattccttaagtgaataatttgattagagatgatcttaaaacgagattatattaataggagggatccttttaagagagaccaatatatttttgatattatttgtaatatgtaaataaggctgttttactctatttcgatcaataaatttttttgttataatcaaaaagagaatgtttttaaaaatttataatttattatttgatatttaataatgataaagaaatgaaagtagagagagaagacactttacacttttaggtagcacccatcaaaatagccaaaaacacatgaaagacaaagtactccaaaatacaaactggaagagaagaattgaattgaagaaccaaacgaacaaggaagaggaagagtatgatgaccaatacaaaaaaatggaaatggtggcattcacttactgtgacagagataggaattgaattggccttttatttcagctatagctttacctgaacatcaagatgccataggtgtgttcatactttatatgttattattatttaaaataaaagagtaacaaaaatagaatagcttttgttaagtctgaatttgtgttataaaccaaattttagagtcttcatctcaaaaatttgtgtgctctacaaaattagtgtttcacttccatttttgtccttgtatttcatcaatatagtcattttgtttgttctttagaaagtgtttttggagtagtgggtaataaatattaaataaatattttatgtttgggtatagggataaggttatgtttaattgggtttggtgtatattctagggttggataactattcctctatataaatatcatttttgttctcatttatcattatttaatacaataaagtctttttcataatagtgggattcttatatctttcttgtgaaacaatattggagccaccttttaatctcattcttatatcaatttctacgatttgtgaaatcttccatccatttgaaaataaaattccaagttcttttagctatacaagtcaaaatttctgttctaccctttcttatacaaccctcaattaattttgtttccatatgatgttgtaccatgatgagagaattatggggttatctcaaaaaagggaaatttgattttttatacttaaaaaatttaatttttttttaaccaatacattttacactacaaaaaatatgacacttttttcaaaaccccaaaaatacccccctctatc

SEQ ID NO: 106710 - DNA, 616 bp, Cannabis sativa
tactattaaaacggatgtactgatgaacccctacttgtttcggcatctaaaaaaaatttagtctaattttttttatattcatgtatgttatagctatttaagatatcctacaaaattttaagaaatttggaagaatttataatataaaaaataatgttcaaacagtctatttacacgtgtataaaataaaatagtcactcgtataacacactgcttgaacataattttcggcgtgttaaactttttcgaattttttaaaattttgcaggatgtcttaaatgactataatttacatgaccatgagaaaaaatttgatgaaaaaattatttcagattctaaaaaagatagagttgtatcgatgtatcccttttaatggggtgcattatagaatttcccaaaaatatattttttttttaaaaaaaaaaggaaaaaagttttgtactcataaataactttggatgtttctacaatacaccccattaaaattggtgtactgatacaactcttaactgtttcagtatttataaaaaaaaattaatctaaattttttcatagtcgtataccttatagatatttaagacatcctgcaaaattttaagaaactcagaataactta

SEQ ID NO: 106711 - DNA, 789 bp, Cannabis sativa
gtcactctatggtttaaaacagtcacctaggcaacggtataaaagattttatgaatatgtaatcaaatagagtttcaagaggagtgcctttcacagttgtgtgtatgtcaaaaatgagaagtcccctatttttctacttctatatgttgatgacatgctcattgcaagcaagaacatgagtgagatatacaaagtaaagaagttgttgaacaaggagtttgagatgaaagaccttagttcagtcagatgaattttgggaattaaaattgagagagacaaaaagaaaagaaccctcaaactgtctcaaagtggatacatcaccaaaatttttgagaagtttgggtttggtgatttgaaactagtcaacaccactttcacaaaagtttagattgtcatgctcacagacaccaactacaaatgaagaatgcagctacatggagtcgattcgctacaccagtgtagttggcagtatcatgtacatcatggtctgcacaagaccaaacatttgtcatggggttagtgttgtgagcagatttatgagcaaaccagtgcaagaacattggaatgtagttaagtggattatgagatatctaaaaaggacaataaatactagactgctatatggcttgaacacaatgaatgagggtgttgaaggctatgtagattctgactatgttggggatctggacatcaagagatcacagtcaggctatgtgttcatgcttcatgaatgtacaattaactggaaagctaacctccaaacaatggtagctctttccactattgaag

SEQ ID NO: 106712 - DNA, 804 bp, Cannabis sativa
gtttaaaaatcacgtaatactcctatgctagttagggtgttacaatatagttggtatagttataaacaggataagataaatgaaggtgaattcataaatgcaattcatttcaaaatagaaaactttattaaaaattctccaaaattagaaggaattgtctgtaacaatatgaaaaaatagggaataaaatctcaaactaaaattgaaatccaaattgttcttaaactaaaacaattaattcaaaattaaaaagaagattccgagcttcatcttcatcttggactattttcatcttcatcttggactatcttcacccttctgtccaactatccgattcaactcgctaagatagcatccgagttcaagcagttgtggttgaaataagaagaaaataaataaacatggttaataggtccagaattaataatccaagtggataataattcgctaaaacacatcagtttataggaaaagaaataccttgtttctttgctagcaatttagggcattggggtttccagtgacctttttcattgcaatagaagcattttccttttggtgcatcaccaggattagcagcctttttctttttaactgtttttacagcttgaacaggatttttgctattcttccatttcttcttgttcttgggtttggaagtagaggcaaggtttgctcagccttactcgctccattaccattttcagaattaggagttttagaccctttcttctgtggtcctcgaatcaaattttcaaatgtctgaaggtcgttaaccaactcgtgaaagtcttgttccttctt

SEQ ID NO: 106713 - DNA, 1438 bp, Cannabis sativa
  modified_base (127)..(134): a, c, t, g, unknown or other
aaaatacaatatcaaagttataaacattaatgtatataaatatatataaatataaatcaatgtttaaaattactaaaaataaacatgacacacgaagattgacataataaacatatgtgaatattannnnnnnntttattaaattagtatgtttaaaatagaaaacaaaataaacatatagatatacatacaaagtattttatattattagcatgttattataattgtaaacataaaaatagacatagccaatttatactaaaataaatatattttctttctattatttctatatattgattattttctaatgagttagtgaacgaattttccattgaaatacaattcttacatcaaaaaataaataaacaaacacactttataaactctaaatattatttaattagaaaatataaacatgacacaataaacaaagaaaaagataaataatttttttataaatattattattttttaaaaattagtaaaaaataaacatgtcacacatatattgaccgatataataaatatatgtgaatgttattattttgtttattaaattagtatatttaattaatagaaaataaaataaacacatatatacatacaatagtatgaatacatttatattcaaattatgtatttatgtttaaatttaacaagaattatggaatctaaaaaaaaatataagatagtcaataattattaccatatatatcataaaaaaaattgaataaaagtttctaattgtatataaaaatgtatgagaaaatggtaataaatttttttacacatattttgtaattaattaaaataatatatacaaaattgtaaaatgccctttataatattatatatatatatatacattacaaacaatcatattactatacatattttcattttcttttactatattagaattaagttttgtttttttttattagaacttggtagttgatgactcttttttattcaatttttatattaattgtatataggttatatttatgaaaattattcactttattcattcaataaataagactccctttttctatcccacttttgatcattattatgcttatcattttctttctcaaatacaagtttgaatgataattttgttaaataattttatataagaaccatagacactatttattaaatacacatataaatcgtaaaattttatgtatgcatatttttattatagatattaaattttaataaaatatatgatattgataatcgaaaaataaatgtttatatataaactttagtgttatatattgacatttcattaaacatatatattttgtaaacttatctatataattttttaagggtttttttttataaatgtacaacaaaaataacataattataaaaaatgtgcaaaaaaaaaattattttaaaaatttatacattttgaaaa

SEQ ID NO: 106714 - DNA, 642 bp, Cannabis sativa
ccttttcttctttaaattttctcatctttgcattaatagaactatacagataagatttttgtttaaaatatatattaaaaaatattaattctaattatatattattctcttagataattaagtttgggaatttttggaatatattgtagtatgtatgaattttcataataaaagataagactttcttgtgaaattttgatttttattttgaatggttgagacatagatttcaatcaaatgcttgctgggaataatggtatttagttgaattttttttaaaatagatgggcattttactaatttgatttggattaattttattgaaggtcatcaattaaaattttaagggagtagggatttgtatactgctgtttctctaaaaagtatatttaaaacaaaatgggattatcttcttcttttgctgtgtattaatggcaatttacatttctgtaacggctactaagtcccatgctcaatcaaaaaaacataaatattaaaaatatcaaagtttttttctattgatcaatgtttttaggtttaaaatcttttaacgatgagttttttaaaagattctacaatcagtttatatatatagggataggatttggtcccgttatgccaaaatagggaatacaatccctg

SEQ ID NO: 106715 - DNA, 3166 bp, Cannabis sativa
ttatgagttgttgtggattgttggtatataaattttgttgtacaatatatttctgttttgttatatagtatatttttattcctagatgatgtttattttccattttactatgtataatagtggtatataattttgttagcataatacaaacattttaatgtatgtatgtaattttttagcatgttatatatatatatatatttaaatattatttttatatattttaattgtacgatatatatttattttaaataatatttaattagttattttattatataaaatagtagtatataattttgttgtcatggtatatgtattttaattgtggtatataatttggttattataatatgtgtatagtcatttatacatacatatatatattagtaatatatatttttattattattgttgttagtatatatgttatggtgaatgatatatgtattttttattctatggtatatcatttttttaaaacaatatttaagttctattttttattatattttgttgacatgatatataattttattagcatcctatatattttttatttttatttgttgttattatatatatttcaattataatgtatatatttttttgttatatggtaaataagttttattgtatagcatatcattttattatagatcatgcatatttaatttttattttattatatataaaggttatatataattttgtgtataattattttatggttgtatatagttttgttaatatggtatatacaatttttttaataatattatattattttattttattttttattgtagatatatatgttttattgtatgtgttgacctcacttttggccaacgacaatgattctaatttataagcgacaagtagtataatatgagtgtaatataataaagcaaataaagacacaagaattttatagaggttcagccccaagcagctcggtaataacttaatcctcgtaatttgtattgacttaagaataaggagaataactccttttcttatagctcttacaataatatctctgaatatgaattcttagatagatttttcgacctgctgcccagtgaatatgaatcactatttatagggctttaagcttcggaggaaagaatttcccttcttattacaattgatataagcaaaaagattgcatattaaatacaaaatacaatgatcaagggattcggacagcttgccatatccttgtgatctgatcccaaagttatagggatttctctaatgactcacgatgcgaaagctcaatttgctaagtatttgcatgatgtgcggactactcactgccggttaggagggcttcgttcgagcgaatataggtgttcccttgttcagcatatttcttgcgggcagatacatggagttgagtccacgtgtcaccatcgtgtgatgccacgtaaaagtgcaaaaattaggataacagtatcgtatatggtttttgttatcgatagtatatcatttatttaagatgatatttagtttttttattatatataaattttttggtatgtatacatattttaatagtggtatatataattttgttaccatgatatatatatattttgagtattaatttattaattgtataatttctttgtgatatataattttattattatatatttttaatgatctaatatatttattcgtttttaatttaatataataatatacaatactaaaaaatatatataacttaatttaattattatagatttttttaaaaaaatatgtagtaaatgtatattagttaatttaatttcataatttaaaaaaaaaaaaaacatttactaactttatttttaatttcagaatcattttacatgtataacctcatatagctaccttttattatgtgatttctaaaagttataaagaaagcttcatttttctcatctacttcttgtgcctcaagtcgaattatggtatgaaaccatatatacatgttatcctattttttgcactgtgacgtggcaacacatgccggtaacacgtggacctgattccctatatcttcccgagagagatgctccgagcagggcacatcatgcacctgcacggatgatgttttcccaactgaggagtggataatccgagcagcgcatcaacacttagcaattctagaattggcatcgtgaagcacaagatcaatccctataaatctgggatcatatcacaaagatatgacaagctgtccaaatcccacaatctctatattctaaatatgtaatatatgttcttactaattgtagaaattgtacgcaaaagggaaagtttccctcaagcatgtagccttataaatagtgatccattatcacaggtaaagggatcgaaaggattactatagagagatctaagagagcatactcagagattttattgtgagagcttcaagagagaaaacattgtgttctttattcttgagttaatacaaatcaaggggagtaggctgttaccgaactgaacggggtcgaacctctttaaaaacattgtgttctttatttatttgcttatattatacctaagtcatattctttatcatttattattagactcattgtcgttggctaaaagtgagatcaacattttggtgctttcattaaaagagataactcaagcctgctctttacttcaagtctgatcaaaaatactatggcggtacaaactcgcagaggcgtggtcgatcaggtggatccactggcggtagatcccgcactacaaactcctgggaatgcaagggtcccaccaaccactaatcatgaacaaccaatcacgtaaccacctaccacgggtcaaggtgtgacgtctcctttggctggaatcacacccggtgtgcaagagactggaaacaccagtcagcagccaatctgagtactccctgcactggggtcccttcagcaacaaatgtccagacaaccattggagatgataccgagatccaaaacctctgtaatgctcttgggctcatgcaaggtcatactaatactttgcatcatgatcaggaagagctccgtgttgcagtgaaccttgcgttcgaagagcaaaggaactagttcaccgaatggagggataaagagatgtaaatgttgaaggcttagcaagtagccatcgacgaccgaacaagaca

SEQ ID NO: 106716 - DNA, 517 bp, Cannabis sativa
  modified_base (469)..(469): a, c, t, g, unknown or other
tcgaagattgacaagactcctactgaggagctgctgccttgctccgcggagctagcttcgcagtttatggccatgttttcgaaggcttttgctacggggtccaaggaggttgaactcgagaagaaaaatattgctcagcttcaagaagacaataagaagctgaagcaagatgcgtcttctaaggacaaggagctcgaggaacttcgcaaggccaaggagcaagttgagctcgaggccaagaatgctcagacgaagatcgaagagatgtctcacgacttggaaactgagaaggagaatggaaaaaagcagtatgaccagggggtctcggactacatctacaccactctctccaagattctagacttcgacttttcaatcctcggagcagaagccattgaaatggccaaggcttttcgtgttatgtcacccacgccaactcaaggtggtggggggaatcttctcgaggagnctgaggtcgcggaggtggaggaagtcgagaacgaggcggtcagcaaag

SEQ ID NO: 106717 - DNA, 530 bp, Cannabis sativa
  modified_base (502)..(505): a, c, t, g, unknown or other
atacactctctatatcttcagtcagaatagtgaatgtagtgtatttggcatgattccctcggggagtctgtccggatttgtcagtgaactttcatttctttccatttccttgcttgttgttgttgcttgaatggttgcaacttgagcttgaattgttggaatagtttggaagttgggcagatgttccagtggaaggagcctttgttttgcctgactttttttcaccttctgctcattgaatggcttcttcgagcttgataaagtcttcggctgggtcgaggacttcaatgccccttagtatcatagataactttccatcctcggttacccgcgaaactttggtcgcttccatcatgaatttgctgatgtatgcccggagtggctttcctggtcgttcctttacttcgaccaaatctcccaaatgcaatgggagcttgcgcgaggaggagaattgcgcatggtattcagaagagaagattttccatgaactaaactttccagnnnncaacttgaaataccattgttgtgcg

SEQ ID NO: 106718 - DNA, 695 bp, Cannabis sativa
aaatcccaaaaatatattttgggctccgaacccaattcggccccaaacactcaattgtgactataccgcgccgacttgttagcaaatacctgcagatatacagaataaacatactatataataatatagtctataagcacgatataccataaaattatgagtttacccttctcaagtaaaaattacaaaaataccctatgacacactaacggggtcttaaaatacaatctatcaatatagcttcacatattaaaagtaattataatataatttctcattaatacataattaatctagttagggttgctaatccggttattaaaccttagggtattacagattcactcgttaaagtttctcagagaagataatttttacaacatctattttaagaagctaataatatagatggctgggaattttatttacaattatagaactctttcctaacggatcgattgttggtttctttaagtgttaattcttgaaatgaaaagttgtgcacaaatttagatgggtctaaattatacttacactagtgaattaactatactaaaggataaaaaagtaattagaaaggtaaaatggtattttaaccaaaactaattatgaaccgacataaggagggctaatcactggaattgattataccaatagacactgcaataaactcaggtggcgtttggtaacacttt

SEQ ID NO: 106719 - DNA, 694 bp, Cannabis sativa
aaaggcagtgggtacaaaaaactcactgaagctctaatacaagaaggctttcatcaatctcaagcggactacacactcttcactcgaggaaaagatgacagcttcattgctttactcgtgtatgtggacgatatagtcattactggtcccaacatcacaattctccaacaacttcaagactctctacatgacaaattcaaactcaagacccttggaaaactaaaatactttttaggctttgagatagctagaaccaaagatagtatgtttctctcccaacggaaatataccctccagcttcttgaagaaagtggttacataggcagcaagcttgctaaggcgcccatggatcctagacacaaacttgacgaccaacaaggtgaacccttgacaaatccaaccacctaccgacaactcatcggcaaactgctctatttgacattgtctaggcccgatatcacttatgatgtcaatgttctcagccaatttatggcctctccacgaacacctcacttgcaagccctacaacatctcattcggtatctcaaaggcagtcctggtcaaggcattctatactctgccatgtcctctcttcatctcaggggtttttcggattcagactgggcttcatgtcctataacttgacagtcaacaatcgggttctgcattttcttaggagattgtcttgtctcct

SEQ ID NO: 106720 - DNA, 701 bp, Cannabis sativa
ttgttgccaggaaccacttaagcgaggtggatcgagttcatacggcttgtcttgatttctctgacgctctttgtggggaagcggcggcatgttgtttgcctatttctgctgctttggattttgatgccaagtttgtcatcgtggagagcaacttgagggtagtcatcaatgctctcaatggaaggagtctcattgggttattggaaactatgtctctttttgtaatagtcactcttctttattttcgagttgtattttctctcatattagtaggacttgtaattttgttgcccataatgtggggcgtttacccacaagttatttggtgatatcccgctatcgaccatcccgttaaacttattatgtaatgaccatgaggtctaacttattctattaatgaaatacgtttttcttcaaaaaaaaaaaaaatataaactgatacataagtttcagttcgtacgatattatatgtatatatatatattaagtttaacatatataatatatataacactaacgaacgaacgaaaccctcgttctctctccttcgtcaaaacttttttctcctatatccattttattcgattttcaacccaaaacctagcgatctaagttctggtagtagcgcaataataaatccttgaaaagagaaagcttaaggtatggtttaattacattttaagctaaaaacgattggtttt

SEQ ID NO: 106721 - DNA, 1324 bp, Cannabis sativa
aacattaccttgtttgtttggagggtttaatcttgaaatgtcattcccttggtaatataaatacccttgaagagggtaatgttgatacattaaaaaaggttgggattcattatttccttccattatattaatttgaataatatttttaaattaataaataaatttaaataccattaatattataatttattataaacaaaatattatgatgtatatatatatttagtctgtaagatcggtttttttataattgatttatttttattatgttattagcaataatatatatatatatatatatgcattatatataaactagtaaacaatccgcgcttcgcggcggatgtttaaatttttttaaattatatattaaattataatatttattaatgataaataaataataaaaatgtatcaaattttaattttatcattttttttaatattgttctacttatggtagatttttttaataagcatattattttataattagtaattaaaaaaaaatctatataaatatatttctttaatgaataattattttatttttatgtataattaacattatataaacacaataaaaaaatattttaattttaattttttaaaataatatataagattcctgtactcaaccaaacagtataattcaattaacgggaatatgattacatattactctacacagccaaacacagtttacacatttctctataatcatattctcctccataatatttcttataaccaaattattttgaacaccttatacaaacgtccccttagtggtgatggttgagactcttttctcaccaaaaaaaaagaaaaaaagaaaaagagaaaaagaataaacaaatatgaaatgtacacatttgccctaaccctaattccccaattatgtgtaaatccaccaccacttggcacaccaagtaaagccataaactagttgtaattgacctctatatccctaagtaagaccaaaattactaaaatttgccactacgtggtttgtcatcaggtaacagcaaacccctcaaaagaaatgccctaatttttgcaaattcgggaccggctataagctgtaaaccggtaaacacatcgctaaagaaaaacctgggtagtgaaacagagcgtcaatattactgtctggacacccctattttctccgtctccagtttcaactttataatatacattattatttatatttatttatatatcacaatcttaactcgcttaccctcattttcaccttctgttgtgtcctctaactttctgtttgatttccgagaaaaagagaaaataagaagaagaagaagaa

SEQ ID NO: 106722 - DNA, 506 bp, Cannabis sativa
gaatggagttctcgtggtgaggaatcagagggaaggaagtacatgcacaacaaacagaaactgagttagatcgagaacaaattagaaagaaaacaaaagcaaaaattgtacaaaatagagaatcgagtttacctggtcgttcttatgtgacaggaagctctaaacttgtaaatcgacattgttgatagtggatatcaagctagatctctgagatgagcttgacagagacgtagcccagttttgggtgaactctgaaacaaattccctggtgttttctctcccttactttgtttttcattcttactaaacctaaatctatgtgtgtgtgggtttgattttgggtttttggacccttcttcagagtatttaaactctgggatccaaatgacacaggttttggtgtcgtgttggataaacggtgccggtttagtctatacttaataataggctaggaaaggtcgattttgaccttgatactgattttaaagtgtcttgttggtgtaggg

SEQ ID NO: 106723 - DNA, 653 bp, Cannabis sativa
  modified_base (27)..(29): a, c, t, g, unknown or other
tttgtagttaaaattctgcatagtccnnnagtcaatcttatttagattttttattgtttttcagggcgtcttttgtatgagtttttttgtccccttttttgatcttgtttgcccctatttgtaattacatagtgggtagttaattacaaagttgactgtaatctatttacaacgatcatcccctaaaatcatggggtttgattacatatcacgtagtgtaaatgcagttatgatttgaaaatcatatatagctatgattttcccgctattactgcgtcaaatgatcttgtattaaagacgtctttaattgctgtatctggagatgtctcgacaaaagcttggttccagtgatctcaatagcgaactggggtcatttttccttctgaggtcgacgatgcatgtcttgtgacgatcacagttcttatttacaaagagttctttgaagttcatttgaatgctagcttttgacttgtcagggttgtaagcctcagcgacgttaacgacatgaagttataggaagccttctcatagcgaaacgggcaccttgcttacttggtctcgagccgatctgactattacacttagggggtgtttggaataggttaatgttagcaagaaaatggtaatgttaaacattaccttgtttgtttgga

SEQ ID NO: 106724 - DNA, 1069 bp, Cannabis sativa
agaatattccacccccacttagccgaaaggccaagttcatttctctggttttccagaacccaaggcccccaagagatttgggaaggcagagcttatcccaagcttctgatgcaacccatggttaccttttttgaatccccaccaaatatcacgcaccaaaccatcaactttggtagcaaggcaatgggagagcttggtagtttgcatagcatataaaggcagagacaagaccaaaaattttatgagagtagcacgacccgcctttgatagggtttttgctttccgcctttgtaacttcgaagtgaggttatccaggataaaattgaagtatgtgtccttatatcttgatctaaataggggaagacccagatacttgacgttctcctcaagtgtgccgatccccaaagcttcgttgacatctcttttcatttcattggaagtattcttactaaaaacgattgaagttttgagtttattaacttgttgactcgaacatgcataaaatctctcttccttgatgacactaatagtactaatatgaggatatatattatagaataattctataatagtgacattggttttgtctctatactatagagacattttcttaaccattcatttatatgatttttgaaagtccacattatataatatgcagttttatgcagcaaattatattttctttttcaattattttttctaaaaaggtaaacatactgacaccaaaaaatgaaacttcttattggttattgtaaaaaataaacctatcctcttgcttcttttgggttctagtaaaaatagcttctatagagagaaaaaaaattctttaatctcaatagaagcctctctcttttacttttttgagaatctttctctagaaaaagaaaaaaaagcttgttgaagtgaattaaacaaaagttgaagaacaaataaaaattatcatttgcagatgtcaccacagttgaaaaaaaaaaggcagaatattgaagaacatttttaaaagtttagagaaaaaaaatctaacaaatttgcataattagtgcgcaattgttagaatttacatagc

SEQ ID NO: 106725 - DNA, 671 bp, Cannabis sativa
aagccactagaaaagccatctggacccggggatttatttgcaggtatgctgaatacagccttttttatctcatcctttgtgaattcctgtagtaaaaaatcagcctgacttgaggaaagaatagggccattcctgagaatattgttttccactaccttcctctgctctcttttggttccaaggagacttttataaaagtctaggaatgctgctgtaataagttcaggatctgtaactctgctgccctcttggttctctatggataggattcggttttgccttattctatgcttaatgcaagcatgaaataaggcagagttcgagtcaccatcttgaatccactccacttagctttctgttttaaaaataatgagtaatcttgctgcttttgacttaaatactcacgggctactctttcctgctggtgtaaactttcctcaagagactgctgttgcagctggctttggatactgtcgagagaagcctttgcctcatgcacctgctgatgcaaatcacaataagcttccctgtttaacttcctcaacctctctttgaaaagcttcagcttacaaacggcttgatacatttggttacctgaaatttccaagcaccaactgtcttttaacatagagtcatacttaggatgggatttccacatcctaaaatacttg

SEQ ID NO: 106726 - DNA, 1092 bp, Cannabis sativa
cattaagttatacataataattaaataaatcttcactttttcttattttatgctttaaaaatatattacaaatatgatttttgtaataagctaaatattaataataacttacttttaaataattaaaaatgtcattttataattattaaaaattatattttaccttacaaaattaatacattaacaattttatacatcatttcacaaatttaatattttttatataaattaataagataaataattgtatgaaactaattatcaagcaaccaagtagaccattttttgtcaactttttgtactaaatcaaatgcttatattctaataattacataattttctccgaatatttaaaataatgtaattttaaataattaaaatataattttctaatcgtttaaatttctatattttgccttaaaaatattatatattttcagttttaaatattacctaacatagttattatttattttttaaatacaaatatataaataattaataaaaataaacgtttatatttgaccctaaagtggaggcacaatatagtcttccacatgatattattagatatatcaattgtaaatgattattatattatttgctttaattattgttattttttttaaatgctcaattttatgaattaatgttaaaatagaaagattatatatttcattaaaaggaacaaaaataattaaataacattccataaaatgaaatgacaccaccactcatagtttaattacaatgtatatgatgcaatttaatttaattttatcaacttactattactataattaataatcttgtattatcaaataataatatataataaaattaaaatattaataataatataaaagcttattattattatatattaattaaatgggttaatctatttttatcgttaattataacttctataacaattttctattgtgcaaacttttcatattccctctcctaatatgtattaattaaaaaattgaatgaataaagttgctatgtatacgaaagagacactccatgataaattattctttgtaataacttttgaaattccataacatatttaaataaatttaa

SEQ ID NO: 106727 - DNA, 559 bp, Cannabis sativa
aggtcttaaataattataatttacgtgacttcaaaaaaaaaaaaaatgagtaaaaaattattttagatactaaaatatatagagatgtatcaatgcatccctcttagagagtgcattatagaatttctcaaaattatattataactattacttcaacaaaatatattattgaatattcttattaatttataatattattagaaatttaaaattatatgcataatagggactaaaattggtcccataatttaaaactatacaaaatttgtataataagataatttttactaaaacccaattttacccccctcattctaaactgactctctctctctcttgctccctttctctctgtctttcccctttcgaattcccaccacccacggaccattcccactcgaccaccgatgaacccaccaccccacggaccgaaccctctccggatcttttttttttttttcgtcggatgtgattcgagaaaaatctggatttggggtttgatttcgtcaggcccgatgcagacccaatgggcccaatgggacccgatgcctgtgtaaaa

SEQ ID NO: 106728 - DNA, 639 bp, Cannabis sativa
agtaacttacatcaaagctattaacttgatctaatctgatctttagcttaacatgaaataaaacaaattgcagaaattagaaattgtactttagatggtggttttctgacctaagtacttttcaattttgtcttaacctttgggtgtggtccgcccagcaggccattcacttaaaagtaaatgttcttttagtacttaatgtggtcatctgacctggcacttatattggtagtattttcttacaagttgcattttttcatcatacttacccaatttgtatgctcctgactcgagaacttcgaccacttcatatggtccttcctaattttttccgagtacacctgccgtactatctttgctgtttaaaaatacacttcttaggaccatacctcccacaaagaatttccgagccttcacttgtttgttgaaataccgagctactttttagttgatcggccatcaactttaagtttgttgcggttcgcttcgcttcaatttcatcaagtgattcagcaaggagtacgtgattcgcttcttggttgtatgtcaatcttctgtgggatggtggctcgagttctacgggtagcattttctatctatatgccatggcaaatggagtctgtccggttgccattttct

SEQ ID NO: 106729 - DNA, 575 bp, Cannabis sativa
tatccttgattgctgaggaggctgagcaacatgtaccaaaagaggagactgcaaaggatgccatcacggcatcgaaccctcctactggtggtaatgtcagtaaggggaccgacaattgcaaccctaatcataaatagaaggttgaggcttctagagcatcagggggtaatagaaagtttcgggaaaatagagttggtcgtcagggctgcgggtcctcattccgatcatatcctgagtgtcctaattgtaagagacaccatcagagtgaatgtcgggccaagacatgttttcagtgtggcatggtgggccactttatcagagcttgtcctcaggccaagaaagaggaacctaagaagaatgctactcagaacccagggcgactttttactatgactcaggcttacgctgatgctagtccgtcattagtgacaggtcagttgtctattaatggctgttcttatattgtgttgtttgatacgggagctactcacgcttatgtgtcgagtagagttatagaaagtttacataagccatgtgatatataggcttcagggtttggtaccttgttaccctcg

SEQ ID NO: 106730 - DNA, 869 bp, Cannabis sativa
atctttttattttatttctatttaaaatttagttttaattatatattttttttatttcaaatttacataaaaaaatattttaattaaatttatttttaaaatcataattatacttgtaaaaaactataacatattcaacttataataattttataataatcactcttaaaataattaaaatcccatgatttcaatacttcagaagtaatattttcttttctttactttaatttaagattttaattaatttagtagttttaaaattctatcatattatattaattaattttatttttcaagattataatgttcaatgtatttaaaatatttagatataaaattaattatttacataaattacattattaataaaagtctatcataaattattctagcagatatggtaagttttcctaactcatgtcacttgacatgagttcaatccttgtaaccttcatttgatgattttatatcacttatttttttttctattttattttatttcatttttcttttgaagagttttatctctactttatcattcttaatagaggtgttcatccaatccatttcgcactaagtgtagatttcatatttttagattcaatgtataagaaatattattgatgtcttatcagacgtcttatttttattgtatacaacaatttaaaatttttttgtaaaaaaaatctataagaattgtcccgtaataaaagtttaattaatatactatttacaaagataaccagcaagtagggaacataataactgttctagtttatagtcattacttttcctggttgtcccatgtggatcaaaccaagtaccacaagcttggttactcctagttatcacaagtttggttactc

SEQ ID NO: 106731 - DNA, 1028 bp, Cannabis sativa
  modified_base (32)..(39): a, c, t, g, unknown or other
  modified_base (644)..(644): a, c, t, g, unknown or other
aatcactacctcccctgctaaaacctgatgcnnnnnnnntaggagccccgccaacaactggagtcccaccagactctatcatgcatattactgcgccctcagctcgcagtgccttatccaccatttcagcataggtggttctattgtcagtagtaatcatcaagtcatgtttaatcttcgcatttaacccatccatgtatttttctttcttgctaaagtcagttggcataatccccgaggccaacctcgccaaacggtcaaattgtgttgtgtactcagtaacactcatattttctttctaagtcaaatgagggaattcttttctcctagcacttctaactgcttcattgtaatacttagcattgaaaagttcttggaactttcccaggtcatcgtcgtgacatcgtgaatcatggacaccatgtcccacaagactagtgtgtcttcttgaaattggaaggtggcacagaccaccctatcattaccagtgacgcccataaaattcaaaattctagtaatcactgttagccattgctcggctttcataacatccggacctctcagaaaaaatggaggtgcttgtttgcgaaacttttcatacagaggttctattcgattcactgcgaccactggttcggcctggncagcaggggcaggtgccactggaatttttagagcaggcattgcaggagaaccctgctatcttaatcgttgaatttcattatcttgttcctcatttggcttgcattgctgcaaacctattttcccaattttgggcatcctgagcagcttgggtagcctgggcaacctgtggcagattaacttcacctcggccacgtgccatgcccctgggacctctaccttggccacgaacatttgggggaatctaagctccctgaccagcattagatccaaccgaattgccttggctcttggtatttcgcctgacgcccatactaatctgaacagcttgcgtaaccaagagctagtctggtcagattgtgatcaaagagaaacttactaatgcc

SEQ ID NO: 106732 - DNA, 694 bp, Cannabis sativa
  modified_base (144)..(145): a, c, t, g, unknown or other
aagttttcccaagaagcgtgcgagtgaggacaaagcatgttggaaacactcgtgttggtttgtagggccagtcgtcagtccatgaagcagccagattggcgtacttgtgtataagagccgtcattccgtgggtgtaagggcccnntggaggcttgaagcggggatgttacagtagatgccacctcaggtttcaagttattatcttttatggatgcctattcagggtacaatcaaatcaaaatgcatgtcgccgataagagtgtaccagcttcaggggtactgctacctggtcatgcccttcaaattgaaaaatatcagagcaacctatcagtgcatggtcaagtaaatgttcaaaggcctcctaggacgaaacatggaagtatacgtagatgacatgctggtaaaatccaaaacatgcatgggtcatgcggacgacctcaaagaatgctttgaggtagtttgaaggtataggatgaaggatgaaacttaaacttaatttaatccctaatcccaaaaaatgcacttttggtgttaaatcaagaaaaaatttgggattcacagtaagtcaacgcgggatagaggcaaaccctaaaaaaaaaatacaagccttgttgagtatgccttccccaaagaaacacaaggatgtacaaagcttaactagaaaagttactgccttgagtcgtttcatctccca

SEQ ID NO: 106733 - DNA, 537 bp, Cannabis sativa
gtcggggttatgttttgttattgcaatttaatttttacttttacgattagtcttgtctatgtgatatgattttgagtgttttatagtcttgtctctataacatagttttgagtgttttaatcttgtgtgtgtgatataattttgttttgttttgtttagtttcgttgttagttttttattcgtggataactcgtcattaaattgctgttagtggttgggaataacaagttctctgcgactgaagaggttattagtacgtagtgcagttacgtaccttgcacaatagttgggtgctcaagctacgaggttgaacgaatttactgtaacagtttttactgttgtgtcttctgagcggtagatgaaactaaatataagtgtttttaaagttaactgtgatgctgtaatctttttaatttgattttatttttaatttttgtgtcaaatgatttaaaaattaggcaattaattatttgatttgtttttttaattttaatcctaattatgtcttcaacaaaaaaatattttaattagattgca

SEQ ID NO: 106734 - DNA, 726 bp, Cannabis sativa
tccccaaactagatgacgccaatagcagcctacctcaactctcgggaactcccagataaccaaaatgaagctcagaagatgagaaggaaggcagcacggtatattatattagtgggagtcatgtacagaagaggattctcgatgccattgctcagatgtgtcactcaagacaaaacagcaccactcctatctgaagttcacgatggattctgtggaaatcacgccgccaaacagagcctatccaagaaaattctaacgcgaaattgccaggttatggcgtagaatgaaaccgttgtagggttttctcttggcgacgtgtagatacaacgtcagtgatatgaaaatttccaggttatggcgtagaatgaaactgttgtagggtttcctcctggcgacgtgtagatacgggcgtcaatgacatatgataagtattgggagtaggtacggactcgtctgattaggtgatgtgatatatttgtgccaagttgtggcacgagctcacctaattaggtgatataattatatgatatgtgggtgcaactttttggcacgggctcaccttattaggtgatgcatttatatgatatatgggtgcaagttctttagtaaaaatttttgtagcagggatccccagaacatgctttttatgtcgttataatgtctgtttttagtctttcactttagtaaagtttttaatattagcaccatttttaataattaattaat

SEQ ID NO: 106735 - DNA, 682 bp, Cannabis sativa
aattgaccaagatacataatttcatttcatagaagtaattaaatattactcaaatattataaaattagtccaagtattaacaagttaataaatctaactaccagttaacctaaaaaataacttacggaagaaaaattcttgggtctttcagcatcaatcgtcatcgtgaatcaccaccatcaaccgttctatccactattgttgtattgacaacaattcagtttttggattgtattactgcttatccccaaactgttaaaaaaagtaaaaatttatattagtttatatatatgcatattatttgttattataataaatactataatcaataattacaacttacagctttttgatcttatatgtaacggttggggtttccatgtgcgacgatcttagtcatgtatttcaaaacatatataaaaaccacattctttttttttttggttgtcttggacaattttctagtgaaatttcttgtcccaggccaagatattcatgtgtttcccctatatatccaaatgcattgtttgaaaaattatattatcatttcaaccattagttaattaaaatttgttacataaatattcaataaatgattaccttcccaacaattgagtaatttgttcgagaacttgacgaccatgtatagggtctaaatggataattttctttggcgtaacaa

SEQ ID NO: 106736 - DNA, 609 bp, Cannabis sativa
ataatatttgtatatccattcctatattgttttgtgttttaatattgttattagtttaattaattattcagtctcatatagtttaatagtttaatgatgataatttttagtgataattgtaagataatatgattagaggtgttaagtaccatttgatgctcaatagcaatagcaatgctttttttgagtgattttctaatttttaacaatgagtggtgaaatactaataaaggagttaattagaaaattttaatattttttatttataaaaataaggtaaatattattttcgattttgtgttttgcaaaaattattaattggatcgtgtgttttgttaaatgacaaaatagatcctgtattttctaaaatgatacaaataggattctgaaatgaatttttattaaaaaaatttaattataatcagatctaaaagtgttatgacaaaataatttgtattttttgtatccctttttattaggaattgtctttaagttgattatattaaaaaaaaaagtcgttaaaaattaagctaaatacagtatctattttttcatttaacaaatcaaaaaatccaatcagtaacttttacaaaacataaggtccaaaat

SEQ ID NO: 106737 - DNA, 836 bp, Cannabis sativa
aggactagtaggagaagttcggtgtgacaggcccactagagaccagctagcaaatcgcctaacattcaagtggatggcctggtcagagcatcatattgagcaaggagcagtgctacccctgcaccactacttttaagacatagccatctactttaggttgtgtccaactcagatcactctgaagggtataaagtacctttcagccatgtttgtcctgtatacagctgttgacctcgcttttggccaacgatagtgagtcttgattgtaagcgacaagtagtatagtatataagtaatataatgaaataaataaagacacaagagttttatagaggttcggccccgagccattcggtaatagcctactccccttagtttgtattgacttaagaacaaagaatataatgattccttttcttagagctcttacaataatatctctgaatatgaattcttagataagttttttgaccccctgcccagtgagagtagatcactatttatagcgctataagctttgagggaagagtttccctactgattacaatagatataattggcaggattgcatattaaatgcagaatacactaatcaagggatttttggatagcttgccagatctctgtgatatgataccaaaattatagggatttcttctgtgactcatgatgtgagtgttgaaattgccaagtgttggcgtgctgttcggattgctcaatgcctgtctaagaagacttcgttcgtgcgactatatgcgatgctctgttcgccgtatcttgtgtgaacagatatataaagtttattccacatgtcaccatcgtgtgatgccatgtca

SEQ ID NO: 106738 - DNA, 610 bp, Cannabis sativa
  modified_base (342)..(345): a, c, t, g, unknown or other
tgaaatagagttttatttagggcacaaagcccaacattatcgagcttgcttgtattcttcttgaaggttgctttcaggttgcttaacaggtggtatacacaatacccatgtgttatttctagaaatacatgagcaactaccttaattatgctctcatgtctgtctgagatcaagcactattcttctctgatcctatatgtttcccttaattttgtgaaaaaccattgccatgagttgttgttttctaaatccacaacagaaaaaactaggggaaaaatgtgtacatttgcatcttgtgtacaagcagagagtaatgtccctccatatgttgatttaaggaannnnccatcaacaactattatgggtttgcacttcttccatccttttattgaagtatctagtgccacaaacaagtacttgaagctgttgtcctcctctgtttgcatgtgtacgatggttctgggattagttttctgcagcatgtgcaaaaaactggcagcaacttgtatgattcgtttgcttttccttgtaattcttcttacgagtgatctttgcttccccatgctttcatgtagttcattctcaccccatacttatgtttcatttctcc

SEQ ID NO: 106739 - DNA, 899 bp, Cannabis sativa
tttttttcaaattcagcttcatacaacacttctggatcatcgagaaatcctcttccaaatcgttggtgtcctcccaaacaatctttgacttcactggcatgttgtccacataatcttctatattttttcctaagatatctttgagcattttgttcaccgaatgttggtaggtagccatgacattcttaagcccaaagggcattacaaggtagaaatatacacttttgttagtttagaagctagtgtgttcttggtctgctacatgtatttttatatgattgtagccgaagtatgcattcataaagcttagaagtatgatcttaactttcttgacgctaagagtaagcagtacgtcaacttttccatgagtgggtatcgaattttaacgtcaattagtcttttgctgatgtagtatacaggatgctagatattgtcttcttctcctattaggactgcactcacaacatactctgtgatggccaagtacacgcctaattcctcattgtctaaaggttttgataggaaaggaggttgagccaactatttcttcagctattggaatgctttttaacactctcctatgttgaagaaaggaacacacttgtttgtggatttggacacaaatatgcttagtgcagtaatgcatcctaccaggctttgtaccctttgattattgtgggcaacttcatgtccaaaagggcctagatcttgtctgggtttgcttatattcccctggcattgactatgaagctaaggaatttgcccgagccaactctgaatgaacacttgagaggttgagcttcatgttgtactctcaaaggatcttgaagcattcattaagatcctccacatgccccaacctttttggacttgtttagcatgtcgtccatatacacttt

SEQ ID NO: 106740 - DNA, 773 bp, Cannabis sativa
aaagttagttgttactgtaacaaatttaattagttgttttattttaatttaggtaaaattataaagttaatggaggaaaaaaatggaggaaaatatagatttttctgccattaatctgtattttttttcttttcttttttacatgcccgacggtttaaaaccttcgccttaacagagtataagcgacggttttaaaccgtgccctatactataggatcgtcgcgtatagtataaggcacgattataaaccgtcgcctatatctagttataggcgacgattttaaagcgtcgggaaatccacattagcggcgattttgaaccgtcgcctattatgcctattttacgacggtcgtataggcgacggttatagaaaccgacgggaatactttaaacaactatttaaaaacgtcgagaaaacccatttttgtagtagtgtgattttgtattaccaaatatttgtattttgatgattattcatggcaaatgccagtagtgatctggatttcatcttatgaacaatgcgtaattgtttgattctgattgtgtataaatgataatattcaaataataaactatatgattattattattactacttttcttgctgagtccttgtgactcacgggtgctatatggtgcaggtaaaggcaaagaaaagctaaatcaaccatggggtgacaatcttctctagcaatgtacatattgacctcgctggcctacgtgtcgggtcgccaagagtttttttggggtgtctctattatgtattttgattt

SEQ ID NO: 106741 - DNA, 693 bp, Cannabis sativa
  modified_base (651)..(654): a, c, t, g, unknown or other
tacttccacgactaagggatcgttgtgcgggaagcaaatgtggatagcatcttcttcagtgaattttatagtgggttcccctacccgtggcatttttgtcatcctttcttctacggccaaaactacttccttttgttcatgctgtaaagttagaacatacctctcccgagctttgtctgaatctccagcaatgtgcaggcccccaatgatgacttgtaaatgcccctcccctggtggaggcattaataagtcttggttgttgtctacttgggcggcctattgattttgatcggccttgacgtacttttgcacgtgcgggttatttttccttatcaggaattcaatttcccgctttaggttgttgcactcatttgtgtcatggccatagtctccatgaaaacggtagaatttagacatgtcccttttacttatgtcctttttcattagagcatgttttttgtatgggaccatagactgggttaccatgtagattgtctctaggtcatcagttatggcagagaaggcagtaaattttgaggcattttctctaggggtttgttcagctttgcctacaaactttaccttcttcctgttgccttgcctgttgttgttattggatcttttgccgctcgaagtcgagccactaggatnnnntgggctttgagcaggtgctcctgccgaggggacctgtgg

SEQ ID NO: 106742 - DNA, 529 bp, Cannabis sativa
  modified_base (236)..(238): a, c, t, g, unknown or other
caactagaaacctgaaactggcacaaaatgacaagctgaaaaaccggttttccctgctgcaaaatccgggtggttttacccagaaaaccaacaaaaattcatatcctaaccaaatcgtttccaaactcaaccaaactttccaaacctgcatattacaaccccaataaactatttccaagcaacaaaacaacaatcaaagcccagaattgaatttcaccattaaagctccaagtttnnnttctaaaactcaaagcttggttaaacttactaaccactcttaattcaggcttaaaacaacatataaaaccacaatctaactccagaaacatgattcaaacaccaacaataaacacagcagctaccaactcaaattcatgcaacactctctatcttaaaattcaagaaattaaaagagcaaagtgttggaagcttaccaagggcttgaaagtacttagatcttgctgaattctacttgaaatgctgaataaaattatcaaccctagctgccctaggaattttcgagagagag

SEQ ID NO: 106743 - DNA, 1464 bp, Cannabis sativa
  modified_base (490)..(494): a, c, t, g, unknown or other
ttaaaatacattatttatgctttatatttatggattactattcattgctttaaatatattttattaattatttttgtatggagatatatattaatattatatatttaaaatgaataaaatataataaaattttaaaaaaatagagttttaatgataaattttaaagaaattgatgtatggtgtaatgtagaaatgtgttgtaaaatgaaaaaaaaaataaagttttaatatgatggagtaaaaaaactggtaggagtattcttaacttcttaatttgctccaatttttttcccagcaacataagaaaaactactacacgagatattaatgtaaaaacaaaatcttttttaaaaaatgcaatgtacttctacattgcactatagtaaaatgagtgcactgacgcaaatcttaactatttcgacatctagaataattttttagttcaatttttttcatagtcatatatgttatagttatttaagacattttnnnnnattttgaaaaattcaaaataatttataatatataatttaatgttcaacccgtctattttactcgtgtataaaataaaaaagttacacatgcatcatgctctttaaactctatttttgtcgtgttaattttttttgaatttctcaaaatttttgtagaatgtcttaaataactataacgtattatacgatcataaaaaaaattggactaaattttatttctagaaaccgaataaataagtgtatcggtacaccaattttaaggggtgcattataaaattttccaaaaaaaaatatatctattaactatcattaaaaaaatctttctaaaataattagagagtaattggtcctcaacttttatatacactagtactagagacttttagtttagtgaaataaataaaatcattgacattaaatagtgatatacatcaataaatttgacacacgaggtataagtacaactcctacttttttttttcttttctattgtgattggtcaatttaaaaatattataattaaaaaataaaaaatggagttcaccaacgtatctaaaaggtagatagggttgaatttgccctatgcagaaatctgcaaaaataataaataaataaaataaattaacacaaaactaatatcatactaaaacaacacttaaagttaagatttggatctcaacatagtccaacttgaaagttcacaactaaagcgtttcacaactaatatctagtgttaatggttgttgtttgttggttttgataaagaagagagcttttgataaatataccttttatttgagaatcaacataaaatacaaataaatttttagattatttttctagcaaaaaaatattttggggccttatgaattaatgataaaaaaagagaaatttataaaaatactggaattttggttaacttttataaaaatactgtcacacggaatttttttcaaaaatattgtgtttt

SEQ ID NO: 106744 - DNA, 1413 bp, Cannabis sativa
taatagggtttttcctctttacaaaccccattttcactcaaaacgaaaaaagacatctctgattgcagtagaattcaacaccagataattcttacaccaacacacccaaagctaaattatataatagtccaagcccagaagccaatttcaataaacatggtcaaaaacaagaaaaaaaagctgaattttccagatcaaaaacagaaaaataacaagaaaggaagcatttttcacaaacccagatgaaattcatggccacaatgcagcttagccgttgatctgccaccattatccgaaactaaatcaagacaaatcgaacatgaaatatccccagaagatggctgctgctgctgatgctgcggctgttcctccaaaccaccatctccaccgtccatttgatcatcacgatgatgatgattatgagcagtactctcttcagagctcaccatgaccctctccttttcctccaaacaaacacccaatactcaaaaacaactcacccagaagaagaaatctatgtctttctcgtctctttctctctccgacctgtcagtttacacggatcagaccttacgtggactgtcttggaatattttcctttctttttttttttcctttataattagataataataataatccaattcttttcattcaacttattacacttaatatgtttttaacggttacaaaccagtttcaattttctctctcaattttacaatgcaaacatttattactaacatgcttttagttcaatgaattgatacatttttttatataaattaatagcaaataaaatcaattaatggcaataacaataaccttttcttttcttccatttaaagattctattattaattttagtattgcttgtaaatttatacaaaaccgtacaaaaaaattaaattgtctgctttagtcaacaattctctcacaaaggtttcgaaaatgtttggaaaatggtaacgtgtggtgaaaatgaaaaacaaagatggttaaatagcattggtaggcaaagagagttgcataaataaatatccaaagctatttactattaatattattattaaatagtctctctcttcacctaacatccaaaaatgtattaaatctccttaatcatgtgcaacaggaatagtaccattatgtttggtggtcttatcattaaaaaaataaggataaggatgttctaaagagataattattataatatcctctctctctctctttttttttagtcaattagaaagagaaaaacaaaactcttttttctttgataaattatattttttattttattacaaattatctagcaccattattaaaagtgatactttataaataattagaaaataaattccgatgtgtaattatattttgtttaaaaataatttaattataaaattatat

SEQ ID NO: 106745 - DNA, 1694 bp, Cannabis sativa
acaactgctacttttgactttcctgtctcacgagaaaggttctttaatcaattatctgaaaaaactttaaaaatttaaaaattttaaagtggagtgggtttgcaatatatcatgtatttccagatgaattctggttaatcatacacacatatatatgcccctcaagtaattttaaagaataaaactttgtaattacttaaaaaatgattcaactttcttaataattaaagttcaaaatattacatcaacaatagagattacaacatcagctacttgtagtaaggtcacagatgttccacgttccagtagttccttaacagcgagccattaagctgagctaatttgtgaaccccgattcctactattacctcgatcacataaggaccctcccagtttgggttaaattcacctgcagatgagtctctcatatttttaaatactcgccttagcaccaagtcaccaacattgaaaagcctcttcttcactttcttgttgaagtatcttgtcacttgttgttggtatgttgcattggtgatttgcgactcagtacgatttctttaagtagattcaaggataatttcaatagttcttagttttcttcttgattatagaaatctcgcctgtgtgtcgcaatattgacttctactggcagcattgactccgagccaaatgctagcaagaatggagtatgccctgttgctgttttctcagttgttctgtgagcccaaagtacttgtggtagttcatcgacccatctacctttggcagcatccaacttatttttgatagtatccttcaagattttattaacagcttctacttgcccgtttgcctgaggccttgacactgaggagaagctcttaattatcttgttcctctcacagaactcagtgaataattcaccatcgaaatgagttccgttatcagatactatcttaatgggtattccaaacctacaatttatgttcttgacgacaaagtcgagaacttttttccaggttatggaaaccagaggttcagcctctgtccactttgaaaagaagtcaaccgccaccactgcgtaattttctcctcctcgttctgtggggagtgccccaagcaaatcaatcccccatatcgcaaatgggtaaggcgaggtcatcatcctcagttccgttggtggtatgcgaggtatatgtgaaaacctttgacacttatcacatttcttgacaaattcatgtgtgtctttgtttatagttggccagtactatccttgtcgaattatcttcttcgagaaactttaccaacctacatgatctccacaaaagccctcgtggatttctttgatgatctcattggcttctgagggaaggatacaccgtaaaagtggcattgagtagccccttcgatacaattttccttaccatcgtatagcgaggcattgtgtacaagagtttttgtgcctcatttttgtcggttggaagtagcccgttgagaagataattgactatgggtgtcatccaggtgggcgagctatctatcatctcaacttcttcattttcacatatacttggctcatttaacacctcaaccggtaccaagttcaattcatccagttcattctgcaaagccaattttgctaaggcatcggcattagagttttgttctcttgggatttgttcgattttaaaataatcaaacttttccaagttctt

SEQ ID NO: 106746 - DNA, 651 bp, Cannabis sativa
atagctatgatatctccgaacgatctttcactctaggtggctctgcatttcgaaatcctggcttctaataatgaacctgattgcagggctgaaattagcaaaacctgtgggagccacgagggtagaagtcttctgcgatttgcaattggtggtaaaccaagtctcgggagagtatcaaatgcgtggagaaaaaatggttgcgtatgtagcaactgtccgggagctactccatgagttcacggattataaagtggaaagaatccctagagaaaagaatacccacgcagactgtttggctaagttagcatcagacaccgaggttagaaactgggggtggtgcccgttgaatgccttatagaaccaagcattaaagtgaaagatattgtcgctgcagttgagcccgaaccaaactcgatgaaacccatcatcaaatacataaccaaaggcgagttgcctcaagaaagggcgctatccagaaggatacagtaccaagcgcatcgatatgtgatgatggatagtattatctaccaccgaagaggactcagaatgccgtacttaaggtgtgtatcggaccctgaagctaagcaaattatgctagaggtccatgaggggttctgcagagatcataccggaggttcgagtctctcaaag

SEQ ID NO: 106747 - DNA, 544 bp, Cannabis sativa
atgtaaaattgatgttgtggactcctccaattccaaagaaatacttgtactacttattacatgaaaggtttaaaatatatgattttgacttgtatatatatatttatacatataatatcagtatatctcattaataaattaagattctataggaactatttgaaaattgatatcatatatgtgctcaacaccataatgtatatagtacaaattaatattgggtctaatgttaatgttattgtacattttcattataccaattacggtaaaacacgtcaagtagtgttattggtgtcaccatgcatagaatttatatgtatatattttgataaaatcaccaaagtttattgaggaggaattaatccttccaaccaaggcattttatttttgaataattaacttgccttttgaatttttaacactattaagttgcgtcctttatagtacacaactcgttaataatatctttcgaaatataacttttataatgcagacgcaattcttctatcatcttctttttaattttattggtagttgatatata

SEQ ID NO: 106748 - DNA, 733 bp, Cannabis sativa
atcacctaatcaggtgagcctataaattatgtccataatatcatcacattatcattgcctaatcagacaatcggtaatttcataacctgtcatgccatgtggtacattatactagttttcttacctcaaatttcggtttaggtatgttggccgacatgcttggagaacgatcgataatcccgggtcctatgtcataacaataataaactaataagtatttatccaaaaacactacttaacagttgcaaaggacaacctagggtttcttaccaaatcccgtagtacaaataaactcaaataaaacttatattttggctctaaatcatacaccatattgtagggctcgtcatgagcttcgaaacggtatatagaacgtccaaaataaacactcgagtgaaaagttatggacaaaataaaatttggcttttctaaaaactgaccaaacggaattccagttggtacggaattccgattatgaacagccagaacacgattttcctcaactttaaaccctccaaactagctccaaacctaactaaattattacaaacttcacaggacacacacatatatatatatatatcattcatataacaatctcaacgtaataaaaataaaaaataattcctcaaacgaaagatgccatgaaagcctaaactttgagctttaaactcaagcttggtgcttttccaccccacaaccatcaaacctaccaaataagcatcacaaacag

SEQ ID NO: 106749 - DNA, 526 bp, Cannabis sativa
aaatctcactataacacatgcccctagttttcgcgacgtgacaagtgcggtcacaagggaaactatatgcgagagacaggtgaaaggttgtcacgaggaggtgaacctttggttgtcccttcgagggtttcaaaaaatggcggccgtaattattattttattgcatttatgataccacgtcagaaaactctttggttttcgtgtaagcgtggccattgttggccattggattgggtgaccttaggcattctggttgccacgtgtcgtgatcccaattaatgagggatatgggtatttaaaccctttgatttgaatcaaaatcccccattttccctcattttcttaacttccttatttcctccctctctgagacttcaacagaggctttcatagtttgctcagatttttgcctttctttgtggcattttctcaaactcaagcgtcatcgagagcaatcacaggaacaacttaccaaaactaaaggttagtttcgagtttcactgcatttttgttttctgtttggaga

SEQ ID NO: 106750 - DNA, 689 bp, Cannabis sativa
  modified_base (50)..(53): a, c, t, g, unknown or other
tatagtaatataattcttcaattaaacataattatctaattagggttttnnnnatccatttcttaattccgggtattacacttgaggttacatggtttctcgttgatatacaaagcaacagtttgtatatctttatctcgcataagactattcagtcagccgagttgtaaatatactctgtcaattatgcttttaacgagttattccacctaaatgtaattataattacgtgccttgactcgtattcttccccgcttgacacgtgttttcctctcatatgttagacgaatttcgggtataacaaaatccataaagatgttgatactatagaaaaaactgaaggacatcattagaaactcatagtgcccatatcgagtacaaaaagcagtcttgggaatatcctcttcccgaatcctcaactagtgataaccagatccaagatcaatcttaaagaagatggtctttccttgaagttgatcaaacaaatcatctatccttggcataggatacttattctatattgttaattggtttaactctcagtaatcgatgcacattcacagtgatatgtccttcttaataaataaaactggtgcaccccaaggagaagtacttggtctcgtgaaccacaaatcaagaaaattttataattggaattttaatttctttaattctaccggtgccatttg

SEQ ID NO: 106751 - DNA, 804 bp, Cannabis sativa
taggatgaatgaagagagagtttagaaaaggatggaggataatattgaaaagatggagatgaaattcattattaaaattattataatattattattagagtttatttagtagatggtataagaattgtattgtattaaataataaataatactatatttaaataaaatattgtattatattaattattacggccataaattttaatacaatgtgaatcatataatttaatacataacaaataatttgtattagcttgtattataatatttacaaagggtccaaggttaaccccagctagtgctgtaaatacaggtcatgctttttgacaagacacaaaaccggcacaagtccaaaaggcatgagcacaactaggcatgaaaaaatatgggtttggacacaacacgatacgatgctacaaattagcatgacacgacacgatacaaaaaatatatttttaagcacgacatgacacaagaagcacgaaatgcacgacacgtaagcacaaatagactagctcgaaaagcacgtgttaagatgtttttagtactatttttaggataattttaatgtgtttttaatttagttttactcttgtttggagcaattttacattttttatcttttatttttacagatttaaaacagaagaagattagaaaatatcaaaggaataagatgaaaaaaagataaaaaagatcacataaaaaataactgtatcgaaatgggggtcatgcctaggcatggaaacctcatgtcgcagcacgtgtcaaatggaagcttggagacgtgagaaatttcacaca

SEQ ID NO: 106752 - DNA, 749 bp, Cannabis sativa
aaatattagttatatgtaatttataatttaagattaacaacttcatcttcttttgcttcttcaatataatatacattgaaattcttgtatctttgagtattcatctccacttgattagcataatttgtagtatctaacacttagttgttaattcattagaaacactttcaatatatttagtctttttttaaaaaaaaaataaattataaaaattgatattagtcttcaattattaattattgtagtatgtaataaatatgtatatattgaaatcacacctcttcagaatattctattatttttatcgcataacaacccaaaacttgttctgcttagtgaccaaacataataacaaatactcttccagtgtcatcttttatttcagcatatacttttgcactgaaaagatatatatttatatatattaaatatatataattttgaaaatatgtttggttttacctatttataaaagaatagatacttatctcgtagtgtagctgttgatacatatccacacaaacatttaaatctttcgttgtatttttctaactcttttgttacattcaggacatgacatattgtagaatggttgtgatatatttatcataataatttttttttgtattcagaattttgcaacctaaattatattatacatattattagttagaaataatttttagtttacattattttacgtaaagtaataaaattatatttacttgaaataattttaaacaaaataa

SEQ ID NO: 106753 - DNA, 612 bp, Cannabis sativa
aagtgagatacaatgagacaacaagtgagatacaataataacaatagttttgaatgatcgagatatgaaaataatgcattatgaaaaacgccgtaaattttttataccatcttattaatttatttttatattaataattttttttaacaaagcaatttaaattactacatataataaattttaaacttcttaataaataattctaaataataattaataaaattatacatttagtttttaataaataaattatttataataatatgaaataagataatatatttataatctatatatataaatgagaaatatgaagcggtgatttgacgctctaaaaagactttattttactattctttttctcaatttttcacattttcaagtaatattaaatattattaattaatatttttcataaatttaaaatctatcaatctatctatacatttatacatatatatactagatagatgttacgtgccaagtcacgtatgttaaatttattttagttttaaacttttttttaatatcataattttaaaattaataatattcaatgtagtgataattattgaaatttaaaagcataatagtgatttaaataaaaacaaa

SEQ ID NO: 106754 - DNA, 620 bp, Cannabis sativa
tatggcgcaaggccgacaaatactaaaaaattaataaaatagtcttgaagaggaagcatggccccagccatcaggtgcgtctggctccaattcccgaagccgccatagttatggttgggcctctccgcatctcggggcggccggtgatacatcccggatgtcgagggtttaattccagccacctccacgatgttctccagctggtgggggcaggttagggtggaatgaagctcagccgcctcccatcctgtggaccgaggtttatacccctcctaagcaacgggacccagcgtgatgtcttcaaaggtagctagacgcttaccactcttcttggacgattttgagccggacgcagacatgttttgattatgaaaaaagaattaagattccagcaattaggccccataccaaaccctaaatcaaaaaagggaatggggtcccctaaccgttggaaagaggcctcctcctgacatctgtcaaccagaaaaccttagaaggatttcctggacaaaagtctagtgcaaagaactcatagaaggcgacattgcgcgtaaaagaaaaagaaagggcagaaaatcgagaaaaacgaagtcttctctatgcccttgaaggccagtaca

SEQ ID NO: 106755 - DNA, 1015 bp, Cannabis sativa
  modified_base (99)..(102): a, c, t, g, unknown or other
  modified_base (243)..(245): a, c, t, g, unknown or other
taaatggtagagaattgagtcatatataagaacatgggctactccacttattgccaattggttttgagatggaatcccatgattctcaacatggtatcnnnnccatatcccttgcgggcaagtgatataagaacatggaataaatggttgagaatattgagccatcatcttgagggggaatattgtggacaatgttccacatggaataaatggtagagaattgagccatatataagaacatgnnntactccactcattgccaattggttttgagatggaacctatttaactgacatcttaaatttacaaagaaaaataaactggaggttaagtatataaaaattaaaacacaaaaaataaaaaggattttgccgtaaatttttctttattatataataactccatttatgtgacaccttacaattaatttatggtattttatgataattattaaattaaaatatattaagactcaataattttttttggaacaaaggaagaatatatttattccaacaactactgaataacacactacttagcaacaactaaacaacttacgaccaaattggacttttccgatgccttgtgtggagaagctgctacggtttgcttggcgcttgaagtcgcaaaggacaaaggacaccagtttatcttggtggaaagtgatttaaagatagtgatcaatactctcaacgattcggatccccgatgggaaactaaaaactactctttattttgtaaaagaatcgttccttccttcattacttgtttattttgttttacggctagaacgtgtaattttatgggtcataacgtggctaattgggcttttacccttaacttatatgattgtattgatgttgttcttattcctcagaatatttgttgtaatgaccgcgaggtctaatattttatgaatgaacgtttcctttcaaaaaaaaaaaaaataactaaacaacttacatattcaattaatataatgagaacgggctttgactactatctttattaa

SEQ ID NO: 106756 - DNA, 634 bp, Cannabis sativa
  modified_base (28)..(38): a, c, t, g, unknown or other
  modified_base (106)..(108): a, c, t, g, unknown or other
ttgttaaaaaaagttttgaataaacaannnnnnnnnnnacaaacattgtccatgtaacaaaatgtaaaataagatattaatttaattaaattattattcttaaacnnnccaactaaattttgaaaatttagtcattagaagttgtatttttcccatggggatcaacgtatatccattgaagccttccagttgaatcaaacatggtagaaggttggcttctactagaccaatggcatggaaggctcctttgaaaatgatgttcacatagcttccattatctatgaagattatagaaactcttttatttgctatttgagcttctattaccaaagagtctttatgaggaaagtgcacacacctggcgtcatcttctgtgaaattcatgggcaaattcatcatccttggatgctaggaaggtgatttcaccaagtggcaacttttgccttgattcaactcattcaaatactgcttttgtgaattccgagtgcttctggcaatatgaggtccacctaaaataaatgctacatgaccatctaaggctggtaatacgactcctaaagggtaaaaatttctaggattgggggctacaactactgccgctgcaagagtgttctgtgccccctgaagggcttgt

SEQ ID NO: 106757 - DNA, 634 bp, Cannabis sativa
ttttgagcgttcatcccctgcgccgccttggccgaggctgcctctcgttctaactcagcatgttgacgttgcgcctcttctagacggactatcaggcggcgactttccgtttcataagttctttttcccacagattgggcacctccacggttgagctcttcatcccttgtcctgggattctgaccattcccatgccgagttctcctcgagcgtgttgttcgcgtactaggaccaatgtcgggttgagttctccgaggacgtgtggtctgagcactgggaccatcttcaggttgggccatcctagaacgggtggtccttttggactgcggattagttgatcttttggagcccatgggctcttttccaggacgatggttagtttcctcatgtcgggtgttaatattctctggattttcagccataaaggagaagatttttctttaaaagaagggaaggctttttctgagctttttcatagaggctctcaatgaaagtaccaaaccgttaacgcagattttcgttaaccaaatttgagcctcacaatgagaattcaacaccgaaatattaaattaaagctatagaaaaataaaatatgaacaccgggttttttacgtagttttgcagttaaaattct

SEQ ID NO: 106758 - DNA, 637 bp, Cannabis sativa
cggttttttgatgttaacggtcggttacggttttgtgaacaatcaaaccgtaaccgcctggtcggtttggcagcaggtaaaaaccgaccgtaaccgatcaaatttcacccctaatatctgcatggtgagccctcaatgcctccatctctttatctctccatttagcgaacatacacctttgttcgtcgaacgcgagatttactgcagcacgcagttcgtcctaatcatgatgcagagtgttgttatgaccttgcatgagtccgagcgcgtctcggagattttgtagttcagtggcatctccgatggtcgtctgggcattggttcctagcggaacagttgtattatggatgccctggttgggtgcagaattgttattcctagtctcttgcacaccaggcgcaattccagtaattggaactatttcaccattccccaagcttctcgtctgtccgggattaacagcaggcggaacccttgaacttcctgggttctgtgatgtaggatccagcgtgtgtgaatttgctaggttagattgacctctacgagtttgcaccatcgtgttggcggttggatgtcgaataaagagcgatttgtgatccttctctcaaagaaagcaccaaaatattgacttcgcttt

SEQ ID NO: 106759 - DNA, 532 bp, Cannabis sativa
catgagaaattttttcatgggcagcaacctttgatttctttttaggaggagctcgctcacgtttcgacaattgaggagcaaaatcggagtcatcatcatcttgaacaacaggatgtttgcccttattcctattagctacagatttcaatcccattttagaacttttctttggcacaggggaaggagaagaatacaactatggatgttttatttaaaaaaaaaaattgaaaagaaattgaaaataataaaaaaaaagaagagaaaaagagagggaaatgatgtaaggtatgattgatctaagtcatcaatggaggttacaagatatttaagaaaaaatatgaaaagaaatgaaaaatcaaaggaaaaaatgaaaaaaagagagggaagtgattgatggttgattgaagagggattgaagagatgcacgtgtcatatggatggggggagtgtgcatgtggtatatatgtaataaaataaagagaaaaggtaaaaatgttgaggtaaccgtgtgtaagtatttatgtaataaaaa

SEQ ID NO: 106760 - DNA, 919 bp, Cannabis sativa
gagagagatcttgagactcaacctacgacaagtgggttgcccccgagacatcatcaacgtccttctcgcactgatagggaaggggcatatacaaaccccagaaggggacatgtatcaactcgttcccaaaggagaaggcccgtacatgacgaagcaagttttagttcgagatgtacaagatcgcgaggtcatagtcgatctacgcgaggaggggatagaactcatcgtagtaatgatcgagagagtacgggcacaactagaacagagagttattcaaggacgagatctataagtaattatgatctagaacggttggatctttgtgagcaattgaaccagaaaagcctaaattacgtcaacaactcaatcaaaagcaagaggatcctatccaattgcgaatcattgatttggaggataaattcaggagataccatgatggggaatatgggaaattacctggttacgactcagacgaagaacccgagcctttccatccaaacattatgagtgttgaattcccccaaggatttaaaaaccctcacgtctcgtcatatgatgggactacggatccggtcgctcacctaaataattttaataccatcatgtgagctagcaatgttacgaataacttaggctgtattttattccctacctcgctagttggggaagcgagcagctggttcaacaaattcatccatcactcgatcacctctgggaacaactgtctaaagacttcaagaaacagttctaggcagcaagagataggcgacttgaaacgtcttcccttactaacataaagcattgcttaaggcctacttaagtcatttcagtacagctgctgcaagggttagaaacttgaacgacagtatccaacttactgctcttcaagtaaggatcacaactgatctctcgatgacta

SEQ ID NO: 106761 - DNA, 584 bp, Cannabis sativa
  modified_base (41)..(43): a, c, t, g, unknown or other
tacatgggatgaaatggctagaaagttcatggtgaaattcnnncctccatcaaaatctgcacagttgagaagtgagattgggcaattcagacagcttgattcagagcatttttatgaagcatgggagcgatccaaagacttattacgtcactatccacaacatggctatgagagctggatgcaagtctcaattttctacaacgggttgaatggaccaactaggactttaattgatgctgctgttggaggagcattattatctaaacatataactgaagccattaatttattggaggagatggccaccaatagctataattggcctaatgaaagaaatactcacaaaaagttggctgggttacatgaagtagatcctatgacaaatatagcagctcaaatttctgctttatctaatcaagaggcagccttagttaatcataagaatacatcaactgtagaaaatgttgctgctgcatctacatcacaaggccctgagatgagcatagaacaagcacaatatatggcctataaaacttacaataacaactaccggggaaatccaatgcctaactactaccatccgg

SEQ ID NO: 106762 - DNA, 831 bp, Cannabis sativa
tgctattaaatagccactaataatattattagcggcgcaatatggctccgctgctaataatattattagcggtgggaccccgccgctaatgtatttcaaaaataaaaaaaataaattaataaatatataaaaataataatatataaataaaaataatataaataatatgtgttgttgttttattgatctaaattaatggaaaataaagaagagctcaacaacaataattcgattattatggaaaatttatcaatagcagcaggtgcagtattagtagaataagaataataataaaataataataatagtattacgctataacaacaacaacaagcatcatctttggagttcatgaatttactgggaatcagtaatattaataaaataatcaagattttggttcatttttattctactttcctctacaagaagaaaagtccaataatgataataatatgtggatatttgaccctatcaataataaccatctacttgggttgtcactgtcgcccccgccattaccgcttcctcttccaccttcgtcgactgttctcttgccaggttttgaacagtacaactctgatgacaccaaacgactcatccactctttcttccattcaaatgaagaacaaaaacaaaaactagtaccgaatcaccaagaggaaataacctaggagaccagctgagacaaagcaatatatagatatataaaaaagataataatacatatacacattatatatataaatagatttaaaacctaaaaataatatgtatccctaaaatttttaaaatataaaaaccattgatatgttttttttttttaaaaaa

SEQ ID NO: 106763 - DNA, 585 bp, Cannabis sativa
cgccataatcagattgttcaactgcaaaactcctatggtgaatgaaaagactagaattcaggtctcaggtaatcactgattactttaactgtttttatgctactggttgtgccatctgtggtccagtaattaatggcatccgacgctctgttactgttgaacaaaatgatgctttactgctgccagtaacacctgaagaaattaaacaagcacttttccaaatgcacccggataaagcttcggggcctgactgaatggggcctggtttttatcaacaacattgggaaacggttggacccgatattgtgcaacttgtcactaatttttttgactccaaatgcttaccacctggtataaacaatacacatctggttctaactccgaaaaagaagcagttttctacaatgggtgacttgcgacccatcgctctttggaatgtctcgtataaaattctctctaaggttcttggtaatagaatgagaggattgactgatcatgttatctcaccaacacaaagtgcttttatccttggtaggctcatctctgataacattatggtgacctttgaaatcatgcactacctca

SEQ ID NO: 106764 - DNA, 640 bp, Cannabis sativa
ctaactagcattacttattctctttttttaattttttaataagacaaatctctatcaattgtacatcaagtttttttttgttatttgttcaaaaaaaaaaagttctattattattattattattattattctttattctttattaaaaaaacattcaaatacaattttggacaaaaaaaaaaatctactgtaagcgtacacactatttattttctaattatttttctatttttcctattattttattaaaataaactttctaatccaatttttttttcttttaaaatccttctccataatgctatataattacctatatatatttatataatagtaataacaacttaatataaatcgcattcctccctaaattaattagtctctctaatattaatcttcctccctacattactctttctacaatatttattaactttttttatatctacgtgaacagattgattataacatagtgatgacagagaatagaatcaagagactcgttatgatgaaaagagaagagtatcaatcaagtatagagttaattatcgcaatcagtcattgataaaaggggttttttcattaatgtacaacaaaaattaatatattacaaaaattgtataaaaaaacttaattataa

SEQ ID NO: 106765 - DNA, 546 bp, Cannabis sativa
ttagggagtatcgctagccaatcgtaaggcgacacgtcttaagggtgctaagcactactgttgctcaataacaatgatctaaaaaataatataaatgttttataatttaatgtgatagttaaatatactaataaaataatagaaatgccataaatgtaaataaaaaaaaataatgtatttattgtagtgtaaattttacatcacagcaaatattatgccaaatttagtacaaaatttactatgtgtcaaatctaaataactttttggcacacaatacttttcgttaaatgaattatattttagtttttcactaatcgcaacgacccaattgcaagagcggagctctaccaactgagctatttttagtggagatactttaatgatttactttttaatacgcttattattttaatgattattgctattgggtattgggcaacaatagtgatcagtatcttcacgcattataattgattagcttgttgaaattagttaattacatagaccaagttaggaacagtagtgccttttagcaaaaagaaccaa

SEQ ID NO: 106766 - DNA, 657 bp, Cannabis sativa
gtcatcaatttttccacgaatgaaaaattcagcaaacttgatgacaaacaatccacagtcactgcaataaaacaaaaaaatgaattcaaataaaaaaaccggtttttgtgcaaacaaaacaaaaactgacaaaaaatataaacagaacaaaacataaaactagtttcaattaaaaaaatatatgatgaaaagaggaagaattacctattgacctgacttggaagcccatctatgaacttgaaattcaaaggttctcttttcccaacagaatatggaccttgatccaaattaagatccggcctagaagaataaacatcaagatactccaaataaaatggcagcatagtataataagctttcacatgatccaaggcgcgtttcttgttgagagcaccagacatggagttatatacgttcaacatcctctcctttatgtcaaaatggaccaatatctaatgtttttgcttttgaatattgacatagataagaacatggtcagtaagcacccaaggagtattgcaaaacaaatactcaccaacaatgtatccaggaatgaaattttcaaagtcaatcttagaaggattagaacccgatttcaagaactgattgtaggaattccacatgactttatcaaacaaacaatcggtagtggtaatc

SEQ ID NO: 106767 - DNA, 727 bp, Cannabis sativa
cttcctgggtagggaactttaagcacaggtgccgaatggatgtgactgcgccaaagtctacaactggagtttaatgttcgaatgagacagatattcaatgtgtggttgagacatattacacaaatctctttatgacttcttttccatctgatgatgatattgaagttgccacttctgttgttcaacatagagtttcggatgagatcaatgagtctttattgttacctttttcggaaaatgaagtgactacagcagttttttccatggctctagataaaagtccagaagaggatggtatgaatgcaatattttatcagaaccattgggacactttagggccttcaatcagtgaagcagtgctggaatgtttaaacggaaaggctgatcttgcaatcgttaattctactgtggtaaccttaattccaaaaactaatagggcgaataatataagtgattatcaacctattagtgtatgcaatgggctgtataagattatttctaaagtgctagtgaaacagttacaaccgtggttgaatcatattatacatatagctcaaagttttttatttaaggccgacaaattacagacaatgctatggtggcgtatgaactattacattctttaagggcattaaattgagggcgtaagttagggctgtacaaaaaaattcgtaaaccgcccaaactgaataacccgcccaaaccaaaccgaaaaaaccgataaaaa

SEQ ID NO: 106768 - DNA, 603 bp, Cannabis sativa
aacctaagtatttggtgataaacgacctatcctccaaatgaaatgtacgaaaaaagagatctttaatctcagaatgagtattgggggaaaataaaatagaagacttgccaaaatttatcatttgtccagaagctttagaataaagagtaagagcttggttaagggcagcacaagaagtgggatcagcagaacaaaaaaggatgctatcatctgcaaacaaaagatgagaaatagaatgggcattcctagcaattgcaaggcccctaaggaggcctcaacgctgataattgctaagaatagcagaaagaccctcataacaaagaatgaacaaataaggtgacaagggatccccttgacgtaaacccctagtaggcttaataggctcactaacaacaccattgacagaaaaagaaatagcagcagaagataggcacttaaagataagagaaactaagggtgaaattcggtcggttacggtcggtttttacctgctgccaaaccgaccaggtgattacggtgtgattgttcacaaaaccgtaaccgaccgttaacatcaaaaaaccgaccgcggttataaatggtttttaaacggtttgaaacggt

SEQ ID NO: 106769 - DNA, 532 bp, Cannabis sativa
tttctcagcaacggatggtggtcatgctacaacagaacaccttcaacgatttgtgccgttacgccttagcagaacccaaaatgaccgactgctctctgactttacagctgttgatgttcacctcgccttgtctcaaattaacgctatgaaagccccgggaatagatgggatgcctcggctattttatgagaatcattgggaagttataggcagggacattactaaggtttgcttggacatcctcaacaaccacaaggactgtaggcaactcaataagactctcctttgtctcattccgaaaaccaaacatccgcaacaagttggggattaccgccccataagtctttgcaatgtgagttacaagattatagcaaaatgccttgccaataggatgaaggatagtcttaaagaggtcattttggaaaatcaaagcgcatttattcggggtcgtctcatccaagaaaatgccatattgggatttgaaagtcttcattgcatgaaaaaagggcggtttggaaatggaagaaagatg

SEQ ID NO: 106770 - DNA, 571 bp, Cannabis sativa
cctgcgggatgcacttttagatgggatgtggtgcatgaagagttgggtggttaggctttcgcgtgtgggcatgttgtcgaggacgccgacagatgaagtgggggagagaccctcacggttcactcaacagactagttattccttacaagcatcgagatgagtatcatagagattaattgctgttcaagatgtaaattcaagaagactcaggacacaggcagtgccatttatctagggtgaaagtctgcaggactcaggtactaagataacaccatggcaatgttggcctaaggtgaaagttagtaggactaaggtactaaggcaacataaaaatgtcgaggggcgaagagtcagaatgactgaggcactagttcaacatcatcatcaaagtaacatttggaatggagggatcgtatgcgagtatgcggttagcttgcgagctataccttgagaggtattcctctaaatgagaagttcttcccaagttgaaatgggggagccaactaattcatgtgtttgaagaatcaagtgttgggttttgtgccctaaataaaacaaatttcaatataat

SEQ ID NO: 106771 - DNA, 2502 bp, Cannabis sativa
  modified_base (67)..(68): a, c, t, g, unknown or other
agcttgttcttaacttttgcaactgagatcaataaaactcaaggggagtaggctattaccgacatcnnggccgaacctctttaaattctagtgtcttttatttacatttattgcgagttccggtgttattaattgaattttttattgtgattttggtttaaatctcatttattacgactccgcgccggttggctaaaaatccagtcaacagtggggtcatatgtatttgtgtgtattgctatataaagtttgacccaaataaagtgatcatcttagtaattgtgggtcattgggtattaaagtgttatggactaaatgtgtagataccctaagtgatatttctaatttattgaggggctaaattaaaaatacttaaaattaataacttggatatgaggttataaattggtagtggtccccaagaaacaagaaccaatttctattctcatcttccccatcaagagagaaaattagaaaaccctaatcttgttttcttggaagatcattacccaaaatcatcacaaagattatctctatggattaagatcgtcattatttttgaattaaggtacgcttccgctatttgagtttttctctttgaatcgataaaggtattctttggatctattgttatcgcatattttatgagtgataaagatttctaacagtcgggtgtattataggccatggtttaaaattgtcgactatactatagcgacagttttaaatcgtcggttatactatagcgacggttttaaaccttggcctttagtatcaactatagctgatagttttaaaccattgagaattcttttataacgattttttttactgtcacctattctacccagtactcgtgatgctcgtatgaatgacgattttatagacccttggaaattatttacccgacagtgtaaaaccactgtgaattctgggattttagtaatgggttgaagaggagcatgtccatgagatgcctgggatagtttcttcggttgttgaagattttttctacttccatgtcgatgctttagcaataaattattttgttgggattgctgcagtttagaaagattgtagttcgtttttggactctctggtttctgtaaaattcttgcttggttttggggatactcgaaactgaactaagggtaatcttcctgactgtaaagcttgctaaggatagaagaatcactcagttgacaatggaaacggattcagagattgctgcaaaggcttttcgtgttggttctttgccttttaggtgtaacacctatcctttattttcttcatgtcttgtttatatgaataattctgagtttgtttatgtggtttccactccttgttctacaaacttgctagctgactctttgacaaagtgggttagggttgaggtagttaattctattggttgtttaaaggatgcgacctcctttgtggtcactaccagtgtttagtatgtgtttttttctctctcaatcaataggtttattgataaaataaataaataaagctttagagttcttagactagaacaagaagacataacactaacaagtgtaaaaagagttaggctccaaattcatggattagaacttatcaatggcttcctcttaaaaccacatttacaaagccctaaaatgatcaaattagaccaaacaacattcgtaaaatgtatcatacaaaaggcttttcaaacagagacaatgtcgaccgttttgtgtatgtaaatatacaataatcaactttagataaagacatcacaaaaataaccaccatttcaagacatgagcatagattttaaagcccatttggtgagccagtagcaaagcacattccttaagggcatatgtgaaagtgtaatggttatgagaagttgggtagtgaaccattatttggttgtacatggaccactgtattttcaggcatagtggaatttatcaatgaccctaataatgattttagggtttatgataagttggggatttggttaagtttcttagggctaaagatacaactctagtgatggcatgaatgtttggttgttgattgacttgtttatagcaaccacaacaacaaaagaaaatgacataaatgtggatataaagtagaaccgaagggttggtcatggattgagttacatagcattgacaattatattgatagtaataaaatagtttttattattattgtgagaattattatcatttattttgtgaataaataatattttgaattattttttaatttggtcgtgaacatgttactttatgagataataaaagatggcttctgagaagttacatcttttattggattataagagataattatctcattttataagataaaaaagtgaactatgagagttacacttatgagaattgtcttctcgtgcaagaagaaatggatcaaaagtggatccaaacttgtgaaatgagccataaattagaagagcaattttggactcaaaaataaagtgaatcaatgtggattcaaaaa

SEQ ID NO: 106772 - DNA, 1009 bp, Cannabis sativa
ttacggcataaatacttaatattttaaattttattttttttacacttatataccacatgttttttttagcggattaaatacctaaagttacgtttacgctacttttctcattatcaattcgtcaaattatattaaaatagactaagttgacacctgtcaacatattagtggtccactaatatattctcaataaaaaattattaaataattttaaaatttattaaaaataaaacataaaaaatgtattttttttgctaagtattattcaataaaaaaagttattaaataattttaaagttaaaaaaataattaaataatatttatttaattaataaaaataaaaataaatcgaatttatagttaaatcttttcttatttcttcatatttgtgcaaataaatttgctgaaggtatttttataaataaaatcaattgtagggtataatattaaaaaaaatccttataataggatttaagagacttgtagtgatgaaggtaatgtaaatgtaactttaagtatttaatctgtcagaaaaaaaaatatgtggtatataaaagtatgaaatttaaaacatcaagtatttatgccgcaaatactctaagtttgaataggatttaacagaaaagtagtgacggaagtaacagaaatgtaacttaaggtatttaatctgtcgaaaaaacacatgtaatatttaagtgtataaaactaaaaacgtatggtatttatgccgcaaatatccttattttaactctttcaataatatctttataacttagctataataaatttgcacaaactctaataaaatgcatcatgtagctatggagagagagagctaaattttatttattcattttattactactttatttaagtttattaatttttaataattataaataatgtacaatataatatttttattaatttatatattattaatgtattaaaaatatattattttaatgatgtagataaaaatatgaagaaattgatgtatagtgtaatg

SEQ ID NO: 106773 - DNA, 760 bp, Cannabis sativa
cccaaagacagcttcccacttcctagcattgaccaacttgtggatgccactacaggtcatgagcttctcagctttatggatgcatactcgggatataaacccagtgtactatgtctgtaaatgcttgttagatgctgagactcgctatcctcaaatggaaaaactagtgtttgccctggtaatatcgtcaagaaaactgcgaccttatttttaggcccataacattgaagttttaacaaactaccctttgaggcaagtcttagcaaagccagaggcatcgggaagattgttgaaatagttagtagagttaagccagttcgacatcaggtacaaaccgagatctgcgatcaagtggcaggccttggcagatttcattcttgagtttccaagtactgaagtggcactcatagaagacaaaattgacactgctgtaccgaatggagaaggatggacgttgtacgtcgatggggcttctaatagcaaaggttccggtggtggaatcatacttatcagtcctaacaattttaaggtacacgctgctttacgttttgaattttctgcatctaacaatgaagccgagtatgaggctttgatcgcaggcttgaagctcgcccttgagatgaaaatagaatatttaaaggatttcaacgaatcccagatcgtcgtatgccaggtaaacggagaatatctggccagaggtgggcgtctagctaagtacctcgccatagtatgcgagttgttgcagaaattcaaaaaggtg

SEQ ID NO: 106774 - DNA, 540 bp, Cannabis sativa
cccacatcagagctccctgctccactctctccctgttcccactctctctcccttttctctatccccttgttccaactctctctccctgctctctctccatgttctcattccctctctgtgctctcttgctctcccttgttccctcactcactcacttccctaatcactacctaataccacctgctccatataaaggagaaataatacttagagtatatatgttacaatggagtgaccaccaaaaggaattgaggaggaagttccaactaagttcaaataacaagactcacctctcatagacccatcacttagctaaatttcttaagtgttatactcgtatcatgagcataagctataagagagggatgccaagggaacgtacaacaaaagatgaagcggttaaagtatgcacgcctctgagaaagtagtggttgtacgataagtacaagtagtggagacactatttgtctcactcggagtactaactgacacccaacaaccaaatctccactactcgtttgatatgctgatcttcatgat

SEQ ID NO: 106775 - DNA, 576 bp, Cannabis sativa
  modified_base (31)..(31): a, c, t, g, unknown or other
  modified_base (283)..(283): a, c, t, g, unknown or other
aaatgtgtgacacacttgtaacatttatttnatcaatcaaaatattatataaaaatataacattcccccactttgattgaataaatacacatttttaaagaagttttatttaggtgaattaggtaaaatgtctttcgacttgaattttaccttaatgtagttaccacaaagtttgatgaaattttagttgccgtagcattgaaccactattcctttagtacaaaccggtaataacacacacaccctcgctaatgctcacttgagaccgcatctctcgctcttncaccgttaatggtcatgtgcaaaattctaattcatcgactctctacaaaatactcccaattcgcataagaggcgataccacctctagtccatataggtggaattttagtgtctcactctttagtccatatattgtaatccctattacattataaaactaatataatagtgactacattgttagaaacctattttgcttttctttttacttttatttaactttaaatattaaaaatagtaaaattaaggatatttttgttaatatacttcttactttattcaattacaatgctc

SEQ ID NO: 106776 - DNA, 4114 bp, Cannabis sativa
aagtaaataagcattggaacttattgggatatacaacattaatttaaatttttttttatgtgttattttttttactttttttttttgggaaccagccactattatttttttttaaaagtgtatatattgcttttttattaatctatagtgacacgctaattgtgacagagtaaatatatcccaacatgcatagtgtgtcactatatcctttaaaaacacctatagtgacgtgccaggaggagggttgggacacactttcccagtcactcttggcatgactctataggttggcatttttaatacaaaaaaaaaatttgaaaattataggtattactatttagtgacacttcaaattttagtgacccactttacaagagactaataacaaaaatttagagtctaattatgtgtgtcactaaaaatgattcctaactctttagtgacgcgcacaaaagtgcgggtcactaaatagtgtcactaaaagcttcaattgtagtagtgcttttttgatcactggggtcaaagtccctactcaaaccggtactagaaggtggcttccatgaatctcttctcacattactcttcttttgtatttgatcctcaactcctttagaaataatagccaactctacaacttgagcatacaattgtacaatcccaagttgattagtcgtcacaatcacatctcaagctatatgctcctctaaaccccccaatgaacctttttctttcttgaggattgagtggccacctctttggttgcaaatttagctagtcggtcaaacttagtgacatactcaatcattatcatgttacattggatcaattgtataaaaccctttgcttaacaacactaatgtactcattgtagtacttctcattaaacagtgaccataatgtatctcaggtcttaatatccaaatcatgaccctggacataatctcaaccatataccaacatctcctatatcttaaagatagcacaaccaacttaatcattactttcaacccacaaaaatcaaggacgtgaggaactgtactcatcaactattccgctttaagtggatcagggtgaccctaaaaaataagaggattctacttcatgaaacgctcatacaaaagcttcaaacggtattcccacatccaacagcacaacataaggtgctagagggatagggacattagcaggtcgagccttctgctctatcatttctcctatctactcaccatactgttgaatagtcctttgcatggcagcatacatcattttctaattctatggtagtggaggattctcatgctttcaatcatccctataagtcaaagatttctaaattatgtctatcctatcgccttagaggcatttctaaataccctgcaatccttagcttacactgatcgaaactctcgcctaaaataataattctaataagcatttcctcttatacattacttaattattaagaacatacttatatcatatttttctattaacacatatagtcatggcatactacaaaacaaaacttaacttatgcttttaaagtaatcacatattgcatgaaaacaaataacacttactatatcatgagtcaaacttgtctttgcaacaaatgtacatattcagtcagtctttacaaactttaaaattttggtcactttgataccatgctgtaaaaccctaaccatagggacaccatgtgtgtgcttttataaattagtttataataaaaaattaacggtttagataaatattgataattaaaaactttactaattattcaaaatatataaaaaaaaaatcatggcattataaattattagctttgggaatcccctttaaaattttacaaaagttgtcatacgatgttatatcaaatacactttgcaactcaaaagcgccataatattaaatcttgaaaactcggcattggtagtcgtataagctgatatgtacatttgtcagggaagacctcagactcatggctaacctatcttgttcttgcccttatctgcacctcaaagcacccatgagccacaaagactcaacaagaaaagtaacataaaaacacaaacaaatacaatcaagtaaagacatactttactccatgaacatgaaaacacacaacacattgtaaacaattattaatatcaaatatttatctaataagacaaactaatattattactttataaagtaaccattattgtctgctgcctaataaaacagacaatcaactctaatactattgcctaatgagacaatcaattccaataccgttgccaaatgggacaacaaatttcaataccatttcctaatgagacaaccaatatatatgaaacctaacaacagtttcaaaacaaagtaataactcttcctagtaaattgtaattaccctataacatttataatattttgaggtacaattgtactttctttttacctttaatcaaaattcataagtgtcgatcaacgtgagtagaaatcacttgacaatttggggccctatgtcacaatagcagttaatcagtaaataactcattttaatctgttatgggacttaagctcaaaactagaggtttccttatcgataaaaaatgtggcaatagcccaaatatcaagaaaacataatagctaaggcaccaaaaactggcatcatacgggtaactgaattcgaaaaggtgaaccagattttaaggtgcataccagaccatcatggtaaccagattcctctagttaagtggtttgcacctgaaaaccaaaatttgagttttttccaaactcaaatcttacccttcttgctccaaacctgatttatacctctaggacaattcaaatactcaaactaaacttgctcgacaacctaaaacatataaatatacaaaaatcacaaaatcaccatgggagagttaacctttgagctcaaaagctctaactccactctccaaaacaacataacaacctaatcccctaaaacaagcatcatttcaaactcaaaacagaaggaaaaccctctcctatctcaaatatcacaatagaaacataaacttaaaaaccacttcaaaaacatattttcaacttactaaaaccaaaaggaatactaaggaaacttatcccaaatcttgtacagctcctaggcttgattatacagcaagatttgaaaagaattggtgagaaattttggatttctttggtcttttggttcaaccaaacaagagagggagagtgaatggagatagacatatgttttgtgtataaaagcttcaacaaaaaaattcattttaaaataataggataataacaaaagaatttacataaaaaatttatttaattaaaaattggcaatgtaccattttgccctaacaacaacataacacttaactaaaccccatgggtaaatcgatcattgataaataacccacttaaccccataatttctattatcaattaaaacctcttggtaacacaacattacacactaatattgtcgtgatatttctggccgaccaattgacttttcacttttgctgagcctaaaaatattttatttcatatgatacaaatattacatacataatctaatataatatctgtaattaataaattaatcttaatttacctatttgtaataataaacctagcttatcataattaaccaagtaaaattatagtcttactcatctattctcctaatacacatattacttgatatttcatataatatgcttcattaattagaattatatttccagaatattacatttaccatttatcacatttattaatttaatactattttttattttaataatcatcaaacacaattataatttaaatatatttataaatttagactcagaaagtgtcttaattaatacataatcttttatttatctcttcttctcaaaatggcacaaactaagtgaaaattctcaaataagacataatctattctcgaaatctaattaatttattaaatcaattaattgagtctacaaggtgatattattacagataatatggggaccatgagtctatgaaataatgctctaaataagtagatctaaaatttaccgagtaaattttctaacttattaattcctcccgactccac

SEQ ID NO: 106777 - DNA, 584 bp, Cannabis sativa
gcaaaatagattcattaaaaaaaaaatctttaatgctagcattcgaatgcttattgtgtaaaggatatatattttcgtaaaatatgatattaggataatgaaaaatgtcttgagactcaacatctaataaagtataagctttcataccatgaggtgaggatagccaataaaaatacaagccttagctctaggagaaaacttatggcacttagcatcaagagtagatgcataagcaaggcatccaaaaaccttaagatgatcataagtgggctgcttattatgttaaagttcgaaaggagatttcattttaagcaacctagaaggagtacgattaataagataaacaatcgtattaacaatataactccaataaggtaaggataaatgtgattaaaaaagaagagcccgggccacatttaaaatatgttgatgtttccgttcaaccattgaattttgttggggccgatcaacacaagagtgaaagttgttgacgccattcgaagcataaaaggcagtaaggttaaattccttggcattgtcggagcgaatgaccttaatatttatggaatattaagttgcaataa

SEQ ID NO: 106778 - DNA, 502 bp, Cannabis sativa
  modified_base (456)..(457): a, c, t, g, unknown or other
attcccattcccattaccattcgcattcctattcccattccctagcccattccaatttcgattctcattcccattcccattctcaatcatgttcacattcccattcccattctcattccttttcacattcccattcccattccctggcctattcctattcccattctcattcccattcccatccccattcacaatcccattccaattagcattgccattcccattccccgacccattcccaatcccattccttgacccattcccattcacattcccattcctatttccattcccattctgattcctcaacccattgccattgccattccctggcccattcccattcctattcctattcccaatccccattcctattcgcattccccgacccatgaccattaccattccaattcccattccccagcccattcaaaattagttattttgttaaatatnnaattatttataaattataagttttaaaatgatattttactatttt

SEQ ID NO: 106779 - DNA, 508 bp, Cannabis sativa
cttactttaattcttgtctttgaaaagattaattagtcaccaataatatgtaaagtgaaaaatagtaaagaaaattaggaagaaaaaaaaaatgtgtggaatttataaaatttaagtaactttatttactgtatcaagaaaaagttgaaatataattatttgttgtaacactttaacagtggtgtctagtatcgtctgacgtgatatattgctatgctatcgctattggtgtaaacaatttagtttaagaatttcttcatattattttgcaatcttcagttcttagaattttattaagttgccaccgaacttttttgaactgctgtaagaaaaattaaactgaataaggtaggggccgcgcgaacgcaggcccccgctacaacaaattatgacgttagctctcccacttggggaaactataagccagcacccctccaaagtgcaatggaggccactgagcctaggccacgagcattcctgatcacccgtagaccccgtccaggtaagt

SEQ ID NO: 106780 - DNA, 1763 bp, Cannabis sativa
gtacgatctgcaggctgaacattcagaccgaatgtgattgcagatttatcaaaattgacttgttgcccagaagccctctcataacactgaagaatccgacgaatagactctgcttccctaccattagctctaccaaaaatcaagctatcatccgcaaaaaataagtgagacacccgcggaccagagcgagaacacctaaaccccatcaaatcaccactcgtctcagcctgctgaaggagcagtatatacatatttttactatgtttgttcttcataaatgttggtcccatatttaatatttattttcacatctgtataccatctcaaaattaagaaggattcatttaaataataataataataaacaaataaaatgggttacatatttctattttatttagtatggatatatgaaacacgtcaactttatttttttattttttttctccaaagcattgctcaacacccaagaacatgatatataaacattgatgcaatttaaaagttagtatcataaattacaatttaaattaaaatagtagaaattagtgggaaattttaaagaatttacttttttttttcatatatttttaatttatttggtttataaactttaataatctttacatttgtatagataaacttataccatatttctgaaaaaaaaaattaaatactatattttatatttttttcctttttttctacaaaaaatattttttaaaaatctgtgttcctttcatcttcttcctcggttggtaccttcaacccttaccaatgtaatgggttgggttagagccctaaaccccagaatcccaattttcaatgcttttgccgtctgaaccttatcgctagggccgatcttgagtaataataggcccaaaaaatttgttgagtgtgtattttatctaaagtaagatgtaagtatattattgagcctttttctacaaaattttttaagaatatcattttttttaatgcaaaaagatatactatataaaaaatttgaatcctgggtttgagtgggccctaggcacgagcccagcccgccttagcctaggatcgggcctgcttaccgcacacaatatcattgcctgagccaagtcaaccttcactagagcgagtttcgccgatcacagaggaagtctccggtctgacgctgctggaggtcaccgacctgacggaagtccttagtgagaaattgggcgtgaagtgaaatggatcatcgaaaaagtatgtttgatttctcaaaattactataaaacaattcgtacttttttgaatattcttagtgtatttttctttttctttttttgaatatttaaggaagagaatggttattcaaaaaaaaaaaagaaagaaaagaaagaagagaatggaagtgacaattttgcagttcagctagcagatgagaaacattgggatgaactagttataatctttgttgtggtatacatcttcccttttaagtgtttctattagttgacagacttgtatttccccagttgtgaatgtgatgatattatagttttgtggtttttgttactgtgaaagtgggaagtaattatcttttacattatgttagggtagactatctcattagtttcctaaaatatttgtgttgatgatttgaagtcttggtatgaaagtagatcctgaatttgagattgttgttgaactagcttgatttttaattgagtaattggcggctaaactctcctaactcttattttacttgtaattaaccatccaaacttaaattt

SEQ ID NO: 106781 - DNA, 644 bp, Cannabis sativa
tagaagagttgattcgaatgcctactctctaggttctatttatagaacataaaaaccctagagatagccacaaagttgaatctatagctgtacaaaacttttctaagaaaaacttaatttgtagaatcagaaccagattctgttgcagcaaatcagaccaggaaaagaaacttgtcaaaaacgagtccgatcttgtattgggtcttgatacctgccataaaccatgtatatgatctgatcttatcaagacacaatcaaacttattaaggaaaataataatagtcaaagtttcctttaaaaaccaacttttcataagagaatgtcttctcttacaagaagtttccatacaagtaaaaatccagctgaaaaataatatttcctaagaaagaaaagagcaatataaccgaataataaaggtgattaaatcagattgatagcacaaagaaatctaaccataaatgaaaaatattttagcatctaaattatcaaaaaaaaaactttacaattacatatgaaagtttggttcatatattacaatcttaattcaaaatgtaagggaaatttgattttctatacttagaaaatcaaaaaatttgatttctaaaccaataatttaaaccctaaaaaaactatacctttttttt

SEQ ID NO: 106782 - DNA, 1490 bp, Cannabis sativa
  modified_base (768)..(771): a, c, t, g, unknown or other
ccaccatgagcttaccttggagttaagcatacttaacttggggtgatctcaagatgggaaatcttcccgagagtcatctcggaaagtgtatgagtgaggacaaagtacgttagaaagattcacattatgatgcagaattagtagtcgttccagagattatcaagaggaagggatgagttaatgagtagagattgataaggtattgagatgagtatatagtagtggacggaaagaagaagtgctctaattgaatatctatcgttaacgaatacttaacttgttattaagttaagttagtagaccaatttaggagtatccatgggaggaataaaaaggcataattatgaattatggactatgggatcttatgatttcaaccaagtagttgtggttggacatactgagttaatatgctgtctaccattgcaaataatttatacgataaataaggatatcgaatttatacgaaggagtagtctaatgaaattccaagattgatatatttggctatgatgtccatggagcttcaagtaaaaataatatgatgttttattcttgaaaggttcgtaacctaacctgagtgagaagataagatcaaaatggaatgaatattagtagaaacatgaaacatgttgtgagcatatttgataaaggttaaattaaattagaataattacttttcctgacgaagtgtttgtctagaagtgataattaaatgtactattggttaggtactttaataagtgtggtacgagaaaaatattagannnntgttcactagagtaagtaggccaggtagcttatcagttagccttaactcctacgttgttcggagtagataatatgtttcatgtctccatgctgagaaaatatgtatcaaactcgacccatattttgagctatgacaatgttaaacttcagaaaaatttattatttaggaaaaacatcttgtctaggttttggactagaaaaagaagtactatgaaataagacaatttcactagttgaaaaagtactgtagaacaatagcaagatagaaacagtaatttaagagttagaatcataaatacgggggcaatatctcgaattatttaaataaattttgaggacaaaatttctataaggaggggatggttgtaatatcccgaaaagtctaatggtaaataattagggtttatatttatattatgggttaatttggtaataagtggaattatgatcctactaatctattccaacataaaatttaaatttcgctataagtgagtaaataagcgtaatttataaattacggaaatttatacagcatgtgtaaatgtaatatgagctatatgtgaaataaaaatattttcaggttcgtcggccataaaaactcgataagtggataaataagcgtaatttgttaattatgcagatttatttaaaatacatggatatattatgagttatttgtgaaataaaatatctcatgttcggcgaccttggagacc

SEQ ID NO: 106783 - DNA, 801 bp, Cannabis sativa
aatcttttttcattgttggccaaaagtatccttgtctcaatattttctttgagagactcggacctcatgtacgatctccactgaacccctcatggacctctaacataattttcttagcttcagggtctgatacacaccttaggtacggcatgctgagtcctcttcggtagataatattatccatcatcacatatcggtgcgcttgatactgtatccttctggacaacgccctttcgtgaggcaactcgcctttagttgcgtacttgatgatgggggtcatccagtttgtctctggctcaactgcagccacaatatctttgactttaatgcttggttccgtgaggcgttcaacgggcaccacccccagtttctcaaccttgatgtctgatgctaacttagccaaacagtctgcgtgggtattcttttctctggggattccttccactttataatctgtgaactcatggagtagctcccgaaaaaattgctacatacgcagccattttttctccacacgtttgatattctcccgacacttggtttaccaccaattgcgaatcgctgaagacttctactctcgtggctcccacggtttttgctaatttcagccctgcaattagggattcatattcagcttcattgttggaagctgggaattcaaaacgcagagtcacctggagtcgaagtccattctgagatatcatagttatcccagctttggatccgtttttgtttgacgctccatccacgaatactttccatgctggggtttgtggtattggtacatttgcgctagcttct

SEQ ID NO: 106784 - DNA, 745 bp, Cannabis sativa
ttttgagtattagttccttgattcgccctagccgttgcagcttctctttctaactcagtgtttcgttagttagattcggataagcgttgtcaaagttgtctattttctaattccactaatggtacatacctagttggatcatatgcatcctcacttctaggtacatatcctgtagaattattggtatcttcgttcgttccttctaggttttgattatcaccaccatagtttctccttgaacgtgatgttctagtagtgtggggcctttgagaatccattgactttttcctaggacgatgtgtagtttcttcagggcaatttccatcgttttgattgttatcatccatggatagatttctatttataaggatggatttttctgagttttatcactaaggctctcaacaaaagcaccaaactgttaacgtagaatttcgttaaccaaaattaatgaaccttttcgtaataaatactttacagatataataataaacagcttaaaaattagtaactccaaatatttatacgaggttttgtagttaaaattttcatactccacgagtctttcttattaataatatttttcgagtacagaatacaatatcagaataatcgaattttctctcaaaattctccgtcccttttttttatggaatctacccatatttataggaatataggttggcagttattttcttgggatcagtttaaaatgtaactgttcatgaaacgtggacaatttcca

SEQ ID NO: 106785 - DNA, 902 bp, Cannabis sativa
  modified_base (836)..(844): a, c, t, g, unknown or other
aaaaattaaaagtcacccataaaattctcaaaaaccaagaatttcagttatataggtatactttatatagaatagatattgaattaagatggagagagattttgaattaaaggaccaaaagaaagaaattaaggtaaagggccaaattatatatgtattttttaaaaagtaaataaataaacaagaaatgttaaagaaaatagaacattttttttttagaaatgcgaggtctatgaccatcctttgcataaaggtgactagggcttcacatagtgacgagctaaaatttatattttgtgagagcttattttttataagagaaaattacataaaatgtggtaaaaaaatgtagcagaaatttttaattatctttttcttgcatttgttgaacgttgacatatggtattgttatacccgaaattcagctacgtttcagagggtgacacatgtcaattagtggaatatgaaccacttggtataatagcgttatatcattcactactaaaaaattaggttttagtgacacaaattgagtaactctaaaagtgtatagtgacacttcaacgcgcgtcactaatgaggttgactggaaagacagtttttagtgacactccatacgtgtcactgaaaccttttgcattcattttatgcgcgtcactataggcttatagtgtcagattttgtcagactgaaaaagtaatagccacacacacaaagtgtcactatatcctatttttttattaatatttttaaagatatagtgacacaccaaaagtgccactatattttgctaaaaaatataataattgatttttttaattcaaattttatatatnnnnnnnnntaatttatattaattatatacaaatataattaaatataacaataataaatttaattaa

SEQ ID NO: 106786 - DNA, 1054 bp, Cannabis sativa
  modified_base (852)..(855): a, c, t, g, unknown or other
ttaattttgttattatatatattttttttaaaaaaaaatatgtaataaatctatttttataatttttattatctaatttattacatgtggtcattttcttaatttttttaaaaagtggacatttactaacttagttaccaaattgagggccattttgcatctcaacccaatacaaaatactaaaaaagtatattccttattttgaattaaagtaattatattaaactatacaatttaaataaattaattttttaataaaattactaataaatttaagtgtttgattttatattttaccacacaaaatttttaattataaaatttgaatttgtggcaaaaatctttatgtttttacaaaattagatttataactatcattaacattttttttaatttaatataaattatttttaaaattaaatttgaaaaatattttaaaatattacattaatataacaaatattttttaaaataagaaaagactaaactcttaatcatatatattcttaatgggcattacccatgaataagtaatattaaaaaattttgagtctttatgattaatttttttatttaattaaaaaatttctctgttttacaatatatgtgttacgattaatccatctgctgaaaaataataataaaaaaaaaataagcaaaaaagtgataaaaaaaagtagaattagacttaaatattttttcatataaatatatttttgatatactgtaaaaaggggtatttttttttatattttctttaactaagtagctaaattaaacataaaaattcaaatttctcttttattattcgctatgggaccaaaatgtaatggtttaatatttttaaaattnnnntttatagttaaatttatttactacacattaatgagtaatgcccattaagaagtattccttattccatatatgtatatatataaagcagaggaatgaaacagtgacataacactctaaaatcgcttcaaaattatcttttttttttcaccttaattatctcatggaatgaagcggtgacatggtactctaaaatttcttt

SEQ ID NO: 106787 - DNA, 584 bp, Cannabis sativa
  modified_base (543)..(546): a, c, t, g, unknown or other
tctccataggtttaggatgccctccactcggtggggggatcatgcaaatgagtattacttctctcacttaggcgattatttaggccggtcccggatgggtactggacctccagtgcccattcccttggactcttcagcctatctgtcttctagctggttccgtccctcggacagctatctcgggaatgatgcagcaagtgttaagattcgggactttgctagggccgaattagagagtcagggtagggctagctggatttctttttaagtgtacactactttcacagatattctaacactctactcttttcccttgttgcagcagccgatcccacggatgcaatcttggccacccttgctggagcccacagtcctgatgtttcccctcctcctacttcttcccagttggtcacccccgggaaagcttcttccagcgcccctccgaacactattgacttagtggacgaggaggagaaacttcttgaggaagccgaagaaggtgaagaagagcaaggggtacttcctgaggaagttgaagaaggnnnngaagagcaagaggttgctctcgtgcgcaagcgtaaagg

SEQ ID NO: 106788 - DNA, 3183 bp, Cannabis sativa
aaaataaaaataaaaaaataaaagttaatggtttttttaataaatattaaatattttattatacgtgttaaaaaaaaaattaaatgacatgacaaaataatagtataattatatatatgttattatgatgatatgtgagaatgatgagtcttattattactaatgcattgagacagaaaaataaaatgtcagaagaaaaaagaaaaaagaaaaaaaaaactagagaagtgtgtgcgtcaatgtcagtgtaagaaaaataaacatttttttaacggtatgcatgtaacggtatatatgccaattaattgactaataatattatgacaattaattttaaattttagtatattgatgcaattaattcataattaaaacacttaatggaaaatactgcaacccaaattttgatgatcaatcatctcagaatgtgaaagctaaattaaacgttgtgataaattaggaacaaaagtctaatttaaatgggcttggggatttaattatattgtagttggaattcttcttgtaactttgccggctaatcagattggatgtctataagtccttgtgccattttgcatataaagtaaccttattttgttttgcactgtttattgcttcaggcacaaggactgcgtagatgcgttgaagagattgtattttcttatacctatcctcgacttgatatggaggtatgtgcaacacttctacttcattctagcttttttgtatcaactttagatatcacattagaaacccttaagatgatttttcttttgtagttatagtaaatgatgcaatttatgacagcaagtgtgcaaatcatctgatgtgtagaaacatctactcattggctactaatacttaatgttgtaggtttccaaacacatgaatcatttgctaaaagctcccttctgtgtacatccaaaaacaggtaagtgtctgcttgtaaacctgagtgttgtgcatcttcaaccactctatgtttaagcctttttttgttttaaaagattgacactcaactgtctggatcttcttaaagttgctaaattgctatgtgtgactttctgctgtaggtcgtgtttgtgttccaattgatccaagccaatgcgaggaatttgatcctaccacagtaccaactctttcccaggtaatgctcactattttttttttttattgtccaaaaaccttaattaatgttagagcattctttttccgtcattattatttgtcagtctcattcttttgttaatttccggaaactggtttacagaaaaccttttcacgggtgccttttttctctttttttcgattcaatgttttgcttcaatttgctacccttatgtaagaacgatattttactgattaccgattgtgcaattgatacatggtctcgtgatttggatactttcttatataatttgttgtcttttgcagcttttggaagaacttaacattggagggatgaaagcagatgctgataacggtatgtatatacaactcgtaatattatcttttctccattaagatttacagaggcagagtgtgagagattatagttagcatataaaataccagaacacacaaaaagtggcatgatgatgacgtgaacttcttttgtaccgaactctcaccccaaataaccgaagctgaaccatttaaatacccaagaattttagtccattcttcatccaagttgggcaaagtatttctgcgtatcattcaaactatgaccccaattcagggtcactccctttcccttaggatagctgttctttttgcaacttgggtcaataaataatgttggctgatattggagatttgttttcctttccataaatttgcacaaatattttttcttaatttaccctacccttatttttcacctgcagattgggataggacttcacttggaaagtcaatcagatttttcagaacttcattcctccagcctctactaaaatcctgcaaggtatatgacgtcctatttcgtgttcctctaattttttagcagataactatctcgataactatctatctcctatgcctaccggttttattgctttgctgccaaaccatcaaattttcaagaaaaacacttggtttctattcaaatgtacaatgaattgatgtgtttcgaaatttcgcaggaggatattgaaaattcatacagtgcaaaacttcagcattcaaagaactcgattagttggtagcaccttcctaattattttaacatgatgctctccgtttctcggaggccataggcgcttttgttgtaattttatttcaagtaacttgtctttcatttcagtgactgattattgtatattccccacaccactctttccaattcatatactatggtatattctgcttttaagaggtgtaatggctttaaattataatgcttaaacaacccatgtgaaatcttgattgtgtaatagcttaaaattatatgcttatcctgtgtttgagagatataatgtggcttaaatgtagaggccattttgggttgttgattgactctatcttttgaattgtgatttgggtcataacgtgtcactttgaaattttaagttgagattcacaagtcatataaatcattacagacctttttgtttacactagccaatttaataacagattaaatgtttgacggaattttcggtaatgacaaatgcatcactttcacatatttttattattgtccttttacaggtttcaggcaaaaggaccacaagttcgctttcccaaggcaaggctttattttttacttagccaactactcttttaaactggggttaatttaatttgtaatcttaggttctaaatctcaaccaatttagatcaaaccatttaagataggacgaaatgaatttggtggcaatagttttgtcaattcgtactgtttaattctttggtttagtcacggttttaaaatttttgtccgtggttcaaaccaaactaaacctcctaattctttatatataaataatatgattaattttttttattgaatattgacatttaggaacaatcttagcataatattgataattaccttaacattgtgaagcatattttgtttcattgttatgtaatatgtattataatttacaaattacaaactacggtttcgaaccaaatcaatttattcttaagttgattgatttggtttagtttgaa

SEQ ID NO: 106789 - DNA, 561 bp, Cannabis sativa
  modified_base (524)..(525): a, c, t, g, unknown or other
caaattgttttttcaaagcttcaaattgagctttcacagtgtcctcctccttcaattggtagactccggctgttcgtggcttgtccgtaggacttggcacactccatgtgtaggattcttttagaaatttcttcaagatattccaaagcttcttcgggatctttctgaaggaagtcgccattgcacatcatttgtacgaattttcttttgacggttgtgagaccgtcgtagaaatagctgacaagacacaaactttcgtatccacgatgtgggcactggcccatcaaatctctaagcctctcccagactgatgaaacgtttcttggtccttttgggtgaaggtagagatttgcctcttaaggctgctggtcttatggggtgggaaaattttaaagaaaaatacctttgtcatttcatcccatgtcctaaaagatctaggcctaaaggaatacaaccagcttttagttttttccttgagtgagaaaggaaagaacttcaatctcaccaagtttatgatgtcagcnnggttattgaatgtggccaccacctcttcgaaggcct

SEQ ID NO: 106790 - DNA, 535 bp, Cannabis sativa
taactttaacataaaatattcggaaacaaaagtaactttatagtttattttatagtttgttaatgaaaaagaaaataacgaatataaattaaacaaaatataaaagtcaactaattttacaaattactaaaaattatttgttaattcatatctaaaagttactatatggcatgtactttatataagtttattttatagagttatttttaataaatttttaaaaacaacttataagaaaaaccaagtggtatcttttttttttttttgaaacaccaagtgatatcttaaatatcatgcaatgattatactacgaaaagaaaaagacaaaactatacttatatttttaatactaaactatttggtaatttttttttatatattttattgtagcttaattatatttgaaagtatcataaaagttgctataaaaaagaagtaacataaatgtatcttgatcaacaacattatataacttaaaaatgaaactatagtttgaaagttagccaacccaaataggtaaaaaagttacataatt

SEQ ID NO: 106791 - DNA, 724 bp, Cannabis sativa
ttgattatgagccatgaacttaaataaattatccttaccctattttgcaccataaacataggttgttgtgtactaaatgaaaaatatgatgtaaatgggatgaaattttttttttctaagaattatgtttggaaatgatgtacgtgcatagagagttatgatccaagtatataaaaaaaaatatagcaagagatgaatttgataggattataactctaattatgtgaacaaaggggtataaattgaaaaaaattattatcgggagaaaagaaaatttatgaaggttttgtaatttttgattagatttgtaaatttatggtgtgaaactagcttaattgacattcttatctaccatttacctaagcctaatgttacatgcctataaagtcattttgatctacatgactttggtttacattagtggagataaattggttaaaccatcttatggttatcttgaatattttgtggtaagggaagtctttatgcatatgaattacatgtatatagagttagtagaattgacatatacacatttttattaataatacaacattggaagttaagtttaaatgagttgaaattctagtcctttgtttgaagtgcatattaaataatggaaagagaatttgtattttgagataaattatctttggtctaagtttcttgatttatcatccaataattgacttgttagttattgtttctttttagtttttttttt

SEQ ID NO: 106792 - DNA, 1239 bp, Cannabis sativa
ttttttagcaattattgtcttcattggctcggcctccgtccactttgtgaagtagtctattgctactatggcatactttacctctccctttaccgttggtacggacccaataagatctatcccccagaccgcgaagggccagggactagtcatcagggtaatctcgttggggaaggctcttggtatgttcgtgaatctttggcacgaatcatatttttggacatagtctgtacagtcttttttcatggttggctagaaaaacccttgtctcagtatcttctttgagagactcgggccccctgtatgatctccgcagaatccctcatggacctctagcataatttgcttagcttcagggtctgatacacaccttaggtacggcatgctgagtcctcttcagtagagaatattatccaacatcacataacggtgcgcttgatactgtatccttctggatagtgtcctctctttgggcaactcgcctttggttatatattcgatgatggggatcatccagttgagctcttgttcaactgctgccacaatatttttggttttaatgcttggttctatgaggcgttcaacgggtaccacccccagtttctcaatctcggtgtctgatgctaacttatccaaacagtctgcattggcattcttttctctagggattcttttcactttgtagtccgtgaaatcatggagcacctcccagacaatttctacatacgtggccattttttctccacacgtttgatattctccccacacttggtttaccactagctacgaatcactgaaaacttctactcttgtggcccccacggcttttgctaatctcagtcctgtaatcagggcttcatactcagcctcgttattgcaagctgtgaattcaaagcgtagggttgcctagagctggagtccgttcggagatatcatcgctaccccagctccagatccattttcgttggaggcaccgtccacgaaaactttccacgctgaggtttgtggtgttggtacgtttacgctagcttctgcttcattgcactctgttatgaattctgctagtgcttgtctttttatggaagtgcgcagtatgtagtgtatgtcgaactggcttaactccattgcccacttgaggagtcttccggatgcctccggctttagcagaacttgccggaggagatagtttgttaatacgttgatggggtgagcttgaaagtagggtcttaactttcttga

SEQ ID NO: 106793 - DNA, 505 bp, Cannabis sativa
gtggtatatgtgtaataaaatataaagaaaaggtaaaaaagttgctttaaccgtgtataggtttatatgtaataaagtgtgcaaaatggatttttggtgtaaaaatttctaaaaactttattaattaacttgtttcaaccattacaataaaaaaattaaatcaaccgaacattgttctcattaaaaatgtaaattgaatataaataataaaacgtgtaactttatttacagaatatttcacgaaacaaattttaacaactttaaatcccctaacaacaacttacaatcttgtacacaaaccaaaataaaaaggcataaaaatagagctttgtaacgcttcaatggttgccaaactatttgcctcaagttgaatatcaatctaactttttcttttgatccagcttattaaggctttcttaacttaattaggatcggcccaatctcttttagggtcatcggaaaaaaaataaaaataggacctttatttacattaaaataagaaaaa

SEQ ID NO: 106794 - DNA, 793 bp, Cannabis sativa
gctttggtgtacttaatttggaagactagaaacatgaaattttggcaacaaaaagaagagaattcgaaagcccttatacaacaattgaaaattacttgtaaaaatagaatacatagtgtatggcctaacaaagtacctctagaagatttatcatggtttaacacattgtgaattttatgaattgtatagaaacttttttggactcttgaaattaaagagtgatgttaggatgtaaaatacatagttcattggagtaatgaagaacacttgctgatttctcaaaaaaaaaaaaattattatatattaatagttttgatttggttatatatattttactatttgcacatgtttagtgctttttttaaaaaaaaaattattgaaaaataaaataaaaactaaataaagaaaaattataaaaaatttagacgtacctcaatatcttaaaataataataataaaaagaacaaaaaaactaaagatgctttcttaatgaatgaaaataagagaaaagattaaataatttataaaatagcaatttgtagcgaaacccccttatgttttaatttttatacacttaatctcctttttttgtggtaaaaaccccttatattttgatgtcgtccaattagttacactgtgattgcagtagtaaacgggctatatgttgtatccacatggaggaaaaatgattttatgagaataatataagaaccttgaatgtgatgagaatattgagaaaatgatttttaaaaattattaaagacacaaatttcgtacatgcaattatattttc

SEQ ID NO: 106795 - DNA, 760 bp, Cannabis sativa
cgttatagtgaaaaaaaattaaaaactgaataaccgtcacacaaaatagagatctaaaacaaaagtaagataataaatctatttactacaagaaatgtcacttttgtcaacacatttttgtactggcaaaagttggtattgcgctggtaaaatagaatttacttgtgatgtgttggcaaatcaatgttagtattagaatttttgccagcataaatgaaaagtgcgggcaaaaatgacttttcccagcgcgtaaatgcgctggtaaaagttaagattttagccactgcaaatgtacactggtaaaactttgacatctttgtcagtgcagtttgcgaaatgcgctggtaaaagctacttttatcagcgcagtaacgaactatgctggtaaaagtgacatttcatacaaatattcatagattcattaacaaaaaaaattataaaagaaattaagaataaagcaataaaatagtgtattcaatatatcataagtacacattcaaaaaaaaaagaaaaacaaaattaaaatttattaagatattcgaagatgatttttttcttttttttggaaacaaagacgatattgggtgcaacaatggcaaatttgaggacaatggatgaagaacctactacgacatgtggtagaaattagaaactatatatgattgtggttggattttatggtttaagctataaatatttaagaactttttaattagaatataaatataaattaaaaaatctaaatgtacaattttttttt

SEQ ID NO: 106796 - DNA, 844 bp, Cannabis sativa
tccgggagtatagaggacttcgtatgccttctccgggaggcagatcccggattatgcctttctttataaagacttagctattaatttgagtgttaagacatttgtatccacatatccttgtctggttggtccacgtatattggacaaaatcaggggcaacagttatgatttgaattctcaatcttttagttattaaactaattaagttaacacatatttaatattattagtattaatatttattttattactaattatatattattttattttttaaaataagggccctgagcgatggggagcacaaggtggctgcctcttttgtctcaccttaagatcgatcatgtatgaaataaagtgagatgtgtagtattttggagataacaagaaaatctctatttttccctttactttaccacaactctaaattctattatttggagatttacataccatttatatgttattgtgttagtttacatatggtacattctttaaatgggtatttcgatagatttttttatctattttgacacttacaataatttttagtttattttttgaaaaataaaagtaaatgatcctattttcaactttatagatagttaatgtccctttttcaaaataataaagcaaatgtcctttttttactttttaatacctaaaatacccttcattatataaaaggtattatatgtgttattcctttaataggaattataaaaaacaataaatcagaacctctctactgaatttttgtcaactattttttcatataaaaggtattatatattttattcttttaaattttgctgctgttgttgttgtctaatatgttatttaa

SEQ ID NO: 106797 - DNA, 2124 bp, Cannabis sativa
ttccaattcctggtttgtgctctcaatctcatatattcataatactttggctagtgaaatctcttctctggataaggattttttggtttaaaattggggttgatggctggatatagatccttccactcaacatctccttttctccggctaggagcctttgcaaaagcattctccaactaatgaggttgtgtggcaaatggtttcctcggttccttaactacgttagcccacgatcgctggttcaaagttcccccactcttcatctctactttctgctaaatagtgttcttttttacagttacttcctctcttttcatagtgttgttgagacatcgtaaaaattcaaaccatcccttcgccttttcttcttctggaatgattaccattttcatcttgttgttcctcaatactgaaagtttcagaaaacttccttttgtatttaaaaaatattccaaaaaacaactgccagagctatttcgaaaagttcttttgaagctgtctctttcccttccttccttccttctgctgtacttccttcacaatctcgatgatccaatccacagcatcagtagtaatagcaatttcatacccaaagtgtctagttctttcacaaatacgaatttaaccaccatcataagtcaaagtaaccatgaaagccttgtgtttagtgtggaaactccaatatttccagagtttttgaacacgaaatgaattagaaagatttttccagtcacaccagtggggtagtgaccttttttcttcccaaaaccagtgggatttcggtgccttctatggccaaaaggaccatggaaaccccacgtatgcatgggcacacttctccaaaagaggagagaggaaaaagactatacttatggggagagtatagttacaacaacttaatgatgaaaaggtataagtatttcaaagatctaaattttaacaagacctaacgacaaattaaaatggtttacaaacagatagcagttattactgagttttctctaacccgccaaacaatgatctagtgacatgctaatccatattaaacatcacgggaaaagaaaatatatcgtattaaagcaattgcaattttcacattgaagagttagtaatctatatctatatgaccccggcaatgatagattccgagaacttctcagtacaaaaaaataaccatgaacaagccatttttttttttttgaaaaagaggtagaggcctttgtctaagactgacccctccccatttatatatagaaagcctcacttgtggcggaggaataccatgattacaagtgctgtatcacaaacatataaaacatttgaaacaaaaccaaaccaacgagacataaacaattcatgtactgttaagccacattacacaacaattcatgtaccatgaacaagccatttgaagactgaaaacgtccaacagatattgtttgttgagcaagttaatctgattactacaagttcacttcaacattgctcttaaaagtattgcattaacattacaggaccagaaagcttcagctattatcgccattgaaattcaatgaaagttttttatttatttaaagatacataaaagtaacagaaacgtcatttcaagttatagacaattctttactctcacaggtcataatttgtacgatcggcttaaatgcaaacctatactactaagaaatgaaagtttccttcacgaaaaaaatcgggtttcatcgcaggaatttcaaaaacccatgaaacttaactccattaccacaatcttcccacagtttcttgataaccaaacaggcccatttcccacaaagttctcagcaaaccaaataataaaatgtgtacatacataaataaagaaataaccttaccaggaacgcttataagaactaaaatccgggtcaaggcgaaaaccccgtttgggtaattggcttctgagaaaaccaacactgcaatccttgagagtccttctggtggcgctcaaattggaggcatccaagaaacgcttggcgagaagtgggttggagagaaaggcgtgaattttgggagagagattgtggtgcgaccgccatgaatgagagttgtagggcggtctatgagagaggaagtgggtttgggtttgggttt

SEQ ID NO: 106798 - DNA, 800 bp, Cannabis sativa
  modified_base (769)..(775): a, c, t, g, unknown or other
agagtttaataaaatctccggaattgagaaattataactctaatattcatttctaaatattgcggtccataaataattaattcataaataattatgaaataacaaaaatttgtgctaattgcatttactaatccaaattctaaaacggtcattacaggaactatatgttagttgataagggtggtattttaatactcttaggctacaatccaaatcaaatttctggacttgcatcgagtctagaaagtctatcgatgagatgctgattactctgcggtcgagcagtgattttggagaagtgtaaaaactaatttagagtctctaactctaccagtgaactgaatgttaaagttgcaagagggatacttattcagcctatggaaagttctatacaatttttggcgttgtaccagtaatgaattaactactggtgttacttcctgactaacatagaaattgttgccaaaaagtaaagattctagtatccttagaggagtagacatatagggaagaatttcacaaaatcaaggattttgtgattaaggagatataatggtgaagaaaggttgtgttgaatacaacctgtgagatcctgttatagaaagaatactacatactacacttgattcggatatcaaggtgttgagattattttatattagtgcaagtgggagttcattgggttttgtgttgtaaataaaatctatttcattataatcagatttactaattaataaaagatcaaaaattattttatgttgcatggttnnnnnnntttatttcatgattatatgtttaat

SEQ ID NO: 106799 - DNA, 1249 bp, Cannabis sativa
  modified_base (568)..(573): a, c, t, g, unknown or other
cattggctctttcccagggcgatgtgtagtttcctcaggacgatttctatcattttgattgttatcagccattgaatatggatacattgctgtttgtaaggagagatttttctgagatttatcgctaaggctctcaatgaaagtaccaaattgttaatgcagatttttgttaaccaaaattaaatagccttttagtaataaatattctacaaaaattaataagtaataaaaaaaattataactctagatatttttacgtggttttgtagttaaaatctacgtactccacgagtccttattattaaggatctttttttaatacagagtacaacttcagaatttgaataataataattcactctcaattttaccgtcccttttcacatggaatctgcccctatttataggagtataggttggcagttattctttttgggatagatttaaatgtaactgttcatgaaacgtggacaatacccacgtttcagttaaatcgcatgcgagataatactgaatagctacccatccgttctttagctttatcctttagatggttattgctgacgtnnnnnnttatatcttctctgatttgagttattttccatgtacatcttgataaaaaaatacggtaagcgttgggaaggtttccgtctagctatattccctttatgatatttgtaatgcgaggtgatcttctcgctgtaaaaaatgcgaggcatcttatgctgatacactcactttgctcggatggttgaatgttcctttcttgtcagtatattccgaggcatgcatacgtctcgttaatctcaggttaatagttattattctttgtctcgctattgactataaagtcaatgagttttgaatattatctatttaacctttaattaataaacgagttatttaatatgcatttaatgatatcgttatatcattcagaattattccgtattccttttgttggacacgtgtcaacctctaaagtgtaactgaatttcggggtcataatatatgtaaaaaatttacctataaatataaatcaagtaaaaaaaaatagtcagtcacgagaaaaaaaaaaaaaaaacaacttatactaatgtcaaattataaatatgtattctcgcgatctatattaggattaaccaattaatttttgcatgatatgtgaataaaattaaaataaatcagtaacttgaaaaaggagtagagtagtagaaagtgaagaatgtgagatatatatatatatata

SEQ ID NO: 106800 - DNA, 727 bp, Cannabis sativa
atgcctactgcttcgcagattccgatcccaattcacgtacgatggttcggtttaccatcgaaggttcaagggtgaagaaatggacatggcagtaagagaacaccaacgagcgttcgctagacttgatagcttcagggaaattatcaccgctgcaccactatttcatgaagaaacggagaaaacacagcagctgaagatatcgcctgagaagaaggctgtgttgaagacggtgccggatctggaagttgttccatggggttcgctcgcacatcagcaacgaatgaatcggaatgttgaaggagaagaagacacatggccagagaagaaaatgccgaggaagtcgacgccggagaagaaagaagaaccactgttagtgcgagcggcggaggaagaagaactgccggtggtgtcgcgggaggtgccaaggccgatctcgttgctggcggggacggagccgaaccaacagagggggtcttcgccggaggtggagaagagagacgaactgctggtggcggcattgggatggatttcatcgccgatcccaaggccgatcacgttgtgggcagtgacggagccgaatccaccacggaagtcgtcgccggagtcggagaagacggaggcgtggacgctggaagcttcgccggagattcagaggttgaagacaactttccgaggtgcagtcgcacatgagagacggctggccaagaggctgatggtggggaggagc

SEQ ID NO: 106801 - DNA, 1234 bp, Cannabis sativa
atcttaaacaacacgatacagatataggtcgatatatattcactcttagagcaaacaaaaaagcttgggtaacagagttggttgctagcaacaagaggggttggagttagaaatattgtttcgtcaaaggtgacctgtttggaacgagtgattatgtggttcctacttcatggagaatcttaagtgagtgaggagtgttgatttctttgtcgttttttatttgatacttgatttgtctatgaatactaactatttctctttgtcattgtaggtaaagggctcactcgatgtcctcgtagggggtgttggtctgaagcttgagggtatcatggagttgagaatgataattgtatcccccattctgcataaaagttttggaagtcttggcttatgaactgtgaaccgttgtccgtaactatctcctttggaattccaaaccttcgtattatatttttccaaataaagtgttttacctctcgatctctaacttgtgcaaaggcttcaacttctacccatttggtgaagtagtcagttaaggcaagcatgaataccctctgccttggagtagttggcatattacctacaatatccatcccccatctcataaatggccaaggtgtaagtgaagagtggagcttctctggaggtagatgagatatttgagcaaacctttggcacttgttgcattgttgaacaaaattataggagtttgcccgcatggttggccaatagtagcctatttttagagcattgttgcataaactccaatggtctgagtggtttccgcattcaccttgatgtagctcttggagaatgtaattggattcagtcggtaaaagacatctgagcaatggccctgaggatgatcgtctatagagtttcccattgtatagtgtaaatctggcccctttagcttttagttttcttgactcgttcttgtcatgttgaagggttccatcctctaggtactgcattattggcgtcatccagttgtcttgttcattcagactttttacatcttcgttgggtttccatgtcgctagccattgcattatcactacaggaatggtgactccatatttgatttgaatagatgagctgagattagcaagagcgtcagcgttgttgttctctagtctcggcacttggttaatggtgaattttgtgaatcttgaaatcttgtcttgaacaatctggagataggatgccatttttgaatctttggcctggtatg

SEQ ID NO: 106802 - DNA, 651 bp, Cannabis sativa
  modified_base (612)..(619): a, c, t, g, unknown or other
tatatgaattttttattctctctagactctcccatatctctcaattcttatgtctctactatcttcttatacaagctaaaacaataattctgatttgatcattcaatgagagttcgtacgattccctgcaatgaagaacccttcattgaaagcatacagaatgacactgtaaaggcatatgatataattccaatactgcatacatatttttttccttcgtgaccaaacagtaaaaatttccaaagaatgacacaaatgaatacaattgcacaattgcctttatttcttcaatggtgggttatatagaatcattatccattgtcaacaaagtctaaatcaaccaaaactacataaatatatagatggttggcacacgataaatggtggagtgtagaggttttggagtaaaactgtagatcgtcgtttggtaagagatgatgggtgtggtcttgggcaaggagtgatggacaatcggacaatgaacgtaatcttcaaacacaatttcaaaccatctgccattaagttcctctcttctttctcaccgtcttggttctcaccataatctattttatttttcactttttaaatattttgtaaagtccttttttggcnnnnnnnntgacaaaataatttttccttttatggtaagat

SEQ ID NO: 106803 - DNA, 832 bp, Cannabis sativa
aaaatcaaaaatattctctttttatactatataaaaaatatgttcatacaaaaatatttaactcaaacttaacattttcttttcttatttttcatattaaaaaactttttttttaattttttttactgatagaacaatctcagctcatatgatataaaaatgagagatctttttaattagatccaaaaaataagcataaaaactcaaaattttctaattttacttattcataaataatatctattaaaagtgcacccatatatatacttaaaacaaatctatgaaaaatattaaaacaaaaacctgttttgcataaaatttatgagagaaaacgacaaatattggcaatagcaatgatgtgcctagctagactatagtctagagacatctctatctcacttttatgttccaaattaaaccatatgaaatggggtctactacctttataacgtaaattactaactaatttgcatgttgagaactcataaagggcactagtccccagagcgcctaaatttttgtgtgatgtgcaagggtaatttattattaggttctatttttttctttttttttttttataataggttttatatattttattttaataaaaattataaaaaattattaattaattataaaatattattttataataatactatgtacttttttttttatttacattacaagatctgtaactaaaagacaaataagaaatcaagttacgaagatttaagaaagttgggacacggattgttccggacacactctttgtcagttcctaaagttgcttcagccaggttatatactaaaatattgttcgatcttggaa

SEQ ID NO: 106804 - DNA, 809 bp, Cannabis sativa
tggtatgctgattatgtcaacttcttggctgcaaaaataactcctcctgagctttctcgtcaacaattgaaaaagttttttttcagaggtgaaacactattattgggaagagccaatcctctacaagcactgcgctgatcagataattagaagatgtgtgcctgaagaggaaatgtactctattctaaatcattgccatgctttaccatgtgggggacatttagtgggaccagaactgctactaaggtgttgcagagtggattcttttggccaacactttttaaagatgctagtacatttgtgaaggcatgtgatcgttgtcagcgcacaggtaatatctcaaggagaaacgaaatgcctttaacaggaatcttggaagtggaattgtttgatgtgtggggaatagatttcatgggtccttttccttcatcttttagcaatttgtacaacttgttggctgtggactatgtgtcgaaatgggttgaagctgcaggaacaccacaaaatgacgttaaaacagttctctgcttccttcaaaagaacatcttcactcggtttggtactccccgggcaatcgtaagcgattaagggagtcacttctgcaacaaacagtttgaagcactccttgcatgatatggtgtccgtcatagaactgctttaccgtaccatccttagagtaatggccaagctgaaatttcaaaccgagagataaagatgattctagagaaaacagtgcagagatcaaggaaagactggtcaaggaagttagatgatgcactgtgggcgtatagaacaacatttaaaacacc

SEQ ID NO: 106805 - DNA, 675 bp, Cannabis sativa
  modified_base (78)..(78): a, c, t, g, unknown or other
ttttctaaactcttatgtatctaattttatcatattagagaattcatatttaggatgttaatgaaacatacatgttantaaatctagatcctgataaaataaatcccaacagatcttgcatctccgcttctagctctttcattctttttttcatcctttctcaagtgttggtgagtggaacttaagttttccctgaagtttgcatggagcatgtgagtagtactcctctaattccatcgtgtggcttcccaccatgatttaggggtgacgcctttcactttcttatctcttgaaagggggtgcaagcacggtgtctcctagcacgagattctttgggtaaagtcccttcataagaccacgggatgtctccctcattgtgatcttaccatggtggttagattaacgttgccttgaatgaccacttgggtccttatctcgcgataggtccttcctgttttcatcctttggggtgccatccgttgatgagatgacacggagttctctccatcaacatgtgcggttgggattttgcactcttgctagtgatttttgtacagaaaatgcaaggctttagttttgcctttgagaatgctgctcaacatttttacagaatgttaaatatttttatggtttataagtttttatttacaaatgatgtgtgtcgtaagccacaac

SEQ ID NO: 106806 - DNA, 750 bp, Cannabis sativa
tatgcatagatgagaaaatttcttaatacttgacctatatgaactgtacttgttgaaaactcaaaattataggtgattatgttggtgaactttagacttgatttcaaacaagtgaacatgtgaatttttgcatatttgattttcttgtgtatctatatgtttgaacatgtgaaattgaatgtatttagtgcgcctataactttgttttaactgaaatacgcttgaaacgaatttttggtgctctacttgttgattttataagtttttaggcctaaaagagtgtttttcgctaaactttcccatttttaacatttttcaattccgtaactttgtacacctcacattttacttcatcaaactactggaaaaggaatttttcaatttgttgcataaaactcattttcggtaaggttatagttcttttggcaattttcgaaaaacttaccgcaaatcgtcatttttctatttttcttgtttgagcaattttgttttatcatattaaaggtattagaattggtttggggtcatttgggttgaaattggagtttttatggcattttttggattttctggctggttttctgcaccaaccaaaattctggttgtctatgcccagaccatctggaattccggatggcacaggaaccaaaacagggggccctttttgtcttttctcttgagatttttcccctttaaaagcctaccaccgaatttttaaccccccattctaattttataacctaaaacagc

SEQ ID NO: 106807 - DNA, 540 bp, Cannabis sativa
  modified_base (483)..(509): a, c, t, g, unknown or other
aaaatgataatgccaaaaattaatcgcaaaattgtatttcggccccgaacccggttcggtccgaaatacctgattgttactataccgcgccaacttgtcataacacttgaaaaagacaacacaggcatactatataataatatagtcccataagcatgttaataaattaatttcactattttacccttctcgagtaaaaattaccaaaatgcccctagctcaccaatggggtcttaacatgtcataaatcatataaattctaatatattaaattatataataatataattccaccacagcacacaattatctagttagggttttgctaatccattctcttaattctagggtattacagtgttcttcatgttcatagcagataggttgtctcacaaccctcccataacaacgatgtaccagggtttccttttgaggacctatggtaaccattgttggtcgttgtgttggaatttattttaccannnnnnnnnnnnnnnnnnnnnnnnnnnttattaacatcctaaataagaactttctaaa

SEQ ID NO: 106808 - DNA, 516 bp, Cannabis sativa
tggtccgtgggtgataagctatggctattttgtgcttcacattatacttggctaaaagggcagccaagactttgttcacaaagtaagtccctttatcactaataaatgctcttggcgtcctgaatcttgtgaagacatttttatgcaacaatttcactaccaccttagcatcatttgttggactagctattacctccacccatttggacacataatctacaaccaccaatatgtaaagatttccaaaagattgaaggaaaggccccacgaagtcaatgccccaaacgtcaaacaattcaacctccaaaatgcaatttagtggcattattccttgctgaaatatttcccactcgctggcagcgatcacatctttgagtaaaatcatgggcatccttgaatattgagggctaataataacctgattgaaataatttggcagccgtacgttgtccaccaaaatggccaccatatggggctgaatgacaatgctccaagatgcttttaacttcattttca

SEQ ID NO: 106809 - DNA, 855 bp, Cannabis sativa
ttcagcgtcgattttgacaaaattcgctaccaaccctgatctaggtgatgctgtagggtctaaaataatcgacgccataggggtacatatgacgtcggttcactacaaaaaaaaaaaaaaaaaaaaataggtattggcacgattaaattagtgccaaaaaactcattttttagtgcccatctgttgattggcacgacatgtcgtgccctttagtcgggctaggggcggagccagaatgtaaagttaggggggccaaattattttataaatttaggtgataaatattttaaaaatactttattaactttataatttaaattaaaacgcagaatttttttcttacatatcataaaaattatcgataaatgaatttatactaatttttttttgacaatttctcttttttaatatacaatactagcgagcaactacttaaatattcattttcatcttaatgcgaagtataattttttactatattcatagctgaaaaaaattattttgtggtggttataaaagtatagttataagagttataactttatacacaattaaaaaatttaaggtgttacctcaaaaaaaaaaaaaaaaaaaaaatcatgtcttactagttgctaagcaaattaatatatattattaaattaaaaataaataaaaaatggtatgtcaaatcaatattattaaagaagaaataaatactttaaagaaaaaaaaaaagaacaaataaatttttcatataaaataaaaaacaaagtaaacaaagtaaatacaaaaggtcagaaagaagttaattaatatttataaattttagtttgacttcttcaaagaaatttcatataataattactaaaaaaa

SEQ ID NO: 106810 - DNA, 1429 bp, Cannabis sativa
  modified_base (364)..(366): a, c, t, g, unknown or other
  modified_base (471)..(471): a, c, t, g, unknown or other
ccatttaggcgagagtcaaggtcattcctatttcatgagcttctaccattgtttcatactttataagtcctactcttagcaaccactagtagggtggaagttactaagaataaaagacttacaataatacttatctttcaagattctatgacgttaaattgctaatgaatgaacatccactagggatgaatctcactaaaacaagaactatgtagaacaaacagtggaaatcgaatatctttttgattaaagctcattatttaaaaaaaaatatatttttaattaatcacttattttaatctatatattttactaatgaaaattacttaatttaagttagtctaaaattaattaaaattaattnnnaactttaatttaatttttaaaattaaattttgaaaatctatatatataattttgaaattctgtaaaatataataaaataaattcttaaaaaatatctaatttaanttgttctaaaataactaaattttcaactgaaataactttttaaaatttaattaaataataaattaagtatcttgaactaatcaccttaatttgaaaaaatatccctatttaagttgatcaaaaattgataaatttttaacttaaaaatatttttaaagaatatctgaataaccaattatctagaaaaatctacttgattattaatttcaaaatattctaatttaagttgatccaaaatcaatttgaaaaaactgattttcaacttaaatatattttctacgaaaatttaaataattaagtatctagaaaaatttaattagttataacttccttatttaattaaatacaaaaaacacatatagtttatcttgaatatatttcattaaactaagtgtatttttctgaaataaatttccaaataatctgatgaaaaataattttcatgtatttcgaaattaattatgttggtaatcaattttattaggttaaactagtgcaattaacctattattaacctattacagttattcaaataaggcaaataggccttcacaattggagttattcatgtgagggagggctgggttcagtatatcgtgcccactactaatgaccccctaactctcacacaagccccaaaggagagaaatttaaccttaattaaagaagtgttattcattgaataagcccaatactaattggacctaaataaaatctatcaaaagtgataattttattttagcaacctagtccattttaattatcaagattaaatgggcttcctatatgcatctaggcccaaaacaaacatataggcacatgcacacactgatttggatagatcctatcatgttacgagatttatacacagatgaaaaagattacaaaatttacttgttacaaattatttatttgacctattggcaattggactatggttaaaatcaaatcattggat

SEQ ID NO: 106811 - DNA, 534 bp, Cannabis sativa
aaaccagatctccccagcatcactaatttcccagtggaaaaatatcgtttggtatgcaggattggactggacaagattggattatgctgaaagtaattctgtgtttggtttaagaatagactggactattttatttatttctttttagaacaagaaaaacttaaataaaataaaaatatataataataaaaaaattaaaatgaataactcacagcaaaaaaataaaataaataaattataaaatgaaataaaataatatatcctatatcattaagtatatatcataaatatataataaaatattttatcatatttttgatttaatatataattaaaataataaaataaaaatacttaaataagataaaattatttatcttaaacactaattaaatcactaatttaatataaatattaattttttataatatttgtataaattttttagtaatttaaaaataacatataattttattgttttattattattttttttgaatcaatttaagtaactattatttaattaataatatt

SEQ ID NO: 106812 - DNA, 504 bp, Cannabis sativa
agatccatgaagtcagagaagtaaataaattcacaactttgcatttctcatttccaacatgggaaactcactcaaaaatgaagagtttttaatctctcatttccacaaaacaacaaccaagaactagtgatcagatttgccagaacacagaaacatactaagtgatgttaaaatatcacttaggcatcatgaagtacatcccctggacgtcttttcacttacctagcgtccaagttgacatcatatgtcaacctgggcgctatgttatgaactgcattcagtaaaatagtcatagctcactcaatattaatctgattgatgcgattaaacttgtgttttgaagctaatttaatgctctatcaagtcatgtctcacactttaattgtaattctaaagttatcgactccaaattttacccctaagagagttataaaaataagctctaacttacccggagcgggtcgcgccgtcgcgactcggactctgaaaattgaagatcaacct

SEQ ID NO: 106813 - DNA, 826 bp, Cannabis sativa
gtaaggtcaagaagactcgggacatcggcagtgccggttatctacggtgaaagtctataggactcaggtactaagataacactatggcaatactggcctaaggtgaaagtcagcaggactaaagtactaaggcaacatagaaatatcgaggggcgaagagtcagaataaccgaggcattagtttaacttcttcatcaaagtgacatttggaatggagggaccgtatgcgagtatgcggttagcttgcgagctataccttgagaggtattcttctaagagagagaagttcttcccaagttgaggtgggggagcccactaatttatatgtttgatgaactagggtacttgttcagttttggtatgtaaatccagagagaaacaatacaacaaatgggttgttcagtgcgaagacttgcatgattactacaagctacaaatagacaatatgcaggggcgtaggctgagatcaagactgagctagtttgcggcatgttatgggcatgctttgtgtttatggaaacactggtgttgtataagacattgtaagccgaatgttttagagagcatatgccgatgggagatagcagattgcgatgacttcaagtcttaagggtaagactttgtgttatcaagtttgtcgaaatttggcgagttatcagaggatgtagggttgattttgggagatggacttgtgacacagtttagagagccaacacgagcaagagccagagggaaaatttgtggttttgggtgattgttagatcattaaccacgtgaaagaagctcagaggaacaggtatctagtgggtcagagaggccttttgca

SEQ ID NO: 106814 - DNA, 860 bp, Cannabis sativa
  modified_base (813)..(813): a, c, t, g, unknown or other
tctgtaattaacaaattacgattatttactcacttatagcaaaatttaaattttatactgaaatagattagtaagatcataatcccactaattacctgattaagcaatagtataaatataaaatctaattatttaccattaggcttatcgggatattacaaccatcccctccttataaaatttcgtccttgaaatttatttaaacaattcaggatattacccccatatttatgattctaattctcaaattgctgcttctatcttgctgtttttctatagcactttcctaactagtggcattgtctcatttcatagtacttcctttttctagcccaaaacttggacaagatgtttttcccatataataaatttgtctgaagtttaacatcatcacaactcaaaatactggtcgagtctaatacatattttatcagcttggagacatgaaatcggacaacgcaagagttaaggctaactaataggctacctggcctactcactccagtgaacaggtatctagtatttctctcgtaccacacttattaaggtacctaacaagtggtacatttaattatcagttttaaataaacacctcgtcaagaaagagattattctaagataatctaacctttatcaaatatgctcacagcatgtttctaatattccattgatcttcttaggttacccacctttcaagaataaaacattatactattttcgctttaacctccatggttctcaataaccctttctttttccttatcatcatagccaaagatatcaaccttggaatttcacaagattagattattnctttgtatgaattctgtattctcatttatagtataaattgtctacac

SEQ ID NO: 106815 - DNA, 538 bp, Cannabis sativa
  modified_base (353)..(360): a, c, t, g, unknown or other
cttaagttaattatgttttcgctagccttaaaatatttttcttagaataaagtgagtgtataaatattaggctaattaggaatttttttcttttccaactttaacatgtaccaaatcatgcccctgaattttttttagctgttaaaattttttcctaaactattgagattgttagatttaaagacttttgtctaagttcattcaattttactgttttagtgattgtttatgtgctccccagactttgatatctaccaaatcatgtcactcaaactttgatatgtactaaatcatgttcctgaactttcatctatgttagaattttttcactaaaattaaacaaaagtccttannnnnnnnaatctcaataattcagggagaatttttaacggccaaaaaagttcaaaaaacatgattttgtatataacaaggttcgggagaaaaaatcttaattagcctaaatattatgtttctacacattaattcttaaacaatactcatttgggtcacatttcattcttatcagggaatgtgttca

SEQ ID NO: 106816 - DNA, 1257 bp, Cannabis sativa
ggtttccattgtagaaaattcgattgttcttgacttgttttaggaaaaatgtagaaaatctaggcttaaaactttgtaactttgactgtaatagatcatatgacttcattgttgcggaattttgactttaaatttgcaatgttcggttctcactttgtccattcagggtttagtgaagattaacccttaattcaaaatttatgaaattttaggttacgaacttaacctttacgaaatttttcatctttttaatttgttgattagacccgatcggtatatttgcttgtttttgttcgatatcccggccaaatactcatctcgtgtattgtcttttgtagatgaaccctggtgagttttggggaggcgaaaactatatcaaccaggatcttcttcagctttttatacgaggaccaacctcgtcttcgcgctagtccgtcctcttcgagtgacagactttctagctcgagttttaaggattgggaggtgagtagtgaaagttcacctactccagaacctgaggtgcaacaccatttttactccgagcagatcgtaggagaaggctatggtgatttctttgggagcttaggaagcgctggagacgttatcttccatctaactggacatatatcatccggccaggtgttgttgacactattcccgtaggcatccaagttctagtgcctttggcatccttatcgctactcctgacgtgactgttgcacgacacacacagcaatagccgtctaagaggaggatgatggcccgcacaaaagaaacgatgcgaaagattaaggcaactgaccctcatgtggcccagcgtgccacgttgccgagtgccgaacaggacttgcccgctgcagaggaagaggcctataagggggacattgaggttcaggaggtagaagaccaggacaacgactgtcctgatagcccttttgaggctgaggaggagggagttgcttggcctctgcgctttgggggctataatgaggccggagagccagtgtctgaacttggtgatgtcctggttgaggtagaggattacgtcactcaggagtatgtcgaggtggtccctcataggaggcaaggtgccttgagggctaggtgggtgtgtcctccgtccatcgtaactgaggacaatttacgagatttggagaaggctgggtatctgggcggagttgaatgcttcctcccttctccaaatcaccgggcaactagtctgagggaaggatactatgcctggtcgggtgctcacac

SEQ ID NO: 106817 - DNA, 925 bp, Cannabis sativa
cttggttacctgacactcaaaatccattcatcacatcttcacatcctgctcttacaggtgctaaagtgtgcaatttattttccaccaatggtgtaggctgggatgaagagattgttgctgatctatttgttcagagggatcaagatctgatactcgacatccccttgctgcgaggccaggatcgagacaacataacatggaaaggtgaaatttttggactttatacagtaaggagtgcatataaaattgtccaagaaattaatggggaagaagatcaaggttttgctgctgttgaacaattctggaagaaattctgggctttaaaattacctctgaaaatgaaaaacttggcttggagagcttgtcaaggctgtcttccaaccatgattcagttgagaactaagcgtgtggaggtgtcttctgtctgccctgtttgtaacagccaagaagaatcgattttccatgctcttgttggctgtccagctgctgcactttgttggaacagagtgggaatcggcacagcagcatcacaacagaacacttttttcgactggtgtgcttcgaaatttctggtgtgtgatgcagatcagaaaaaactcatagttgctctttgttggtcaatttggaacgcacggaatgacaaggtttggaacaacaaaacatcaagtgtggagagtatagtattttcggctcaaccttaccttaatcaatggctaactgctcatagttctaatgttattttcccgagtcctggtcttattccaggtgacggagctgagcagtggcagccaccacatgaagatagtattaaggttaatgtcgatgctgctttattttccaacacaactcaatttggaattggctttgtgattcgtaatgctcaaggagttctcattgaaggagtaaccaagctttttaatggctc

SEQ ID NO: 106818 - DNA, 1199 bp, Cannabis sativa
catcttcgaatggtattgcagagaatcagggatcacaagttgtatgcaaagtttaaaaagtgtgaattctggttgtctgaggtatcttttctggggcatgttgtcgagaaagatagaattatggttgatccaagcaagatcgagtcagtgaagaattggccgaggccaaaatttgtgacagaagttcaaagtttccttggtttagtagggtattattgacatttcgtcgagggattctctaaaatctctatgccactaactgagttaactaagaaaaatcagcgattcgtgtggtcagacaaatgtgaagcaagtttttcaagagttgaagcaacgtttgataacagctccggtgttagctttgccatcagatcgagaaaaatgtatggtttactatgatgcatccagacagggtctgggatgtgttttgatgcaagctgacaaagttatagcttatgcctcttgtcaactaaaagaatatgaacagcgctacccaacacatgacctagaacttgctgctgcggtttttactgtaaagatatggcgacattatctttatggtgaaaagtgcaagatttatactaatcataaaagtctcaagtactttttcacccagaaagatctaaatatgaggcagagaaggtggctggaattggttaaagactacgactgtgagattctatatcaccccgcgaaagctaatgttatggctgatgcactaagtagaagaggtcccgggcagatttactctactgttatgatatctcctcaactggtctcagagatggttaatgtgggaattgaatttgtggttcgaaaattgcaacacttaacactccaatttgatttgttagagagaatccgaaaggcacagttagaagatcccgagctagtaaagattcgaaatgaggtgatggctggtcggcctaaagacttttcaatctcgaatattggaatgttactgtataaagctcgagtttgtgttcctagtgttgatgaactcaagaaagaaatccttgatgaagctcataccacaccttattcactacatccgggaaccaccaaaatgtatcaggatctaaaccttacttctggcggtatgggatgaaaagagatgtggtagactacctgtccaagtgcttaacctgccagcaaatcaaagctaaacatcaaaggtcggtagggttgttgcaaccttt

SEQ ID NO: 106819 - DNA, 1200 bp, Cannabis sativa
gtatgcccaataattcaacggtgtagtgtagccataaaatgagtattgagccttcatctgactaactcgtttttcaatcttcttaagcatcttattcttcatatctaagtagtctttattacaagtttccatcagcttgttgtacgaaatcttttcccacgggtaatcgtagaagaatggaaggttgtcaaccattcttatgacaaaaggaggaatggcagtcttctcctccttaccagtgaggacgcctctaacaaacaaggtcatcttcaacttgtagacaacatcaacttctgtgcagctctcaaaaactctgcacagttggcaaaagctaatggaaggattattgttgaaatattccataatcaaccggtcctaaattcctttctcttcaatttcttcctcagtaggttcgggcaacaagtttaacctagtcaccaaaccaaacttcaacctaccaaatctacatctcttcttccccacgtaaaaatgtacctcgtgtggcttctcaggtttgattttgtgcaatatcaactgataaatcaatgctcctgaaaattgtaaaggctctctctcgaggaactgtttgaaaggggattccctcaccctatcccatattttgaattcttaaaatttggccttaatctttgggtagtaataactaccaccgcgctaagtgacatggcctgtgtaatgctctggcactggaattattagatgtccagtctctgaaaaaaaaaaccaagaataaaatattttatatttttctgaaaaagtgttagtcaccacacacctcacatttttcacaaataaaatgaaaaaataaaaaaaaattgaaaacaataattaataattactcatattcttgttaaatactccaatctcaattaataaaacaataattaataatacaataattaattatatctgacaattaaattattttttctacactatttgatgggcatcggaccctatcggactgggcatcagactaaatatatcagaccacatcggacacagtatcggactacattgagccacaacaaaaatcccttattttgaccatcaagactaggtatcggactgggtatcagaccatagggattgggcatcggacacatcagatccatatcaaatgaaaggaaaattagacccatatcggacccattggacctttgcattttgaaaccaaaaata

SEQ ID NO: 106820 - DNA, 1749 bp, Cannabis sativa
aaaaatatggcataaaaaaaaaacccatataaatgtaaaaaaataaaaaaaaaaatctcataaccctgtaatgttatttatttatgcgataaaaaagtaaactataccctcaattcccatatttatgaaaattcattttttttttttttttacctttgcttctatggggtattgtgtcttcacgagcttaacttatttacttataatataaaagtatcaatttcataataagtattacaatgataaaaattaataaaagcacaaggaaagaatgtcatagttgtttcgcatttgtgcatgaaaaaatatttggaattttcacccaaaaaaaaacatacatttttatttcccataaaatgagatagtaggtgtgttttataaaaaagattattttgtaaaataataacattaataaacacaaatactatatggtggtttaaaagaaaacatctttaaattcatagtgtgaaagtgaaataatttcttatataagattattgtggttctaaaacacaaacatataactgctaggcacaagtgtcatattgcttgatacggtttgtctattgtttttgatatgtttatctgtataattttcagtgccctgtgttgactctgcctgtcagtttttttttttttctgagtgatctgtttttggtgtaccagttactctgtttttctttattatggcttcgtctagtagtagtcctgctatagaggagcaagccgcagggattaccctggatgatgaagaaattggttttagctttgcaggtgggaagaggaagaacctttcgatgtacggtggtgcttagtaggtaggttcttgaatgttgggccaatggactttcaagtaatgcaaaacatgatggcatttttatggaagccggtaaagggtctgtatgttaaagagcttgaaaataaccgatatctattccaattctaccacgaggttgatattcagagggcgatcaaaggcagtcgatggacgtttgatagaaagtaattgatttttaaacgattgaaggatggcgacaatccgtgaacaatgattttaaatcgtatagacctatgggtgcaagtctttgatttacaacatggttatcggtccgaaatggtgctgaagggcattggaaactatatcggagtctacgttgaatctgatgttaacaattattcaggcgtatggaggaaatacatgaagattcgggtaacagttgacatcactaaacctcttaaacgtaggatgaagattgttcggagtgctaatgattggttttgggcaaattttaaatatgaacacgttcccactttttgttttgtctgtggcatcattggccattcagaacgtttttgtgagaaggcgattgatattccttttgaacagcttgttaagccatatgggacgaatggtgaggatactcccgagaatcatgggatttatatgggaagaatggaggaaagtcaatgctacgtggaggggaatgaaattttggctctaaatggcccaaaacgcaggagagtgtttattggggataacatttcgaaggggcccattactgagatgttagttgatggccatatgttgaacactgggccgaatttggatactgagggtgatgttgaaaaagagcaaaatattgatagtgacatcccaaaaaacttaagtgcggcgggtgctggtgtccaggcccgccgagaattatgaccattttaagttggaattgtcgtgggcttgggaaccaacgg

SEQ ID NO: 106821 - DNA, 1974 bp, Cannabis sativa
ctacccgcagagtaacgggcaaacagaagcagtcaacaagataatcaaacacaccataaaaggcaaactcgaagaacgtaagggtgtatggccagaaaagctttcacaagtgttatggtcatacaatacgaccccccgatccacgactggtgaaactcctttctcgctctcttatggatgcgaggccatgataccagtcaaggttggggtaggttccctacgaagagatgttttcaacattgcacagaacgaagaaaaacaatcgctttacctcgaccttctagaagaaaagggcgatcaggctcacctgaaaaatgcgacttatcagcagcgaaccgcgcgatatttcaattctaaggtcaaggagagagttctgcgagtaggagatttggttgtttgaaaagtaatgccaaacacgaaaaaaccctgcacatggggttttcggagacaattggggaagaccatatctcatcgcagagacaattggtaatgcaacatatcgacttgcagaactcgatggaactgcaattcgaagagcctggaatggcgaaagcttgaaattttattatcaatagtacttgcattgtattgtttgtacttgatgtgtatttatacttagtcaatttatctacataaatattctaagtatagggggtatataacccactcactttgtactattgattaatctgtaataagagtgatgaattttctcgcactttcaaaattttcctaccttagtattttttacaccaagctgtaattaaaccgcaatcgagatgatacacaaaaaatgcaagtacccgtgtactgcgaaaagattatataataacataagtaaatattcccgaagggatatatgttgttcaaaaggcaataaaaataaatttgtctaagtacaaactgcgagtacccgtgtaccacttaaaaagtttggcaaaagtaacattaaagtaaaaaagctaagcattgggagcagtaggggcagttggagtggtggattcatctgcgactttactggcagcctcgtcagcaacttcttcagtgttcgcagcttcaacgtcctcgggaaaaacatttctcccacctccttgggtatgcgtgggtgacatagctcgaaaagcatcagccatctcagccgcctctgccccaaggatcgagaagtcgaagtctggaatcttggaaagagtcgtgtatatgtagtcaaagaccgcttcgtcatactatttcttcccattctccttctcgacctccaggtcgcgagacatctcctcaatcttcgtctgagagtttttggcttcaagttcgacttgctccttagacttacggagttcctcgagctctttgtccttggtagtcgcatcttgcttcagcttcttgacgttctcctgaagctggacattctgcttttttaaaagctcgacttgcttggaaccaacaacaaaagccctcaaaaacatagtaatgaactgcgaagccaattccgcagaacgaggcattagctcctcagtaggggtcttgtcgacctttgatatgaactcatcacccacaaacttctcttgaagagttaggatgtggcgagctcggacggccggatcaatcatgactttcttctccttgtcttgggaaggcttagctagcttcttggatgaatctgtagtagggataaccacatcatcgctctttctcttctggggaacgacaggagaggtcgtggttgttccagtcttcgacttgcgattaagaaccggtgcttgcttgaggaaagtcatttctataagggcaagaaaagataagttaaaataacaatgaatttaaatgcattagtctatacatgcgatatgttacctgatgttggccgacaagtctgcttgaaaaggcgtttgtctatccgctctttttgcttctcagacggctccttgtacactggctccctttgaaggctcgcgttctctggaattagcttgtgttccc

SEQ ID NO: 106822 - DNA, 700 bp, Cannabis sativa
ctcttaagtgttgattggtgctttatgtgtctctatgtgctctcttgttcgttctttgcaaattaatttgggggcatattttgaaaaaattaaagaaaaagggggggtataattttttcgattttttggctttcttttcttttattttttctttcatggaaacatgttttcattgcattttatctattatgtttcctttatttttggagttttggtcttatttttttttttgtgttttaggaaacttgttcttaattaattaattattttgtggtttcttttttggtggcaatttcggttttggttgggtttttaattcttagattttgtggggatacgttgtttcctttttccatttaaggtaacctttgaccaattgtttgaaaaatctttttggttttccttttttctctccacacgtggtgtctaaggtaaggaagttactttcctttttcatttgtttctgattattgggtaattaaaattgaaatgctatacatgttcaacttcccacttacccacgatcaccactattcattcctctctcatttttctcaaaagtctaatctttttcaagtgtgagagtgtgttagtttttctagggttcaaagtaaaatggcaaaaacaaaaaaaaatgctcaactgaccaagaggacctctcgtggctctgcttctgcatctccgatcaccccacctgcgc

SEQ ID NO: 106823 - DNA, 568 bp, Cannabis sativa
ccacacctcaaaaacccaaagtggttctgcccaaaagtgtctccaaagggaaaaaggtggtgtcttcatcttcaaatgccaaaagtctaaaagaaaatcccccttccatctcatcattggattgtgaacctgaagaagagaccgaggaggatcacgaatcagagggtatgtctgattcaagtgaagagtttgtgcccaaagaacaaccctctgctgatgattctggtctaaaagtgaagagcttgaagctgaacctgccagtgcggaaccaattattgtccctactctagttccaaagaaggacaaaggaaaacgacccattgtttttccaagtcgtattcttcctcaaaaaagatagaggccctctggtattactcttgaaaacttcaagcctcattctcattatttttgttacaatgatcatgctagagacatgaaattttatgagaattagaattttactattgagaaaaatttcaatgtcattgctcataagccatttggggtttctaacatgttaaaagaaaggcaatggatggatactttgatctgttttgatggctatgtg

SEQ ID NO: 106824 - DNA, 1117 bp, Cannabis sativa
  modified_base (348)..(369): a, c, t, g, unknown or other
tggacacacttaggtgtgtgagtcccaacgtcaaatggttggttgatgttttcgagccctctagaagtgccatggggccctcaagaaggatgtcttgatttatttgacatttatgagtcttggtcaaagtcgcgttgacttttttcgatttttcgaaaattgggtgtaacactttatattaatttgttttatttcttattatatgtatatatgttttgttgtatggtatatatttttggttgtgtatagtatatcattatttaagatgatgtttaatttctattttattatatataataattatacataaaaaatttagtatggtatacatattttaatagtggtatnnnnnnnnnnnnnnnnnnnnnnatatatattttgagtattaatttattaggcttagtattattataatttctttgtggtatataattttattattacggcatattaactttcagtgatacgttatatcaaatattattatatatatatttaattatctaatatatttattcatttttgttacaatatattaatatgcaatactaaaaattttatataacttaatttaattattatataatttttcaaaaaattaatatgtattaaatgtatctttataatttttattagctaatttattatatttgacaattttactatttttttaaaaaatggacattaactaattcaacttttaaatttaagatcattttgcatcttaacctaaaaaagctaaaaggtgctttttacaaaaattgtgataaaaaagtgtttgtaaacaattcaaaaacaacttattaaaaaatttataaaaaaactacgactaaaagctaaaagtgctttttacagttattttttcacaaccaactaagctgtttttcttcacagcacagctatgtcaaactgaccatgtgtgtacaggtgaaattggtaatttttttgttgtttaattactgcatgattagggatacacacttatgaaaaattaattgatgaaaatgtccctaatatttaggttttggtggttttaatttaggccgctagtcactaattgtaactctatctctatattttagatgactatgataagaaaaaacagttcggacttaca

SEQ ID NO: 106825 - DNA, 662 bp, Cannabis sativa
ttgatgagctcaaatcttgtattaatgaagatcgaataaaactttattcttctattattgaagatcgaataaaattttatttctctattattgaagatcgaatgaagcttggccaaagggcagttcctcccaagtattaatcaccataaaaaaggtgatgaacctcgttaaacctctatttcatttaggtattagtgacacatgcaacccatatttgcttagaattataatagagttgttattacctgattattaatttaaataataataataaaattaagtataatacaatttaattatatttttaaatatataatatttaatctaattttaaatttatatataaaaaaataccaaactaattttatggaacaataaaataagtaaataactctagatattttaaataataactaataaatttattataaagtatcattaattaattaattaattaatgtgtaattcaaatttaaattaaaatttatataaaaataataattatctaatttttttatacttttaaattaaatttaaatatttaactattttttttaaattaattaatttaatagtgttaattttaactgttaacttaaaaaaaaaaacttttaattaataattttcgttaaatacccatatttaatataagagagatcata

SEQ ID NO: 106826 - DNA, 525 bp, Cannabis sativa
taccctccactttaggagcccagtgggccggactttcgtccaaaccacaaggcccaactcccagcttggaacgggcaggccagtaaacagctaacactgaatccagcccactgaaccaacctaatgtcccatttcccacatgcctccacttggattacagacccacgctactaggcccggcgagcaatgttgttttctaagctattatatactactcagctttcatcttcatttcccatgtgggacttatggtggctattggctaagctattatattatatgttgaactaaaagattatgaagcattacaggtgatactatattaaagcagaaaaggaagactaattattcgattcaacaaacaaaataaaacataaaactataaatcagatcccttagttgttagacatgaaagaaagtaacaccatttgttgtttttctaaagagcgtttggcaatgcataacataagccatgtgtattctcatttactagaacaaacttaattagttgataacatccaatcc

SEQ ID NO: 106827 - DNA, 725 bp, Cannabis sativa
ctatctggtgcagggatcgcccttattacaccttggggaaacacctacacactgcagtcaagttgggatttaaagaatccaataacgaggccgaatatgaagctttgatcgctggtctaaaactagcccgggagatgaaggtcgaacatattaaaatctgcaatgattcacagctggtggtaaatcacgtatctagagaatacgaggctcggggggaaaagatgatagcatatttgagcaaaatacacgatctgctcgcacagttcaaaagctatgctctcagacaaattccaagggaagaaaacacgactgctgactcattagctcgacttgcgagtagtaatgtaagtgatagagcaaatatggttcctatttagtttcttaaagaacctagcatcgccggcacggaagagatcgaaatcattgatgcatccccaaactggatgacgccaattgcaacctacctcaacactggggaactctcagataatcgaaatgaagctcaaaagatgagaaggaaggttgcacggtacatcatagtaaaaggaattatggacagacgacgattctctatgccattgctcagatgtgttaccctagaagaagttgcacgacttttttctgaagtacatgatggattctgtggaaaccatgctgccgggcaaagtttatctaagaaaatcctaaggcaaggttatttatggctgacaatgatcgaagattca

SEQ ID NO: 106828 - DNA, 601 bp, Cannabis sativa
gcgcggtatagtcacaaccgggtgtttcgggccaaaccgggttcgggctcgaaatacaaattgagtagacctatttggcattttatttgttatttgataatctgaatttttatttgaatctgaaaatgtttgaatgccatttttgcccatgtgagtgatttttacatgattattggccctaggggcaaaatggtcttttgacctattgatttacttgaattgaggatagatttttgagggaatgaagttgaaaattctggactctctctctctcccaacccgaccctctatccctctcttattctcttgatttgcaacttgattttttgaggaataagcttggatggagcttgattttcgggaattaattgtgctaggctttcaattggagattgaggtagtttctctactgaatttaattaaattctttactgaatatgattgtggaaatgcatgaaagatttggaatgttcttgttaatgcatgtgtggaagaattgtagtgtttttatgagatgtaagtgttaattccttgatcttgttgtgattttagttgttgagccctagatgaaatgattagggtattttcttacttaaattca

SEQ ID NO: 106829 - DNA, 715 bp, Cannabis sativa
ctctccacaccatggtagcccatatggacctctgcctggccaacctctggatctctaccgtctagagggtgcgtggcctcctctactatagctaccgtgcccatggtagctagcttggcaatgtgagggtcaaaaggtgacactttacaataagattttcttggttctggccataatgtatcagtataaacctcgagatcactaaaaaagctgattgagaacggattggatgccagtccacaaagacaagactgactgaacctatggcaacacaattgtcacctcccaaagccgatactagaagtcacctacatagaagagacaagggcatgtgagcaaactatcaaagcaacaaggtacagataaaattctagccaatcatacccaagggtatgtgccataccaattgcatcgtacaagactgggtatcagcgaagtaccgtctcaagtaaccaacttagacaaatggaaagtcttaagttgtacatttaactataataaactcatcattaagtctcatacagagtttccaaggagaccacgtatgaggctaaggttgtacatgcccacaagggcttaacaaaacccttactgaggtaaaaaaagaacaaaaacttggccacccacttagaacctaggccttggacgaccaaggttcccaagctgagagagggtcggccagggttccatgtgttgggtgttgtgccctaaataa

SEQ ID NO: 106830 - DNA, 560 bp, Cannabis sativa
ggagctaagtatgcggtagtagcattcgacttcttcactaaatggacggaggctgagcccctcgtttccataacctacaagaaagtcgttgaatttgtcatcaagaacattatctgtaggtttggaattcccatgaagatagtatccgataacaaaacccaatttgatggcgacttgttcactgaattctgcgagaggaaaaaaattatcaaaagcttctcgtcagtatctaggcctcaagaaaatggacaagtggaagtcgttaataaaaccctaagggatactatcaagaagaagctagatgctgccaaaggtagatgggttgacaagctaactcaggtactcggggcccatagaactaccgaaaagatagctacgggacacactcctttctcgctagcatttggctcggaagccatggtgcctgttaaggtgaatatatcgactcatagaagagagttttataaccaagaaggaaaccaggaaattttaaaattatccttggatctacgtgaggaaaaacgaactgagtcgcaaatcaccaacgcagcataccaaca

SEQ ID NO: 106831 - DNA, 923 bp, Cannabis sativa
gaatcccataaattttcctgaggaaactccaaaggaacactttttttgggttaagcttcatattgtactttttcagtatctcaaagcactccgcaaggtctattgtgtgatttccactctttatcgacttcaccaacatatcatcaacgtagacttccatgtttcttcctatttgtctcgtaaacatttcattcactagttgctgatatgttgccccagcatttttcaaactaaacggcatgactttataataataaagtcccatgttggttacgaagcttgtatgtttgtgatcagggacatgcatttttatctagttatatccaggatatgcatccatgaatgacataagcttgtgttgagctgttgcatccactaactggtcgatccttgatagtggaaagtaatcctttggacacgctttatttatgtccaagaagtcgatacaagttctccaagttccatttggttttgggatgagaacaggattggatattcacgaggaataaaatgcctcacgtataaagttgttgactaacaacttatccacttcctacttgagtgcctcttgtctctcagaatccaagggtcgtctcttttgtctcttggttgggtagtttgggtcgacattcaagtggtgactgataatcttagggtcaatccctatcatacccgagtggctccaggaaaactgatcctggtttgccctcagaaaacttattagttgatattttattttttcatccagatttttcccaatgaatacacactttgtgggatttggtggatctaaaataacttcttttaattcctcaatttgtttcaataaattccattcatcttgaatctgaggatcaagatcctcatcctacttctcgccttctttagtgatgactgccattagctggtgatcgacctttcta

SEQ ID NO: 106832 - DNA, 642 bp, Cannabis sativa
  modified_base (614)..(616): a, c, t, g, unknown or other
aaatgaccctcaaaactgtacaactgccaaaattaaaggacacatttttccaaaggagattatgacaaaaatacgctctgtaattattaaaaagcactttttattaaaaagaactttttaagggacaattgttacacccgaaattcggctactatttcagtggaggacatgtgtcaagttaaggggaatatggatcgatgcatgaaacgataatcatttttaatggaataactcattaaatgcagatgtaacagagtatacttgcaactcaccgagtataaggtcttatgcgagataaaggtatataaactatcgccccatgtattaacaagaagccatacgacattggatgcataaggagagacataaactttgttacacctaggaagacgaaagcgatacatattgattgtgaaaacacttagcgtataatatacaaactaagtataacagttgggtggacttaagacctaataagcgagatgcttaccttgctataggaaggctcctgttactttcaccaatcaattccagacatctttcagcgaaacttatagtcttgacgagttagaaactgacatccacgttatgatgactgttgggttttatgcccnnnataaaactctttacaatctgattagt

SEQ ID NO: 106833 - DNA, 624 bp, Cannabis sativa
tattgttatgcaatatttgataatatattcatttatatagctttgggtataggaggtaagcatcatatttttatattatttttctttaaatttttattgtaaattatattttttactcaatagaaaattgtagatcatatactattatatacattatgtaatatgcacatatatatatattagttggatacaattataatatatataactaatctcatatctatatatatatataaatatatcttttttttagcaaagatcgaagagggtttctactattttgtatcaatttgatgatatctattatcatctatatctggcattagaaataagcatcatatttttttgttttaatatatatattaatcagatacaattataatatatataactaattttatacctatatatatgtttctatcaaaaattgaagagagctttcactattttgtattaatttgactattttgtatcaatttgatgatatctattattatctagattggataatagaggtaagcattgtatatattttttattttatatctatattttcaaaaatattgcttattcactcataaaaaaattgtgttgaattgcatgatgtaatatatatatatatat

SEQ ID NO: 106834 - DNA, 553 bp, Cannabis sativa
ttaatggtgtgtttcattactctgtttttcatacttctttcctgaatatttttggatttaatagggagttgcgatcatcaatttatgaactcatttttactacgaactgcaacaatcaaacaacaattatatgttttgttatgcgaatgtatttattttgaattttgtggctctgatgtttaatacctgtttcaatttgaatttgaatttattagggagctctaatcaacaatgtctcgtctatttattgaatgatctacaacattcaaattacaatttttgaagaataagtgatgatacctcagttctttatgagattagaatatagaatcgttgatacctctgtgtaagaagatttgatcaatgagaagttattgttgatgaattcatctctgttgatgtttcttttttgtttatgtgagtttgattattagagtaggtaagttctttgttgacttttcattgaaatgttgttgaatgtttgtttcagcaagttttgtcgagcatcaatggctggtctgtttttttttttttttttttttttttttttttt

SEQ ID NO: 106835 - DNA, 503 bp, Cannabis sativa
aaggagagattcattcaaggctttttgtgtccctatggaggattttgaatgaagtcatccccactcgtaacaagctgccttttgctggagataagcaatgccttctttgtggtgttgagcaagagacatgtctccatatttttagagagcgtggtgtttccagggccctttggatctctggaagttttcctttgttgataggaaatttccctagttcgacaatgctagaatttgtggagcatgtgctgatggctattccgagtagtacccgtgcatccttcttggtgtatatggcgtgtgtctttgaagaagtctggagattaagaaacggaatcttgtttaaaaaagttcagacaagtttattaccagcgatcatgcgtattagaaagaattttggtgactttatgagccatcttgagcttgtggagccaaagcttagtgtccctaaactgtccttttgcaagtccaaaaaggactttgatttggtactagtcactgatgca

SEQ ID NO: 106836 - DNA, 821 bp, Cannabis sativa
  modified_base (530)..(538): a, c, t, g, unknown or other
tggaaaggacatagcacttatccaaggtgcaagtaaactacgttgtagattatcatatcagctaaacactgtgtactgataaattagaggaatacatttaatcacacaatcttgattactttccaatgtgttgaaaacacaataaacaagaatatcaatgtgataaagatttggatgaatttataaataaaaaaagtaaataaatgatcacatgaacctaataacacattaaacaagtaatgaaattaaatctgtttcttaattgataattgaatagaaaagattacattgaaatagagttttatttaggacacaatgcccaacaaactcccacttgcactaacataaaacaatcagtacatttcaattaatcctaaattaagtatgtgctttcaaatgtagttgcagtcataactttggcgaatggatcaactaagttatctttagtttccactttttccaacagtacatcccctcttgccacatattctctgatgatgtggtattttctctctatgtgtttgcttctnnnnnnnnntcgaggctctttactattggctaatagcaccagtgttgtcacaaagcaaaaacagtggtttttccattccagaaacaacaccaagtcctgagaagaactttcttagccaaacaagttccttagcagcctcaacgacaactatgtactcggcctccatggtagattctggtattgcggtttccttagcgcttctccaaacaactactccaccccaagagtaaaaaccatcccaaatatagactttctatcatcaagacaagcttggaaatctcagtcggtatag

SEQ ID NO: 106837 - DNA, 721 bp, Cannabis sativa
  modified_base (447)..(447): a, c, t, g, unknown or other
agatttcatattgggattttttcataaaaatgggaaaatgtagtagggtttacttttttatgacataaataaataatacacaaaaatataggattaaaaataattcaagtttaaaatatggggaaaaaataataaatgaatttgataaaacttgtaataataaggttcgctagaaaagttgccgggaaaatcaccagcgctggaaaactcgttggtgtcagaaaagataccggaaaagttagtgtcacaagaaaagtcatcggaaaagtcattgtcgccagaaaagtcatcgtcaccgaaaaaagtcactgaaaaagtcaccagaagtaaatgtcttagatataaacaaaaaatactggttctataacataatgaataaaaacaaataatttaaaccggttataacagaattataactagttttgtaacataatgaataaaaacaantaacacaaaataactcaaatcagttataattaaaatagttacggttctataacagtgttataatgaataaaaacaaataacacgaaataactcaaagcggttataactaaaatagaactagttatatagcataatgattacaaacaataactcaaaccgattacaattaaaaaataaagaataaattagttcctaaaatactgaaacataaataaaaaacaaaactagttccataacaaaatacctcatcaaaccgattataatttcttttaaa

SEQ ID NO: 106838 - DNA, 896 bp, Cannabis sativa
gaagataagacatgaccttatgattaccactgatgacaacaccacttatgctgatatggtggaaaaggcattgcgagctgagggcgcagtggagtgactctggagtctcgagggacacaggtcattgctggggctcctacttctcctacctctggttatagtaggggtggtagtggctcaaccactgatcagaagcaaaagtcaccgattgcacctggtggctcaggtcagaataagagcatctgaggaaaccagggacgaggtaaccatcaaggtagctccgaaactcgatacacttactcgaaatgcaccagttgtaaaaagcatcatctgggtgagtgtagaggacaagggtgtttccagtgtgggctgccaggtcactataaaagagactgtccacagtttaagaaggaagaacaaatgagtgctacaaaacccgctctaacaagggtgtttgctataattcaggctgatgtagaagctagcccctcagttgtaacaggtgagctctcggtcaacaactcttacttttctgtattgtttgactctggggccactcattcttatgtggcagccaaaatttttagtaagttggatagagcgcatgatagttatgataaagggtttggaaccctactgcctggcagagaattagtcatctccaaaaggtggattaggtctttacaaatcagaattgaggatagggagttgagtgctgacttaatagaaatgggtttagcggatttcaatattatacttggaatggatttcttatccaagtattcgtccagtattgattgtaaactgataactctatgaaaatagagttatttaactttttttgtgcattaaattagctttgttctcaagtatttttagtttattttagtgacttt

SEQ ID NO: 106839 - DNA, 1674 bp, Cannabis sativa
  modified_base (40)..(40): a, c, t, g, unknown or other
aggatgttaatgaaacatacatggtaataaatctagatcntggtaaaatatttccaacataaatttcataaacaatatatattaaatcaagctaaataataataagtatatatttaaattattaccttaggttaataattaaaatatacacatttaatgttaactcacttcatggaatatgaactaatatatatatatatatatatataattctactaactttgggcaagtattaatacctacaatcaccaaaatatataatatttttgacagcatataaaattttctgataaaataatcattgaaaattaataattttctgacaaatttctaaaaagatatatataaattgcttgtaatatattgataatcaaaatattaaatgtctaccataatatattatttttccatcaaacaatcaagttttataattttacaataacaaataataaaaagatgtgaaagtaagaatattggtagagattacatagtcaagataaatcaaaataagagagtgattgtcaaacggaacaagaagaaccccaaaaaaatttctatgatttacgaattttgaaaaatcatccaaaattatttgtaataattttttaactgcataattataattaaattaataatagttattaaaatagtcaaaaaattaattaaaaatcatcaaaaattagaaattaaattctaataatgctggaaaaaaattgtcaaaaacggagtcacaaaactacctcactctctctcactctccagcaaccgcaagtgggcttcgtcccaggtaggtcgtcttcagcctccaactactccaaaataggtcaaacaacccgggtaagacccagcgtgtccgatggaggttttctaaccaaaaaacatcacgaaaacagtgggaaattgagggattttgctcgattttctcaatctaatctatggattcaatttcgagtataaatgatgggcaatatgataaatgtgattatccaaaagtttcaaaacaaagaatttaacataaatactattgatttttcaactaaataggaaattgaaatatgaagaaatagtggagaatcgattattcataatcaatttcagtttataatcaatagaattaaaaaatttaaaattaattttataataaaattatataaacaatacaactttaaatatgaaattctcataaatatcaaacaaaatttagcatgcaatatattaatataaagataatttcatgagaaataaaagccctaacattataggatcaaaacataaaaaattcaacataaaataataacaaaattaatatgtaattgaagaaaattaacatatgcatatcaattgctacataaattatagtgcctaaactatataagtaagcaattttataccaaatgttagaaaactactaaactcaagatataaaattgtaaacaatataaaacactacaatatatataataattaattagatatatatgtatctgattgatccatatcaattattgtaatttgataggtactatcaactaagtcctttctccctatatctctaaatcagaagtttttttatttatctgattatcaaaagagtctataatcatgatgagacaatatgtatttatagagttaaggagaattatataactttaattaaactgggtctgctcatta

SEQ ID NO: 106840 - DNA, 599 bp, Cannabis sativa
aagtccctgtccctgtggaggagacgaacgaactttgaactttgatttgattacttatcattgtattacttgtttgtgattgtgtacacttgcgcaattataaagcaatataattttcacaacaagtttttggcgccgttgcgcaattattaaaccatttacatgaaaaatacatgttaacataaaccacttcaaaaatctaaattgataactaatcagattgtaatgggttttatctagggcacaaaacccaacacttctcgacaaggaaattcaagtgtttaactctctccatcgacctgaacagaggcaatccaagatacatggaatatttattcatccttttcatccctaaaatgttcatgatctcatcagccttcttgttagggaaaccctgggtgaagtgaacagttgatttttgatagttgaccgcttgtcccgaccacacacagtaatcttcaaagcaatttaggtagcttttcgcttccttaactgatgcttttccaaacaatattatgtcatcggcgaacatgaaatgtgtaatggctgggccgcccctttttaacttgaaaccagctatcttccctgcctcatttttt

SEQ ID NO: 106841 - DNA, 529 bp, Cannabis sativa
  modified_base (353)..(353): a, c, t, g, unknown or other
tatcaaactttatttaaaccacacttttcctaagctagtaggttattgataataagattgtaaaagcacacacgtggcgttcctgagagtcagggcgttacaaaaacagtctttagggcattcttgttgaggtctgtgaaatcaatacagacttgccatttcttgttcggcttgggcactagtacgcgatttgcgacccaggccggttagaaagcttcaattatgaagttgttgttgcgcagcttttcaacttcatccttcagggctactgctcgttcttgttgggttttgtgccctaaataaaacccattaaaatatgattagttatcaatctaagaaatttgaagtgattnatgtttgcatgaatttttcatgcctatggtttaatatgtttaatatatagagacacaaaatttgttaagtccagaacatatatttattcacaattacagtattgtcaacactgtggaatgtgattgtgattatattattcaaaagactaagtacctatttcatcagtgttttggat

SEQ ID NO: 106842 - DNA, 544 bp, Cannabis sativa
gacagcttgttgcagatcttgagcgtttggagtagggtggagacgaggaaaaaactcctcaaaaggtgttgaattggacagctgaaaaggatttttcttgtgtggggatgaaggggtagcacggagagtatctttgtattccaaaagtggggggtgcggaaaattgtcacaagggagaaggtatttggagcatttgttgtaagtatggtcgagcaaaccacagaagtaacagaaattgggaagaccttcatacttgaaactaacccatcgtggctcagaaatacctctgaaccgaatggtcatacctctacggagacgcttagtgatatcaaacagaacacggattcgcaagtaaggtccaaagttttccacaagggagagaggataaatttccaggagatcaccaatttcatccgcaatgaactgagcaagttgtgggcttttacggccaaacgggattcgatggatttgaacccaaaagggggtatatctaacagaatcaggggtaggtgttggagagacgtcagggtgagtgaagaccatc

SEQ ID NO: 106843 - DNA, 646 bp, Cannabis sativa
tatcaatcaagagaccattaacaccactacaaagaaaatcatatttttaattattttcaggtaataattttatttattttatactttaaaaaatatattgatttattattttagtgttagcaaattagttcatggataatagccctaaatataatatcaaattttttataaagaaattttagtaattttgtttgtaagggccatagaaaataatgctcagttgtcacaagtcttacaaagaggtgataaagatattgtaaatgccatggatttagttagagtatgcaagaaacaattacaaatgatgagagataatggatggaattctctaatggaagaagtgtctcatttatgtgttgagatgaacattgatgttcttaatatggataatatgtattgtgctcaaggaaaatcacgacgcaaggctccaaagcttacaaattttcacttctttcgtattgattatttcaatactgtgatatatttacaactacaagagttgaatagtcgtttcaatgaggctaacactgagttgttgctttgtttgacatgtttgtctcccaataattcattttttgtttttgacaagggaaagttaattcgtcttgctcaactttacccacatgatttttctacaacagattta

SEQ ID NO: 106844 - DNA, 666 bp, Cannabis sativa
  modified_base (114)..(118): a, c, t, g, unknown or other
aagacccagactagatcgaaatcctggacctagatttggaccgagatgctgacccagacccaaactttgactcgcactcgggatccaacgttggacctggacccgaacctagannnnnatcggggtccagacctagacacaaacccggacatagactgggacccgaacttaaatccacacctagaatcagacccaaagctagaactggacccgtacccaaactcgaacccagaccaggatcagaaccaagcacttagaccaagtactgaatctagactcagatcgggattggaacttgagactcagacccaacctagacaaagacccaggacgcgaacctacacccagagcatgttctggacctagactgaaaaccagacaggaacccaaactcagaccaggactcaaactccgacccaaactcaaacccaaacttgaactcagaatcgcaaatggaacaataacaaaactaggactaggaccaggacctggacctaaacccaaacccgaacccagaacaaggacctggaccaaaatccaaacctgaacccagatcaaaacctgaatagagacctaaacccaaaacgagactaggactcgaaactgaacctagactgggacccaaacccacaaaacaaccgacacctggacccagaatcaggatag

SEQ ID NO: 106845 - DNA, 744 bp, Cannabis sativa
gtcccttacagacttggggggcaaatgttatcctaatttttgcattctcacgtggcatcacatgctggtgacacatggacttgattcttcatatctggccaaagagtatgtttcgagctgaacaccgcgtatacctatacgatcaaggtcctcccagccgagcagtgaacaatccgaacaacatatcaacacttagcaatttcaacatttgcatcgtgaaacataagagcaatccctacaaatttgggatcatatcacagaaatatggcaagctatccaaatcccacaatttgtgtattctaaacataatttgtatccttaccaattataggcatggtaagaaaaagggaaaccttcccttaggcatgtagccctataaatagtgatctattctcactagacagggggtcgagaaaaattacttgaaagatatctaagagagcttactcagagatttcattgtaagagctttaagagaggaaacactgtgttctttgttcttaagtcaatacaaatcaaggggagtaggctattaccaaactgctcgggaccgaacctctttaaaaactctgtgttctttatttatcttttcatattatatctgaattataacctttatcgcttattattaagactcaatgtcattggctaaaagcgaggtcaatacattgtttgttttattaatattgtttattcaaaactttttttttttaacaaacctattatttatatgatctaaattgc

SEQ ID NO: 106846 - DNA, 853 bp, Cannabis sativa
atatgtacagaaacatctccatgacccccaggacaacacaaaagagtaccctattgttaatgttctctccctttgttggttcaatcctgctctgcttatctctctcccactcccacaaaacaccatgtatttctcaaccaaacataaagaattcatgtggccactatagctttaattaataaaaaatgttcagcaaagtatataaatttatctctgcaactactattggagtcatctcctatattaactccaaatataaggcttcttgtttgctggtaaggccaagttcattcagtgtcaaagcactctcaccatcttcgaaagcacgcctaggatacggccttacctgctcacacacacacagtattagctcatcttcatggtttctttaagatttacattcaagtagttggcaaaaatttattcagtgggtgataaatatagtaaaggcattgctcaccaatctgtaagagccaggcttgatcactctaccaatatctatgaaatcaaagagagactgcaaggaaaatccaataagattataaattttggcgaagaggatgtggaaaagagatatacaaaacttttgccttcgacaaatatttacctgaagcttgttggtcttgagaaatcgacggccacgacggctgccatctggcatgcgcaccaaaaggttcacagcattttcatcatctgatgatggttcctgtggcaatgtagcttccttggctgccaacagtctctctaattcctgcacaaaagaatcacagataagctatcagtaaacaaaacaactaaatctcacccagaaaagaagttctccttccatttggagggaataatgaaaccttta

SEQ ID NO: 106847 - DNA, 585 bp, Cannabis sativa
tttattattttggccgaaattagaaaagagaactaattataaaattatgtaattaatatttccataattggagtgtaaactcgtaagaagaaaagttgtgatttcattttaggcgcatgggattttccaatcaagtatgcaacgtggggtttatttatttattttatgtcattgtgtgttgattgattgttggcttgattgaattgtttacttagaaaatcttgccaagattaacttatttcatatgttgaatacttgaattttcttagtggcacacacaaacttcacaagagaaaattagagcacttgactagaagaagcttcaatatatgtgtacaattatttcaacattattttttagattgtaaatttttcaaaatttgataagatatattaaataactaatatatacaaatatataataaaaaattaaaatattcttttaaataatagataaaagatgcatcttttaatttttttttttcgtaacatatgtgttttaatatatatatataaaaaaaattaaaatattcttctagataataaataaaagatgcatcgatatttcttttaattttttttttt

SEQ ID NO: 106848 - DNA, 598 bp, Cannabis sativa
  modified_base (297)..(298): a, c, t, g, unknown or other
  modified_base (543)..(546): a, c, t, g, unknown or other
tgattaactttccttgagaacaagcagcacatgataactcactggattatataatcttttagttcttcaatggatggccatgtgagttctctattattctacgcatcatgattgaatcgggatggcctaaccggtcatgccaaataacaaataatttttttttttaatttgtgaacttctcgttcacaataacatgagtttctattgtacttatacgtgtaacgtacaaacctgaagacaagccaaataatttttctaatatgtacttttttcttgaaacaatagacgtaatgcaannatactcaaaattattttcatctattgtctcaacatgatatccattacgacgtatatctttgaaactcaacagattcttttttgatttggtcgataagaaggcatcatctataataatttttgttcctttaggaatcaatataatggcttttccggagtcttcaattaaatttgtagtgcctgatattgtattaacaattgcattcattcttgataaatttaaaaaatatttatcacttctaagtnnnntatgagtggttgcgctatccaccaaacatatatcatcaccattatttgtaga

SEQ ID NO: 106849 - DNA, 511 bp, Cannabis sativa
gtcttcaaataagagctttgctgatgaagaaggatggccaagtgtggattaccaacttgcacagggagaaagagagagtgagagaagaatcaccaagaagcttagagtcctagatataaagaatgcgtataaaagcttttaaaattaaaactgcttccttaattcatgatgatatttataagcataactaaaaatatccagcttcttaaaaaaaaaattaacaataatttgaataaaattcaaataacttttaaataggaaacacatgtatatttatatttatttaatatacacgtatattactttaatttaaattcatatttaaacaaacaaacaaaaaaaaataacagaaagatctatctaagtggaacatttcagtagataaatattatttatttttatttttttatttgagtgagtaatatatagatcaaattataagtgaacattgataaattttccaaaataactgaacacaatttcgagtagtagttaaactcatcacttaaag

SEQ ID NO: 106850 - DNA, 922 bp, Cannabis sativa
  modified_base (626)..(634): a, c, t, g, unknown or other
  modified_base (785)..(789): a, c, t, g, unknown or other
aattcactaattatagcaacatatgcaactttcatggtacgagttatctgttcatattctcacataagctcgcaggctcaagaagcgtactagactgattgagtttagaatgtctgcgtcctaatcgagtcccatatacggacatcctgtaacagatcgataacttagaaaatgcgaatccttatcgggttatcaagaacgttgggtcatccggaccagctcgttgattagagaatcgatctttactacttcgcaagaagacttttatagtactcgcatatatcttggtatatgcgagtcttatacccagttttcggtcttgctttgtgcgagtcataagaatgcgactagattctgccaaggtcacatcatctcgccgagtctagttcaggagaggttcacactcaagaggtctcctcctgacatctcagctcttctcgagaaaagtgagtccacgtgtcctttttatgggagcttggtctcgagttttcaggtaaaaaaatctcactataacataaataagtggtgaaaagctgaaatatagaccatttaacaaaaagtatgctccaatggtgtgccaaaaagtgatgtaaatttggcacataacaaattttgtgccaaatttnnnnnnnnntttgctatgatataaaatttacaccacaataaatgcactactttttcatttatattcatgtcatttctattattttattagtatatttaacaatcacattaaattatgaaacacttatattattttttattgtcttacatattaaaataannnnnaaattgattataaagttattagatttttttaataaaacattaattagatattaaattttccatcaaaaattttcaattgtgcattggaacacaaaattaaaatttggtgtaaatttaccacaaaaatattttt

SEQ ID NO: 106851 - DNA, 1055 bp, Cannabis sativa
  modified_base (137)..(139): a, c, t, g, unknown or other
tttttctttttagcaaaagtcccacatagtttgcaaatgatgatgtgtgttgtatattggaattaaaatttaatataaatagttaatataaatttcgtaaattgtaaaataggtattgtagtatactatttaaatcnnnaaatttcatattatatagttagaaaaataatacaatatatagtgtaacaacaatatatatttttttaaaacactatatacatacttatcacttttattatatttttaaaaatatttttgaaaacgcatataaaaatatttatagtacaattaagttcgttagaaaaaatatgtgtaagttctattttgttaataagttcaagatactgaagaaaattaaaatcatttacatgatattatttattataattgtatcatgtgcttatcatataagataaaagataaaaaaaaaaaaattagattgtgatattctcacattcttaatactactaaatattgggcaaaataaaataataagtttatgaaattattttgggtggtgtataattttatatacatataagtataacattattaacttttttaaaatataaaatatataaagatatctattttattagaattattgaatttagtataattttgtgatttctatttttctttttaacaaaagtctcacatggtttgcaaatgatgtgtgtattgtatttctaagctataaataaagtaatcttacattcactttattttgtcatggatgattgaaattgaatatctcaatcttgtccaattagttataatttttttgaatttattagtgtgtgcatattggaattaaaatttaatataaattttgtaaatcgatatatattaatataaaggatagtataaagtaggtgaggtggcatcttataatttttttcacgtattttatctattttattacaattactgaatttaatataattttgtgatttcttttttctttttagcaaaagtcccacatggtttgtagatgatgtgtgtgttgtatttctaagctataaataaattagttttacatttacgttattttg

SEQ ID NO: 106852 - DNA, 1394 bp, Cannabis sativa
  modified_base (1217)..(1219): a, c, t, g, unknown or other
ttgtgtgagagttaggggccattagtagtggatataatatactgaacccaaccctccctcatatgaacaagcccaattgtaaatgcctatttaccttatttaaataattgtattaggctaattatactagtttaacctaattaaaattcaattagcaacataattaattttgaaataaatgaaaggaatttttcattggattattttacaattaatttagaaaaacacacttaatttgcaaaaattattctagatagtgatttctagtactaatttatattttctaatatttcattgagtagaaaatatatttaagttgaaaattaattatttaattaatttaagaccaacttaaatgaggatatttttcttagaacttaaattagaattcataattaagttgattttattaaagatatttaattatttgtttctattttatgaaatttaattaaattaaaaatatatatttaagtgaaaaattaatttactaattaattttacaccaacttaaattagaatatttttttttagatatcaaattagaattaataattaagttgattttatcctagatacttaattatttctatttaaataaatttaactcaatagaaaattatatttaagttagaaatttttcaatttcagatcaacttaaattaaaataattttcagaatatattttattttattttaataattatttacaccttaaatttcgaattgcattatttttaatgtagatatttcgaatttttttaatttttttgaaaattagattaaagttgaagattaatttattaattaatttaagatcaacataaatcaaataattttcatcaatgatctatttaaaataaaaagactaaaatatattgttttaatttaaaaattagtaattagtttatgaattatctagatagattttttctaggtggactttttagtattattctacatatatttaattaaattagaaaattaatatttaaggtgattttattcaagacacttaaatatttgatatttttcttaagatatttaattacacaggaaaattatatttatgttgaaaattattttatttaattttagaccaacataaattagaatattttttctagttttattttattttatttttgatgaatttcaaaaatgtattttttaaatacattggattttgaattttgtcatatatatttatagaaaannnaatttgagttgaaaattaatttaattaattttggaccaatttaaatttagtaattttcataatatctatcgaaaaattaatactaaggatggaaaatagatttttatttttcagatcttcctagggtataattttatatcgagacaacgttggattcttgttttgatcgaataaa

SEQ ID NO: 106853 - DNA, 780 bp, Cannabis sativa
ctaaacgaggtatcacgacgccttgataaaagtacttgaacctaaaaaatagatagataatataactattcatacgagcaaattaaaatataaaaagtaataaaaccattaaattatatttaagtttgcttaaggcagattgtaactgctatagcgaggcaaaattaacaactgctcgaaaattaaaaagtttggtagatcaccaactacttaaacatgaagagtatgagcaatggaaaaacccaaaagtactgtacatttgatcaaaatatagttgtttacacaattgtattaagttcaaatgaaaatagtacaaggcatttaagataagaaaaaaacctaaatcgggttacaaacttgtctttacaaaaatgccactaggggcaaaccattaagtcatcttcctaaacaaaggatgagaggagaagctgataaactcgagaaagatcgtctccatatagcctaataaagactgtctacacgtagctcggagaaagaccgagtacacatagcttgacaaagaccggctacatgtagagagctttgatctctgcacagacctcattctcctcatcatcagaagatcccatttcctgaagccgagatctctttcccaacctcacgaaattcctcgataccagaaagaggttggcacaaagatcttttggcataggtttgggtcttgggttggctggattctctgatagaaaccacgccaacctccttctcgaatttatctgaaaccacgccaactttcctctggaattctttatcagcctg

SEQ ID NO: 106854 - DNA, 588 bp, Cannabis sativa
ggaagaactaattgattatttagacggttccactgtagaccgaagagtattaaccttttaaatttggcaagtattttatatcattcatagacgattactcacgttatgggtacctatatcttattcatgaaaaatctcagtctatggacgtgttcaaagcttacaaagctgaagttgagaatcaactcaacaaaaagattaagaacgtcaaatttgatcgtggtggtgagtactatggtagatatgatggctcaggtgaacaacgtccatgaccatttgctaaattcctagaggaatgtggtattgccccacaatacaccatggcaggataacctagcatgaatggtgttgctgagagacaaaataggactcttaatgatatggtaaggagcatgatcactcattctaccttaccttagtccctctggggagaagcattaaagaaggcaacttacattctgaatagagtaccaagtaaagcaattgtaaagacaccttatgagctttggacagtttgaaagcctagtctaaagtatttccacatttggggatgtctagctgaggcaaggccttataggccacatgaaa

SEQ ID NO: 106855 - DNA, 2230 bp, Cannabis sativa
  modified_base (205)..(212): a, c, t, g, unknown or other
taaactttcatccatgttagacttttttttttttactaaaattggataaaaattcttaaatctaacaatctcaatagttcagggcggacttttaacgatcttaaaagttcaggagacatgatttagtacatgtcaaagttctgatggtaaaaattttaattagcctaggtgccgtttgggaacacttttgttttctaattttttnnnnnnnnaatgaaagtaaaattttgtttttaaaaattttgtttttgaaaaataaaaatgcgttctgtaaccacttttgtttttcgattttaaaaacagaaaacacaagtgtgtcttgtaaagtttattttcattttcattttttgattttatttatgtcgggtctaggttcggggtcggatttgggtttaagtcagaggccgggttcagcgccaagaccgtgggggaatttggatctgtgtcatgattgaagtccaagatattgattaagaaaaaaaaaagtatttaaaaaaatattgaaagtgattttttttgtttttgaaattttgattctcaattaaaaaattgaaaagtaaaaatagaaaactgattaaaaatattttgaaaattttttcactttttcaattttaaaaatagaaaactgattaaaaaagtgttaccaaacggcaccctaatttatataatttttcatttttttattaaaataaaatttattttattatacattaaaacacaattgtaatatttaaatcaaacacagattgactattttttgaactaagtttagcaaaatttccactatcccatcatggctgtagttatacagtaaaacttaccaaagtaaaataaaaaaataaaacaaaatctagagttgcactagcacagcacggcacgtcaaagatgaatatgaggtacaattatgtgttacacatgtagatcatcaaatcatatgatatcatttcacatcatgccctatttataattttgattaaaacacaccacaaaggcaaaagagatatataatatggactatttacatatagtacaatttgacacctttctgatcctgaccctgtactattatatatggagaatatgtttatttagttacttgtctttttattaaaaaatatatttggtacttgtgcttttaataatacttaattagtacatcatatttttaaattatacatatttgatgctctaaagtaacatttaatcaatacaattttatcaatttaatcaaacaggtctcagttatatgtaaccaaataattaaatttaaatttaaaattcataaaattttagacattttaattatattaataaaattttatcaaaaaaatgaatttaagagatcaaatatgcatgattctaaaatacagggtactaaataagtattattgaaaacacatagtacccaacttgtatttagactatctccattggaagacacaaaagttgatcaatatttgacacaaaatataattttgtgatatttttacaacaacttttactattagagcatctccaatgaaaatgcaaataagtgacgcaaatgcaaaatatagtctcactttattaaaactctactccatggtgtaccaaattgtgatgcaaatatgtcacataacaaaaagtaatccaaatttgaattacaacatagcatgatgtaaaatttacatcacaataaatattatgctcttatatttacattatgtcattttaaatattttattattgattttagttaacaagctcctttatattaaatgaattgtattattattattattattattattattattaattttatatctttaaatattagtattgttttatatttgttttaataaattactaagtgagcattaaatgacatattaaattttacatcaagatttacaattatgcattggagcacaatagtaaaagttgatataaaaatgtcacaaaactactttttgtatcaaatatagttcaacttttacatctcccattgaagatgatcttatgtttaaatgcataattacaaatcttgatacaaaatttaatatgtcatttaatgttcatctaataatttattaaaaatataaaataataataataatcatacaataataaatataaaatttgataataaaatgataataattatgaaagtcatctccagaatagttaagtagggtgtgggttacagtttcagtaatgaccgctttagtaatttggattagtaaaggca

SEQ ID NO: 106856 - DNA, 1695 bp, Cannabis sativa
aagacaccatcgatcgtcataatcttcctcagtttgatctcttgtatcataatccagaacagcatccgattcttcatctagccatatattagatccgtcatcgtcctccaccttaccattacgactgctggaggccataacagggactccaaaaagaccaccaggcacgacaaaaaagaactttttcaacaaaatgacaatgaacaaaaacaccctaagagagagtacaaaaccatgtcaaaagacaagacttaaatcatattttcctttttaggaaagtcctcataataacaataatattattattattattatttttttcatcaaaaaaaataatattattattatttcttgtatcgtagtagggaataggatcctcaattctcataatattacttaataaataaaaatagaaaaataggttaaaaaaaataatatctatttttgttgatccaaaacgcagcgttttgaatcttcttctccaaaaccctcaaaaatcctgggaaccactctttggttttcttcggttctgattctcaatccctactcttttctccatacaaagattcactgtttcattattattatcatcatcactgttttaagggttttcttaaaattctttgcttttcaactcttcagaacatttatcccttcaatttatctattttcagtttttttttttaatataaaaatatattttttattgcttcaacttttgtcatcaccttcaattcaagctataatcttttttgttcctttcttataattatatatttatatattgttggccttgtttgtttcaatttgttctgtttaaactttaatggaatcataagccctatcaatggactgttggatttcatagcagcaaaatgctctcctcattaaggttagtcttttatttattgtttttttcttcccaagtttagatctttattcaataattgttgtgttatagttttgctttccttttttctgtgatgggttcttatcattttctggttttatagtgataattatatatatatgtcttgttaatgattggtagttttctcttaaggctatgaattttctaagcttcactgcttgatggggtttcatgtattgttttattttgtttgatttcttggttctatttgtgaatagactgtccattgactatggttgaccactgtgaaaatagggacttttggagaagacataagaagaaggtttttgtttcagccggggttttaggaagtgggtatgttttgtataagctatataatgctcatagacaaaggcttgatgatctggaaagagaacttgccaatgaaaggaaaagagttgatgaatttgtcaaagaccagtaatgacacttcttaatcttcataacttttctttcttttggtttcttgagttgtgcttgacttgtataatttactaatttgataattgggcttgtttgtgtgtttttttttatatgtttgatatttatagattgcaatctcattttgagaacatccagagaatagctgatacgactacattaccacacgcgatacaatttctaagcagtcgaatagaagaagagttgcggctttctcaccttactgataggctaatgcaagggaagggtcagccaaataatttgacatcttcagagaaacttgagttatgggataaacttaaatatttgagtatggatcttta

SEQ ID NO: 106857 - DNA, 860 bp, Cannabis sativa
attagtggcaatagcgagcttttatctgagctttcataagagttctttctttgctactcttcaacgatggccaatgttcacacaaagtttactcctacacctcctcattttttcaagattattcttcaaaaaactcttcatcacaaaaagatagtaagtacaaagtatctatatacacaccaaatatgacacatatatatattattcaagtatagaattttgtttttccccttgaaactattttctgttttgacttgaggaatattgtttgagtttcacacagagtatgagtgaagatagcaaataaagtttgagctgaaaatgtcttgtattgatctaacacctatttgtactcaaagactataacatactgtattatcataaaatttacatctcatacctaaaatttttatgtaaaacttttatttaaaaatactctattaataaataacatctaatttattattaaaaaatgaacttgatttgtgcccgttataaataaaaaaaaaaacatttcaattttaattagttatattaaagattgtttattattattgctgtcacattagtattttttggtattttaattctttttagtgtaactttatttaattttaacattggtaccaagtgtatttttaaatagatagaaattttacttgtatatagacttgtagttagtcttctttcatgttatctataatattctttttaagtactgattacctagtttagcatgaagttgttagagcatatatatatgtgtgtatatatatatatatatatttatacatggtggggtcttaggctgcagtgatgtagctatgttttctggtcaattattgtctttcattaacatt

SEQ ID NO: 106858 - DNA, 5452 bp, Cannabis sativa
  modified_base (4414)..(4422): a, c, t, g, unknown or other
aaagctattttatacactgtatatattgattgacatgatacaagcaagcaattttagatggtaaaacaatctgtattcatagccagctatgcatttataaaatttgtatggacatactttcttgcgatcaaggttatagattcagcattggttttttatttattttaaggaggggaaagggtatctgtagatatcagtggagcaaaggcatattgtggcatagttccaataatatttatttaattttgttagtttgaaacattttttcccattgatgggaactgctgttaggtatgatttttgttgagccattactttgttccagtaataaaatatactatgtggtcaatttgattactttctttcaaaagactgcatattagctttcttaattgttatgcacgttcaattgcaggactgacagtgctttgaagtttagctggtttttcctgttctatttggtgagcataagagatgattttaagatataattttttttcattaaataaaaaaagaaatgacgataaacatttcttacttctttgctctgattttccttgtagctccatattggcttttgcatctttgctgcagttgctcctcctattatttttaaggggaaatctctgacgtaagtgttctttttgttctcatttgagaagatttttttcacaattatggctgtcttacacatatttctgaatctaaaactgaattttgtttattttacataaacagaggtattctgcctgcaatagacgtgttaggtgatcatgctttggttggagtaagtttttttttttaatcgttattattattattattgctttgttaattaattaagtgcgcacaaaaagagtactatcatattagtactaacttgtattaacatgatgaccactttatttattttatcttccttcatttatgtaactgttttaggaatggcaagaagttgatgtttgattttgaatagtgactaagaatgcttaataattgttgcagattttctacttcattggatttggactgttctgtcttgaatcactgcttaacatctgggttattcaggtacagtattctgaaggctgaccatctttgttataatactactgtcaccaattttctgatattttctttcacgtgcagcaagtatacatgtacttccgaggcagtggtaaggctgcggagatgaaacgtgaggctgctagatcaactatgatggcagcactataataaggaagccttcattttggagaagatacttaggagcagggcgattttccaacatccaatttcttcattttgccattccttcattcggtttgtttcgcagcttgttttctagctatacttgatgtgttttattatgttgattggagaggcatgttcaaggaccagatgattgagatgagatacttgttacaaacttagctgtgcagtcagagatagttgcatctttgagtcccatcttggaagtattgttttttgttttacatttgtttttttatatataaaagtgattgtttctccctccctccctccctccttttctttgtcccactttagggatactgatttgaacccaatatttgtggtcttgcgcagatttttgttagggttgtagtgtctgaattctgaatgctttaacaagaacacacggatgtttgttagggttgtagtgtctgaattctgaattcctgaacaagaacacacagatgtttgttagggttgtagtgtcagaattcggaattcctgaacaagaacacgtgcagcatggaaattatatgttaaaattagctttgccaaccgagaatcttacatgtttgtttttagcaatatgaaataaaaactagctgacatacatctacatttcatgctctctaattagcactacaattttttaagaatgaattgtgtatagcatttagatgtgtttttattaatgaatattatgttcaatttctttaatatccaaagtcgctcaagacgtgcattccttcatgttttcggcaaaaaaatgattaaaaacttccattaaataatgtggaagaaaatactgtaaaagaaaaaaaaaaaacaaaacaaaaggcaaaagtgcaataagtggtttaaaagctgcatttaagtcgtgtacttgggtgcattccttcttgttatcagcaaaatgaataagaacttgctcattgttttacttaagtgaatttataatgtgtttcagtccgaatcgaattcaaatgaaataaaaaaaaacgaatccaattttttaatataatagattagaataatatatgataatatgatatatacaattaaaaagtgtattaaataacgtagtaatggcaaccacacttgctcttaaaaagagaaataaacaaataaataatagatacagcacaggaaagaaaaaattcccactatgaagaagaagaattagaggtaccaaacaataaccaccaaaccgattgggttagctcttgtatgtatgctatataaacatgaccattcaatgcttgataaataaataatagaatgatacaaataataatgataataatcaataacaacaattgacaccaaaaatcggaacatgtttcacaaccagagaggtcttcttaagctgatgatgaacaacgatgacaaacaacagtttcccctttggtgagaatggccaaagtttatctatctgatctctgttagaatgggaattttcctgccattgaactttttcacaaatggtggaacgttttcttaacatcccccatgttcagcttttgctttgcagctttatcattcacaagatataggacattatgtttctttttcacctgcgactaccaaagtcaatcttcgttagatccactcccgtttcgctctttccgtatcatgtctaagaggtcctggacaacttcagacatcggcggcctgaatgtaggctccgactgtgaagtgcatacacagagttagaatataggaattaaaacttaatccaacccattagagtgtaagaaaattgtttacctgaacacatcgagatataatgtcggcaaagtgtgacaaggactttgcagggtatcttccatgcagagaaggatcaaccatgcttgacaatgcatcaatgtcgtggagctgggtcattgcccatctgaccaaaaactgctcccctcgattccgctctctatgtgtccagaatattgtgcgatgaaataaagttacacatgaaaataaaggagaatggaagtagtgaaagaagggttgtattttctacctgtcataggacttgcggcctgttaaaagttctagcataaccacaccaaaactgtaaacgtcgctctgggaagtataaattccagactcaaattcgggagctccgtaaccatatgctgttagcaaatgtcctgagagctgagagtaaccagtaaatttagttttcaggactcaattacagtaagatgttttgccacaaataaataaatacaggcagatagatgttcgtaaatgcagagtttcgacttacctggctcacagaacctgatgatatcaagggagctaacccacaatctgatagtctcacagacaggtcatcatcgagaagaacattgccggatttgaaattcctgtgtacaacaggtggttcacagacctcatgcaaataccttaacacaaaaacaaagtttcagtaatccggatggtgcatgtatccaaaaaatgtcattaagtaaacataacagacttatacttctactattttctcataagtgagcacatcaatagcgatgaaacgaatagagaacttgttaaaaactgatagagtaatatatgtgtacaaactgcactgaaaaaatcataagaactagaccaatgtaagctgtaattttcctaaaaaggtcaggttgcaccaaaagcagcagaaaatttatggataacaattttctaacatctcatatttactaattcctcataataataaatacgtggtaaatgaacatattcaaacatggccattgcaattgttacttactcaagagctctcgcagctccaagtgccattctgatgcgagaattccatgaaagtttccttttaaattcgtcatctgaatgcagagcctcctgaagtgagccgttactgcaatattcatagacaagaagtctttgaccatgctctgcacaataacccacaagcccgacaacgttggcatgcctgattctatcaatattgttcacaagtttgataaattcgtcgtccttttgctgactagaggctgttttgtccaatttcttgactgctagtagctgtaaaagcaaaagagcgtcacatgtcacatgcataagtagacatgtaatcacacacacatatatatatggattactttttaatggacatttgatggttactaaacaaatttaactatannnnnnnnntttaaaaatattaaaccattaaatgttgatccattggcgaataataaaagaaaattttaattttctatggttaatttagctacttaattagaaaaaatgtatgcaggtataagtcgtgaaatccaaattatcaaacaaagatagttattaactagacaaatgatatttgctgagcagattagattctctctttcttcttacgtatctatgaaaatccacaactcctgtcatcatctgatctatcgaaccatccataatgtagtaaatattgattaatacactgtttatcaataagtaaacaagcaggaccatactaagatactagaaaagtcattgagaactttttggcatagaaagctggcaaaataaccaaacactatacatgataccatttgcactgtaatctacccacaatgtaaggcacagccatttaaactatatatgtgacgggccctacagaaataaatttcccaactcaaattcatttttatagactgctagtatctttcaaaaagcatttgctataaaaatcattgtatttcaaggtagaaaattggtgaaataagctagaacttcatttgaggaaagcatctggatctaacaccaaaccaacaagtaagcatacaaatagatattatgaagaagaaaaataaaactacgtttaaaaaaataaaaaaaaacaaggaagtttctagtaccaatccactagactaaatatttggcataaagcacgataaaggtataataagaaacacacctttccatcaggaagctgggccctatagacaactcccagcgtgcctgttcctattagattatcttgagaaaagctgtctgtaaattgctgaagggatgcaatactgaaaaactttgcagaagtcaagtgactgctagcattggtagctctggtggaaggctttcctataatcacgtcagagggtacacgaggctgcacaataaccttctcatttggaggaggagggggaggcggaggagggggaggaggaggaggtggaggcggagggggagg

SEQ ID NO: 106859 - DNA, 524 bp, Cannabis sativa
gcgtgccccaatgactgttttccacttccaagaaacgatcaactcgcggatgcaacagccgggcatgagatcctaagctttatggacgcctattcgaggtataatcaaatcagaatgcatccaccagaccaagaactacaagttttcgaacagatatgggtctgtactgttataaggtcatgccatttggtttaaagaatgctggagctacctaccagaggttggttaataaaatgtttaaagaccatatcagataaaatatggaagtataagtggatgacatgctcgtcaaatctaggaaggttggggggcatatagaggacctggatgaatgcttcaaaatcctcaaaaaatacaacataaaactcaatcccttaaagtgctcttttggagttagctcgggtaagtttctttgttttattgttaacgcctgaggtatcgaagccaattcagaggaaatacaagtcctcctagatatgaaattgccaataaaaactaaggaagtccaaagcttaactggtcgg

SEQ ID NO: 106860 - DNA, 642 bp, Cannabis sativa
cttttgaaaaaaaaactgttttgattaaaagactataataaattgttttttactaaaaatttatttaattatttattatatatatgacaaaaaaaaaaatttttttaaggaaaaataatttaaaataaattatatttaaatttctaattttttattttagtttaaaaaatattttatatttatatttatattttaattattaacaaacaatattaagtttcttataaactacaattgtttttacgattgataaaaatataatttaagaatattaaaaattatttttatcaaatggatataaatttatactatagaaaaaaataattaaaaatatatagaaaataaaaattttatatagcatattttacatatatatttgtgattttaataaaatagattaaaatattattattattattacagaatattaacaactcgcagccgtttaaaatttataatttaccaaacacccagctcagttttttctacagttctgctacagcggctttttcctacagcacagctacagtttctttttcccacagcacagctataccaaactggcccttggtctgctagtgtttatcactactgctaggaatcctatgcgtccaccttgcaattggtctctagccttcaaaa

SEQ ID NO: 106861 - DNA, 699 bp, Cannabis sativa
ggataacacccgagtgactccgaatcatcttatgagatcttgaacataaggaagcagaagcttcaaaaaattttcttttcttgaaaggagtggttctaatatttatctctgaagttgatttaacaccaatgtcacctcccaaggttctaatctcatacaaatccaatttcccaaaatgcttaagctcttgtagcaatgattcttgggcttgaaaagaattacacaaggccttattatcgttggtagagcaaagagccttctgtccaacacttaggaaatcatattggcccaattcattaagaggagagctcggcccaccaatctccttatcattaattaccagaggcccacaagaaattggcccacttccaattccattcaaagtcaaccctcctttaagcacactattatccacgtgaggtactattccaattccatttaaatcaacataagcagccataagcccacttggcccactagtgttcaaaatcggcccaatatcaccttgaccaccaacattcaaaaccaatagtacaataaaggaacggtaaaaagggcattcctctaacataggaaaagatacaggaagctttcccttccctacactgtcagtcggggccaaattacccaacagagtaaaggtcaaatctcgagatgcaggcttgtgcttcgatatccaggcagcacgcagaggcgaac

SEQ ID NO: 106862 - DNA, 597 bp, Cannabis sativa
  modified_base (309)..(313): a, c, t, g, unknown or other
gaggagtgaaaacataactgaaattaactaacttttctaacaaacttggagcttgataaaagacaacttgtttacttgcttggattacaaaaacctacagaaatgaaaggaaataatttatattccattcatttgtttaattgcattttaaagtattggaatgtcctttccactattttggtggaatggctattccattttgaaatgaaaggaaagaccattctaatgtagcatgagaaaatatttaatgatttttttatcaattttttttttatacattttaaattttaggagaattaccccatatannnnnttttttaacttttttttctttttcaaatttacggtttgggtttctaaagtagttgcagcgctagttgcaataggggtttctatgtagaattttgaaaaaatgcaaaaaaaaaactattttgaagtgtaaaaatgaaaaaagctttcattccattcctatttatattcatattctcattcttattcttatgttttcattctacccaaccaaacaccacctaagtggctctccatagagtatcaacaagcttgatttagttgttagttttaattttaaatacttgt

SEQ ID NO: 106863 - DNA, 509 bp, Cannabis sativa
  modified_base (36)..(38): a, c, t, g, unknown or other
ctagccgattttagaggtctggcaaaaccggctagnnngtttgcaccaattctccccaaacccttcacctgttgctaaattttccaccaaatgccacccaactttccaaagtacctaaacaatgcataaacaatattttccaaccagtatttcacagaaaaactcaatgaatcaaattatgccattagagatcaaagctttgagctcaaagctcaaacttgcataaatctaacacaacacactaaaaacagctggaagaacttgaaaccaactcaaatgaaccctaaaattcaaatcctaaacatcccaaaccctaacagccactaattcttaaaatcacaacatgaaaccaactaaaacattaagaaaacttagctaagagtgtctagggttaccttagcttcacgagtgcttgtttccttagcttcaaactagaaaaacactaagctttgagggtgattccctctggttttgtcccagccgaaagagagagggagagagcttcaaga

SEQ ID NO: 106864 - DNA, 516 bp, Cannabis sativa
tgccgcagtaaacctcatgtttgacgaacagaggcatatgttcgccgagtggagggacaaagagatggaggcattaagggctcaccatgcagaaatcgaagatcgtagtcggcgagctactgtgctgatacgaagagcctatcagactgtaggccagcaaacgtcgagtgtcgttcccttagaggaaacagaggatgacccgacgctgaatgcctcccagacaaccaacgatcagccgtccaatacccggtcacgagttccactcgtgggccaagaggtaggcaaacagaccttgttggggaattcatctggaggggccatgctcgatggatccacggagaataatggagccattccacctgtcaaccaagcgaaccaatcgctaagacagccaatttcttctgtgttggaaaggctaagaacaacccatgacctaagggatgatctaaacagaagaaggggaatagacgagcagaatactacaacgaacgtgcagcccggagcccatactcaaat

SEQ ID NO: 106865 - DNA, 1782 bp, Cannabis sativa
ttctatgatgatataccgtgcaactttcctcctcatcttttgagcttcatttctatcatttggaagttttctagtattgaggtaggctgctatgggtgttatccagttcgaagctgtgcctatcttttggatttcctctgcacaagtgatgttgggctcttccaagaattgaatagggactaaattggccttatttgttatggtactgctcacaagtcgggccaaggcatcaacagttgtgttttcttctcttggaatttgcctgagggtgtaacccttgaattgtgcgagcagatcttgtatcttgctcagataagctatcattttctccccctcgctcaattagtgaaccctggttagttttgtggaaacgaaatcgaaacgcaatcatactcaagcaacgtggttaagcatagtcaagatttcacattcctaaacctaaatttactatgattttcccagaacaagttcaagagctattgtgttttgcaataaaaaacccaaaaaaatcaaatattcatgcataaaggaggaaagaaatgaagaacttactcaatgttcgaagctttatagtgactcggatgatgttgttcggtgctttctagggattctttgaaagatttcagaggaaaaggtttcttgctctgatttttcaagattgaaaatggctaaaagttgttgattagggatttcatccctattataagccaataagtgaggcaaaatgatcatttcaaaatttgaaaacttcgatttccccccaaaagtgaacgttatgaacttaagtacttgaatggtacctgtcaaacgtgctaattttaaggcgtggctcgaggtacatgtcagtcagcattaatgagacaaaaaactgaagagacccttggtgagagtcacatcagattgtcaataggcacttcgaacacgtgcatccaaaccgagtgaagtccacgtgtgacatcaaagtccccacgcaaacttgggggcaaattttatcccattttttggcactatgacgtggtagcatacacgggtgacacgtgtccagcatttcttgcatctgggcgtagatgagtttcccaaacagacttcacgtaacatccgcgcatatgatctctaatttcttgaacatggtaaagggaaaactacccaaacaggggcaagtttggctttctgaactactcaccaggacttacttcagaatgatatcgtgaagtccaagcacaaaggcaatccctacaatcatgggattgaattagatggatacggcatgtgctgtctcaatccccaatattttttgtgtattctatttatgtaatgaatgtcctttcgattatagacattgtaagcaaaagggaaaccttccctcatgcattaaggccctataaatagtgatctagcttcacaataaaaggggatcgaaagaatcacttgagggagagatctaagagaattactcagagttcattgtaagagcttagagagggcaaacatcatgttctttgttctcgagttaatacaatctaaggggagtacgctattaccgtactaaagaggttgaacctcttcaaaatctgggtgttctgttatttaacttatttgttttgctctatttttattatattcttaattgcttcataattgactcactgtcgttggctaaaagcgaggtcaacaaaaagaaagtagcaaagtccgaaagcattcataaatattctatacaagaacaaaagcatggtgttataacctatcaaataccatcatcatcatcagaagaggagctat

SEQ ID NO: 106866 - DNA, 1084 bp, Cannabis sativa
  modified_base (877)..(885): a, c, t, g, unknown or other
aagttcagggggcaaaaatcttaattatctttaatttatttagtaagatataatgcatgtatacacatttttttggctccaactatgtatatatatacacttaaaaataattgagtttttattaatctgattatttaaataatttttaaaagttaataaatttagagttacacttcttattatttttaaagagatagagggcaaaatacttatttattttatacacattgcattgatattactaaaacacactaggatttaatgtgccaaataatttttatattaaccatataagatagaaagtaagagaaagatcacaactcagtatcgaaaatatttaacattagtaatagtttagagattttttttttgaaatcagaagaaaaaaaatacttactactttatttttataataatttaaattgtacaacgtgtaaaactaactatgaatttaaattataaaaatataaacatcactataaaatataaaattattttaatatatgtaattttcaattattgaaaaaaccgcgcgaagcgcggtaccattccctagtataaatatataaaggaatattttaaggagtttatgtggcactctatttgaagtttcttccatattctttattttctaaatttttgtcaattatttaattttttaattatttttcagctagaaatttattatatgctattattaatagagtaacttacatacatattaatttattattaatggagtaacttaagactacataataattatatgcaactaatttacattatattggtattctttaatacaaaatatttaatctattttaaattatgtccattaaacttccatattcaattctaataataataacaataatannnnnnnnnataataataataatatgttatatatctatatatctatatctacatatctaaataaaggaaagtacaaacacagtgatgtggcagtctccatgaatatcttcactatttctaagcattctaatttttctttttttttttaaataaaaaaaattattttttatgtattatatttatcatcatttattgctaatttattatt

SEQ ID NO: 106867 - DNA, 520 bp, Cannabis sativa
ggttgtctcaggtgtcctttctagggcacattattagcaaggatgggattaaggtggatccacgaaagatagaatccgtcagggattggccaagaccgaaaacagtgaccgaagtcagaagtttcttgggattagccagttattatcctcagctcttagaagggttttgtaaaatctcaacacccttaaccgagctcaccaaaaagaatcaatgttttgtatggtaagacaaatgtgaggctagttttcaggagctgaaacaaaggttaattacagctccagtgctagctttgccttctaacaaagaaaagttcgtagtttattgtgatgcatccaggcagggtctgggatacgtgctgatgcaagccgatcgggttatcgcttatgcctcccgtcaattaaaagattatgaacagcaatatttgaatcatgacctagaacttgccgcggtagtgtttgctttgaaaatttggcggtattatctttatggagaaagatgtgagatttataccgaccataa

SEQ ID NO: 106868 - DNA, 788 bp, Cannabis sativa
tagtgcctcatgtaattatccctaaaaaaataatattctacaaccatcatagtttagggaaatgtttcaattttttaaaaaagagttttatttatattctataaaattataaatatattctaatactaaaaaaaaatataatttaaattaattttaaaaatcacttttaatatcttaaaaatattattttcacattatcttgttttactattaataatcattctaatgtttttcgtgcattttttttaaatatgtaatcttttttctctaataaatttcatataattattttaaatttttttatcttaatatttaaaatgtattttatagatatattttctaagaatataaagggaaaaagtagcatcaattaaaaataaataaaaattattgtaataagttttttttgtacaattttttaaggtgtaaataaaactctcttttgaaatgcaaacaccaagcatattacaaaattatcgtttctaataatttgatttagtgctgtaaatatgggttggattctttgacactatacgaaactgacacgaacgctagtaggacgagcacaaacatgcacaaaataatatggacttgggtacgacacgatacgatgttacacattgtcatgacacaacacaaaaaatatgttcttaaacacaacacgacacgatacgtaagtacgaatagactagctcaaaagacactacacgagataatccaaaaaagcacaacacggcacattaaaaaaatactataattaatttaataatactcataataaatagata

SEQ ID NO: 106869 - DNA, 578 bp, Cannabis sativa
  modified_base (179)..(184): a, c, t, g, unknown or other
tgggtaatgatgtttcttgcagggttgttggaattggtaaggtggctataaggaagttcaattgtgaagtgaagattttgcataatgtgaggcacattttagaattgaggaggaacctaatatcacttggaaccttggaagatgaaggttatggctataagtccttgaatgggagcctnnnnnncacaaaaggttcaatgcttgtgatgaaaggaaacagagtacatgagttctatgtactcgagggtgaattgtacctgtggtcgaagcagatacagtaaaaggtttagaaagtgatatgtagctatggcatcaaaggctcggacatatgagtgaacaaggcatgagggaattgcacaagaagagagtcattgaaaagcttcagacatgtgcattaccattctgtgagacttgtattaatggcaagcaacactagatcaagtttacaacagcaactctcaacacaaagggagtcttagagtatgtgcatgctgacctttgggggccaagtagaatctcaacacattcaagtaaacactacttcctatctattattgatgattttagtagatgtgttt

SEQ ID NO: 106870 - DNA, 838 bp, Cannabis sativa
gccagtcaaggaattattgaactctcgttaactcttggcgagccacctatatccacaacattgatgtaagattttctagttgttaacttgccatcggcctacaacatattgctgggtcatcctgcactaattggactaagggcagttagttcaattaagcacatgtcttttaagtttcaaacactggtaggagtaggtgtagtgcaaggtgaccaactattggctcaagaatgctatcatataaagctacaaaataaaaaaaccagccatcaattaatggcagttacaactaaggaaagcgagaaacaggacgaggatctggatcctcgagttcaagatgaaaagaacctgttaaaaccaattgaggaatttgagggagttattttagatccagaaaattccacaaagtgtgtattcattgggaaaaatttggataaaaaactaaaatagcaactaataagttttctgaaggcaaaccaggatcagttcgcctggagccacttagatatgatagggattgaccctgaaattatttgtcaccacttgaatatcgacccaaattactcagctaagagacagaaaagacggcccttggattctgaaagacaaggggcactcaaagaggaagtggataagttgttgactaacgactttatatgcgaggcattctatcccttgtggatatctaatcatgtccttgtcccaaaaccaaatggaacttggagaacttgtatcgacatttcagatttaaacaaagcgtgtccaaaggcttactttccactaccaaggatcgaccaattagtggatgcaatttctggacacgagctaatgacattca

SEQ ID NO: 106871 - DNA, 679 bp, Cannabis sativa
  modified_base (74)..(75): a, c, t, g, unknown or other
gggtccaggtcggggtcccaaactagggcccagacaaggcctaggtcacgaaccaggttttggtctgggttttnntccgggtttaggtcttgagtttgggtctaggttttggtctggatctgggtcttggtcctgggttccaatctcggtttgggtatgggtccgggcccgtgtctaggtttcggtttagggtttagggtttaatatttagggcttagggcttagcgtttagggttaagtgtaaagagtttagaatttagggtttaaggtttaggatttagagtttaatggtctgcttccagacccggttccaatttcaggtcacatggtacaatttaaggttcgggtgtgggtctaggtccgagtccttgtttaggtctaggtccgtgttttggttcaggtttgaatcttagtcctaaatccaaacacaaaccacatgtcgagtctagtttcgagttttggtacgggtttgagttctggtctgggtctaggttcgagcctaggtctaattaccagatttagacaccgaatatgggtcgagtccaagcctcgggtcttgggtccactaccgggtctaaatccagatcctggtctagttctagctcatgtcttaggtcctggtctaggtcttatgtccaagtttgggtctaggtttgggtcttgggcctaagtcatgggt

SEQ ID NO: 106872 - DNA, 879 bp, Cannabis sativa
tcgtgacatgtctaattcatgttctagtacaaagttttgacccatctggactatgacagtcgcagaaactgaaaccttagttgggttgtcaacttgggcactgggtgaaaccctaggcgccctgtgttgacttttgaggtgttgttttgtccattttcaactctcgagcattggacttggatgcgtcatgtcttcatggtacaaaatagtgaaagatagtgagttggaaacaacttggtgggatccaaacaaccactccagagttctcaaagtcaacttgggcgcagggctaggaacctctcccaagtgtcgactgctatgactcatgatttctcaactcgaggatgtttctctcttgccacgtgtcaaacattcatgcccatgtcatcgtggtcagtttctgggttaacacctaataataataagaaaactttacatattagaccaaaaattagataaaaaaattacaaaaatatatcaacatggaaaaatttatttttacgctttgaattttttatttacaaaaatatctctttagtaaaaataataaactgttttttgttgttttatagtttatttgtagttgtattatagttgttatgaggttgttttctggttatttttagttgttgtttagttgattttttgatatttttcagtttttttattttttactgaataaagtgtatttttctaatttcaaaattttataagtatatttttataaataaaaaatttaatccataaaattttaaattaaatatatataagaaaaaagtagttttatcaaaatttttataataataataagggtaaatagcggcataaatacccaaagtttcaagtttgtaagtggcataatctcaatgtttattttta

SEQ ID NO: 106873 - DNA, 522 bp, Cannabis sativa
tgcacacacaagtgtacgtatcgtgacaagaagtaaactcaccaagagtgagatcgatcccacgaggattgtagttaagtacgttaaaattaaactcttacttctatttggttaaataaaatttaagaaaatattaaaactagaaaataataaaaatagtgaaagaagaagcaattaaattaataaggaaattaacagttaataaaaactagggctacgacttcaattgtttctattgattatgacctaatatgattatctcactattatcaatttctatgcaatagcaggtttactaaagtaatttatagtcttctcagatatataaatctcaatcgcatgcaaatccttatcaacgtaagttgcttgcgagatagcaagtgatctattcttccagtctataataatttggataccaatgattagccattctgaattgggtgcttagccattcttttacatctaacattttcttgactttgcttccaatgattaagatatcattgttggaatttattttac

SEQ ID NO: 106874 - DNA, 723 bp, Cannabis sativa
aaaattttctctttaagagattttcattatgaattgcttttatgaaattgagcttcatatctactttgacttgtatgctaataccaattatatttatacgttaatcaagttttatgtattttgtgttttattattgatgtaaaatctatggtatattattctttgcaaagagataatatcacataaacacttagaatttaaattcaatgtttatgaataattgtcatttcttaagcaatcattaatattttgtttaataaaaatatcttttcatctgataggggtggaagaagttaagaaacaatgtatgcagttcaaagatgttttatatcttttaaactctagactatattcataactccacatgatatctataacacttaggggttgaagaattattgatatatgtagttcaaacctttttaactctagactaatactcaatacaccgcaatacctctatggcacacatattttgattagacatggatataatataataaaggaactagcaaattaatagaacttattcttgatcctgtaagtatttcaattaacatgttactggagtaatagagaatgataccaatgaaattcttagacatagtatcaaagtaccttatcttagtaggaaaattttaaacttttagcccattattatttggatgacactaatgatagcctaatttattatgatcataataggaactctagaataaaact

SEQ ID NO: 106875 - DNA, 545 bp, Cannabis sativa
attaaatatctcgaacccataactagagatatttttacggcacgttttgttgattgtcattttgatgagacaagtttcccatctttggggggaggggaaaagaaacagatggaaaaagaaattatatagataacttgaagttcaaagaataattcatttgcaaaatattacaaatcaattaccagatgcattcactgacccaaagaaaattaccaaatcacatattccagctgaaaatgctctagtttgaattgaagtctcagaaggacaattagctaattattctaaatcacacttgaaacgtggttgaccagtcgttctaaagataaaaatcctcgaaacagaaagggagcaaataatcaagatggccctaatgaagaggctgaaaatttcgaggaagatgttgacataaacaaatctcttgaagaaattcaagtacctaatgtattagaaataatgagatctcaataaattatgtcaatacaggaaaagaatgggactgggtcgaagtaattgttgacaatatttttgcttataatgtagtg

SEQ ID NO: 106876 - DNA, 3384 bp, Cannabis sativa
tgaaatagagttttatttagggcataaaactcaacactatattcatgggttcagcttccacccacttggtgaagtagtcaacaatgataatggtgaatatgactcctcccttaccggttggaagtgatcccactaagtctattccccagacagcaaaaaggctatggagtgttcatgagggttatctccattagtggggcccttggaacttttgaataacgctgacattacatacaattacagacatattcggtaaaatccttcttcatagtaggccaaaaatagctttcacaaatgattttctttgaatgattgggtccagatgtgtgatctccacaaaacccttttatgtatttcatgcatgaatctcttatctctgttctagctatgcaccacagatacgtcactgataatcttctcttgtatagttttccgtccaagatcacgtattaaggggcttgatactgaaccttccacgaagcagctctatcctcaaggagtgtacttctctccaagtatttgagtattagagccatccaagaagttaaatggtcgatgacaaataaccctagtgtttctgtgctcgaagtgatcaaatgtatgattgggactagtctatatttttctatttttggatccattgctagttttgccaaattatctacaaaagcattcttatccttggggatttgctttacagaataatgcttaaactattgcaacagcccctaagttttagctacgtaactagtcattttttctccttttgtttagtactccacagacacttggttgactacaagctgtgaatcactgtagagttcaatgtttttagtgccaacctcttttgccaattgtaaactagcgatcatagcctcgtgttcaacttcattgttggaagcttcaaactcaaattgaagtgcactttgaagctggaggttctatggagattttaaaatgattttgactccaaaacctttctcatttgatgctccatctacgtatatcttccagacgtctctctctgggaccaacatttcaagatcttcatttatccctgtgcactccataatgaagttagctaaggcttaatctttaatcaaaattttgggctgagattgtatgtcaaattgactcaattctgttgcccactttaagagccttcctgacgactccgacttctatagcacttgacagagagggtggttggttagtacccttatggcgtgagcctgaaagtatggtcttaacttttgtgaagcaatcagtaagtaaaaggaaagcttctcgatcataggatatctagactctatggccagtagtttcttgcttacataatatactagaattagtacagttccttcttcttgcactaaaatgacacttatggcatgatctgacactactaagtacagaaacaacaactctttatcaactagcttggacaatattggagccttcgctagatgttcttttagtttttagaaagtggattcacattctgttgtccattcaaatttgttatttcctcaaagtatgttaaagaacagtatgcacttatctatggatttggagacaaatctactaagtgctgctactcttcctatcaacttctagacgtctttgtgcttcctgggtgaaggcatgtctataagagctttaattgtctctaggtttgcctcgatcccttgtgaacttactataaaacccaagtgaagaaactttaaaagtgtatttcattgagtttagcttcattttgtactcccagattatggcaaaggcctcttctagatctttgtagtggttcttggagatttcaactttaccagcatgtcatcaacataaacctccatatttttccctagaacattcttgaatattttgttcaccattctttggtaagtggctctagcattttttaatccaaatgacatgaccttgtagcagtagattcctttgtcagtttggaaactggtgcgctcctgatcagccacgtgcattttattttagttatagccggagtatgcttccatgaatgttaagagttgaaatcttgaggtagcatcaaccatttgatcaatgtatgaaagtggaaagcaatctctatgataagctttgtttagatgtgaaatctatacacattcttcatgtcctactaggctttggatcagaaccggattggcaagccatatgggatatagagcttccctgaggaagtgaatatttgtcaacttgtctacctctatttttactgcttctaacctcgctagatctaaagttcttcacttttaccagactagttcaatgttgggatctatatttaatgcatggtaaataacagggggactaatgccagttagatcagaatgactctaagctaacgcctcactgtttggcttgatcatggaaataatcttttgcttcattgccagaggtaagttcatccccactcgaataaccttggtgggatttccatcatctatgcatacttcttctacttcctccattggttttatgacatgttccacgccaattcgtggatcaagctcatcttcctagatcaccctatgtgatttctaggaagatgttctggtttaagagtaataaccttctcggaccataactacagttctggttgaaacattatagcaactttgtgcacttctttgatctcctctgataagccctatacttccggtattgctggggaattttaagcatagatgccgaattgatgtcactacaccaaaatccattaaaaatggtcttcccaggataacatcataagcagtagggtaatcaactatcataaacgggttgcacttgatggatgatattgtgttgtttccaggaacttctccacttagagtcatcagaagttgtatttttctcatggggattaacatatctccattaaaaccttgcagttgaattggacatggtagcagattagcttccaccagaacaatggcttggaaggctcctttaaaaatgatgtttagagagcttccattatctactaggattctggaaactctttcgtttcctatttgagcttttattaccaaagggtcattatgaaggaagtgcacgtgcctggcgttgtcttctataaaagtcattagaaaatttatcatccttggacgctgggtaggtgattgtaccgagtggcaagctcactttgattcaactcattcaagtattgcttctatgcattctgagtgcttctagcaatatgaggtccacctgagatagttgctacataccatctaaggctggtaatgcagctcctagaggatacaaatttttgggaccaggggctacaactactactgctgctagagcattttgtaccccttaaagggcttgtacatttggagctta

SEQ ID NO: 106877 - DNA, 1440 bp, Cannabis sativa
ataacagtatgacaccgagaaaagcactagacaccaataatattttttaataattttcttcataaatgtatactataaataaagttgttggtttctttattaacataataaaacagctttgccaaaatatatattattgtcataataattttgcaaaataattcttttaaaaaaatgatctttcaaagaccttaacaacccatctcactcaaattatccattcaaatacctcaacaatacatcagaatttttcttttaatgtaagtatatcacttttacatttattatatagagacattttttttagttttagtatttgccaaaattataatttagttattttatatgacacatgtattatagttatggcataaatcatgttaatttttttttgaaagtttcattaaatttaagatactaacaataaaattcaaataattaattacatgctcatttacatttcgacactaattgtctattggcaaaagagggtagcatatcctcttatttcggtatgttggttgaggatggtaagattttgttatagtctctacttaatgtgtctttattttttgtttaagcggactgctaataaaattgctcataatttagctcaaggatcttattttattttgattgtgtgtttcaagaaattgaagttccttttgatgttcaaaatgttttatcatctaatatgaattaatgaagtttaatcttttataaatatttttctttggtatcgtaaattatttaatttttttaaaaacaaataacatatttattatcactacaatttacactgtcgtattaaaagctaaattataatttcttatgtaataagtaaatgttttaatattgttagagttagtcacatattgctaatgtgtgaaaataaaatgttatatataagatgaatgaattacttctttcattatcaattgatttttgagatgaaacctcatgcatcttacaattttaacatggtattaaagtaattaaaaagcttctgctatctccacctttgacctcccgtgggtaatgaacggggaatgtacccccaattcaattcccgctccctatttatacttctcatccctgcccccatcccacttattccccaataaatttggggtagagaaatctccattggacatgaggattcattgagtacctgtaaaaattaaaagaattatattaataaaatagtgtaacataattcaaaatgaaataaatagttttttaatttgaaataaatattatatctaatttatacttcatgttatataattataataacaataagctagaaatataatcaacacatacatttaaaaaattatacaaataactttaatacgatcatacaaataatatttaaaaaattatatgaaaactatatattgagctcgcatatgaggtgggtagtattagccccgactt

SEQ ID NO: 106878 - DNA, 1335 bp, Cannabis sativa
  modified_base (27)..(27): a, c, t, g, unknown or other
aacataaataactgctaatttccaaantaactaagcgggctttacatcaaacgtattcattgtccatgtgtagattattgtaatagatccaaaagaaatattatgatgattaaagatcatgtgtatttacgaggttttaataaaagttatactacttggtattagcatggcgaatatttagttgatgatccatatccattaggaaagcgggggtagatgatattaaaggtaatgatttcaatgatcatccattggacactcttgatgaagcggaaacataggaggaatttcttaatgatcctgaaaatttcgataattttctaagtgatgcagataaacccctattcgatggttgtaaaaaactaagattactaataatggtaaagttttataatattgttatcctattttttgcacaatgacgtggcagaatttacaagtgacacgtgtcctatattccttgcatctgtacggagatgaatgtcccgaacagacttcatattatacatctgcatgtataacttcaaattacccaagcagggtgaagggcagatcatccgagtaggcataaattttgttttctgaactacttatcaggacttgactacttcagaatgatctcgtgcagtcaaagcatgaagacaatccctacaatcatgggattgagtcaaaagaacatggaaacctgtcccaattttctatttcgcgtatcataattatgtaatgaatattctttcctattttatattgtaagcaaaaaaggaaaccttccctcatgcattgaggccctataaatagtgacttagcttcactgtgaaaaggatcgaaagaattgcttcagagagagatctaagagaattactcaaagaattcattataagagcttcgagagagaaaacactttgttctttgtctcaagtcaatacaatctaaggggagaaggctattaccacacttacgaggccgaacctctttaaaatctggtgttctttattacttacttgttttgctctattttaattatattttaatcgcttaatacttgactcactgtcgttggctaaaagcaaagtcaacaaacatcaaagtagaaaatagagttgagcgataaatgttttgctcaattcttagttgcttttaaatatatctttccatttgtcaattgcttctgggaatctacatatgaagtaaaaaaaaacttcaaattccataggattgaagtatgaaaggattgaaaagatccatgcatgtccgaacgattgcattttatatcataaggaatatgcaaaacatgcatttttgcctgacttgtggtttatcccgccataaagtaaa

SEQ ID NO: 106879 - DNA, 1384 bp, Cannabis sativa
gatacaccacctgatgagatagagaagccatatagcattgatatgcgtgctccaatgataagacaaagctttctaacagcctccccttggttacgtaccggaaaaccacctagtgcgtccggcaacaacaccagccagcagcctcctcctatatttaattcagacccacaatccatgcatgatttgaaggatcgactggacagaagaatcaatcccatgctaagtcaaaaatgcataatctagtctcccacgattcatgggtcgaaggtcaaaaggttgttaatgctaatagtttggttatacatgacaatgagatcacattcacttttgatgtggacatgactttggctgacttaaagagaaaaaggggggacaatatttttaataaagggccgactacttccaagggtgatgaaggggattgtattataatgctaaataattctcatactaataatattattgggctttcacaaaatgaagaacaggtgggtcctggtgtccaggcccaccaatcattatgaataccataagttggaattgtcgtaggcttggtaacccacgggcttttcaattgattggtaacatttgtgttcaaaagaagcccaagtttatttttctgtgtgaaactatgtgtaagaatgacgttgtagaccgaaacaaaactcagctgggttttgagtgttcctttactgtatcggcccaaggaaataaaagtggccttgctttcttatggaagtccaccaatgaatcccatcttattaacttcttagcccaccatattgacatgtgttgaccttacctttagccaacgacaatgagtcttaattgtaagcgataagtgatataatatagatgtaatataataaaataaataaaggacacaaagtttttaaagaggtttggccccgagcagttcagtaatagcctactccccttgatttttattgacttaaggactaagaatacagtgatccttcccttaaagctcttacaacgatatctctgagtatactttctttgataattctctcgacctttcgcccagtgagaatagatcactatttatagggctataagcttgagggaaagtttcccctctgtttacaatgtctataattggtaagattacacattaaatacagaatacactgattaagggatttggacagcttgccatatctctttgatatgatcccaaagttctagggattgctattgtgattcacgatgcaagtgttaaagttacaaagtgttggcatgctattcggaccgtccactgctcggctaggaaggcgtcatccgtgcagatatgtacggtgttcggttcggcatatctctttcgagcagatatgtgaagtcgattccatgtgtcaccagcatg

SEQ ID NO: 106880 - DNA, 519 bp, Cannabis sativa
acctgctataacaggttactaacaagtaaaaatttcttgtagactcaaaataattataattaattatatatttaagataaattaattttttaattaaaatatttaataagatattttttacaactaatatttttaaatattttttttatttataaaaaaataaataaaatcaaattagtattaggttacaggtaatttattaattatttttgttttttttttatgaataagaatttttattgctccaaacaaaccttttacatcactaatctttacattttgctaacaaatttatacttacaacttagcctttttacaaaatcacaccatcagaatccatgttttatcttcaaccttggccttcttgggcagcagccccttaattcccagcttgctcatttgttgagattttttcatcgtagtattaatgagccacacttgttgattccatagtacttcattcctagccttccatatgtaatacacaagacttgcaagaacagttttcaccatactttt

SEQ ID NO: 106881 - DNA, 525 bp, Cannabis sativa
ttttttattgattgaacaacaataggtacaatacagttaagacgagattctctgttaagttttcactaagtatttcaactctcacacttatgccccataatcttctttatctatagaagatttttcttacaaaactcaaactcaatatctttcttttctttccatctatttacctttcaatcttttatctctcaaactctcaatctcatctgaactaagttctgaatctcgtgtcttgaaataacaagtcaaggtggtatttataggcttacgatcaagattctaaagctagtggctgcaagaaacgaggttgttaagttagttagaaatataactaacttaacctacttctctttgagcaaagtctccacatcaacttaagtattagagcctccaaaaacatatatgagcttccagactcactgaccaagggtacttgcggatgacgcttttgggtaggatagagcctattgaagtcaactatccagaactaccattccaagaaggacaactagccaactagaa

SEQ ID NO: 106882 - DNA, 1251 bp, Cannabis sativa
attatatagtcaaccaaacataagaattgtattcaattattgattccataaatctaaccaaacaacctaatgctattcctattccattccattaccattcctattcctattcttattcttatttctattcctattccgattttttaatgaaagtagataactgataggttttgtttataacaacgtgataggttttgttgaagacaatttcaaaatgtattttttatggttttgaaatttggttatcgggtaaaatatgtgtatttttttacatataaaatatatgtaaaataagagcttatttcatattaaataattgaaatcatatcttataataaataaagataatgaaaaatgaaatagagtgacgaatcaagtcatatataccaagtatcaacttattagagattgtaattttgcagtccataacttagttaaatgtacataactaacaatgttactgacatggttgatctcttttctatactaaaaaaactatcatttgtaatgaccatgaggtctaatatttattttaatctataaacgctaattttcaaaaaaaaaaaattatttaattaataattaatattcatgtttgttgataaaaattaatgagaaaaaaaaattatttttgtgaagaaaaagttattataaatttctaagtattaaaaaaaagcataatgtaccaattgttagggacaggttgtttcgtcaaagcgataatgtatgattttagttaaaatttattagaaaaaaaaaaggttattgacatgattgatctcttttctataccagaaactatcatttgtaatgaccacgaggtctaacttttattttaatcttttcaaaaaaaaccttattagatttaattaataattaatattcacatttgttgattaaaaaaaaagaaaaaataaataattttgtgaaaaagttataataaatttctaggtttaaaaaaaaaagcataatgtactgactgttatggacaggttgtttcgtcaaagcgataatgtatgattttagttaaaaaaatttagaaaaaaaaaagatgttacttgcattcttgatctctcttctataccagaaactatcctttgaaaagaccatgaggtctaacttttattataatctataaacgctaattttcacaaaaaaaaaaaaaaaacactataaaaaaaaaacactatttttgtgaaaaagataataaatttctaggtattgcactgtttcgtcaaagcgataatgtat

SEQ ID NO: 106883 - DNA, 506 bp, Cannabis sativa
  modified_base (364)..(369): a, c, t, g, unknown or other
  modified_base (441)..(441): a, c, t, g, unknown or other
aaattgaaaaagttatgaattttggaaaattaggattcaaggctgtcgagtggttgttcgtgagcaccgagcactcggactaaaagcctatccgcgcacgtgaggctccgtgtgcaccctgtgacactcccgtgtcacccctacacccgcccgccttgcaccctgcaggcgccgaagtctgccgcacacgagaccctgcaaggtccctcatccgcccgggctgaggctgctagcagcctctcctaggctgcaggcagaacctcctggccagccaccttcccaaatccaattttggggatcgtttcccaaaattcaatttttccaatattaaatattactatttgaaatatttctaattttaaannnnnncaatttgaaatatttcctttttttgaaatgtttccatattaaatatttccaattatggtaagatttaaaaanttgttaacttctttaatatttatatattatttaattataatattagatattttgatatttaacat

SEQ ID NO: 106884 - DNA, 1239 bp, Cannabis sativa
atttattacacaaaaaaaaaatttatgttgtgacaaaaatttaaaattatcactaaaagtaactatttttttgtagtgcttttaataatataaatatatatatattatagagttttattttttctaaatattttaaacttaattaataataattattaagtaattaagttattatagatatatattattataccgttagttttcaaattgtatattgttatgaattcaaaatatatataattattgataaatttatagaaaattcatcatcatatgattttaaaaatattatcattactgtatttcacttgtaattgactttccatttccatttaaattatgtgttttagatattttcaaatgttattatataaatgaaaaaataaataataatcttttgctatttctatcatccaacaatataaattttttttaaaaaaatatttgtgaaaaaataattggaaaacaacaaaaattgtgaaaaatacttgtgatttataatattctactatattttatagttcttaaattttttctaaattgtaaattagtttatatattaggaagatatttttatttcttaaaaaactttaaactcaatcaattaattaatttttttttatatatatatatatatataattttttccaattaacgtaatcaatccattcataaaattaataataattttaataataataataataacatgtggtaatttattaaaataagtaaaatatcaatttatagatttatgctctaatagaatattaaaaatgagagaattaaagagagaagaaaaaaataattttagagtgattttagagtgctatgttatcgctttatttttctcttttatgtatatactattaaacaggccgcacttcgtgtgcggcagtcaaattattatataaatattagggtatattgcgacataaatacctaatattttagtatttatacacttaaataccttatctttattttcggaggcaaaaatacctaatgttacaattttcttaaactcattactaccacttccattaactcataaatatggacacgtggagggtccagatgcattacatttatttttttattttaaaaattaatattcttaatattagaaacgaaatgctacttgtttaaaaaaaaacagttctcataataattctcacatatactacactgcttcactcaattatggtaatttagttttgcatcttttttttttttttt

SEQ ID NO: 106885 - DNA, 2924 bp, Cannabis sativa
  modified_base (1190)..(1192): a, c, t, g, unknown or other
ttgaatcattttttgagatgaacacaaaggagaatttgcctcaactatttaagccaaattgaatttgaacttagaatctcctttttataaggaaaagtttgaaaccactaaattatgactatgatcacgtgaacaaataaattttaggactgaaaagcaatagaattttaaatgctgaaaaaaaaaactcttcaatgtaggaataattattacaattttttaattttagaaaaatggagatatccattatcaattacaattttttattagtctatgtctattttaattaaaatatacatttatataatcattaagaagcccatattagaagttttactaaatttaccctgtcctattatctttatcttccaaaaagatcatatttaagataacatagatgtcaatatattgaagaaaaaaatataataagagataaagatgacttgaccttcttatagtttccttttcgttattttagttaggcagtgtttgggattctcagaaagataaagcttccccaaatgtataaaatctgatcctatcaaatgatttattctcttctttttttctttatatttttctaaaaataaataaaataataatttgtcatatatatgtatgctaataaaccttcgattccatatacttacaaagccaaaagtaccactcgacaactttgtgagcaactcaacttatgaccagtattttaacaagaaaaacgccaccattacattacatattctcactcaactttttgtttttatttatttctttattgtgtcttcaagagcttttcttttattatttttattatttttcaactaaattaagttgcgcaaatggaatggacctctaacgaacaccccacgaaaaaaaaattgaaaaaaaatattctgacatatattttcgagcgtaaaggttgactgaaaggttgtaactagaggttgacggttacaacctcctattacaatttacaacttcttagtcaacttccatttctaaaatcatatgtcgaaatgtttttttaaaagtttttttatagcggtattcgttatagttacagtatcatccttgtaaattttttaaaaatttcaaatagtttacactatcgaaaatagaatttttgatattctagtttaccacgagcgttcaaaaaactttaaacatattttcggcactgtaaactattnnnaatttttcaaaaatttataggaatgatgttgtaaccataaagaacaccctgtgaaaaaaaaaatattctgacatatgttttcagacttagaagttgactaaaaaattgtaacaggaggttgaccctaatacttctcacaaaataaataatataattttttgttaggtttgaataaacctcagctgctatgtagtgaggcacatgtcatgataatatggcatatttggtttacttcaaattgcagcaattaaaactgtcttgactgaacgaaagaaatataaatctatgatgaatacaaagaagaaaagagaataaggaatggaaaagacccgttaagggtaatttggtaatttcaagcattgccagcccatgagttgaaattcaataattacattgatgtaagcataggcctctccctcccctgaaagagaagcaaaaatgaacgagctccacgaggggtcaacaaaataaaatgacaattttaccccttttattatgtgattgcaaaattaacacacccatccaaaaacaccaaatatctgtcaaaaccatgatgtttcacgttaaagccactcataacccatgagggttttgaggctggctttggcctttgcccactcaaacaatacaattcattcctcaattactaataataaaactcacacacccttaatttaagccacaaaaaacacacacaataaaattacttgtgattattatgattacaataacggagaagaaaacacccttaatgatgcaagttatggaaagaaatgttacaagctttttgacaagtcatactaataataacaatatttggattaatatggtaacatatcataacataacataaactcttttctttatttggttttgttcaaaccattttaccagcttgataaagatttgaataacttgtatccaaaatgatatttttgggttcccattttgcccctacacttgtatatctttgatgtgacttattagatacaacacaagattatactcgttgcgaaatttgactaagaaaaaacccatgagagacattatggtaagagtaaagagagaagaagaaagaaggttgtttttttttttttatgataattgccaaacagttcccaacacacaagaaaaatataaataataaagaaagaggaaaaagcattaataaaaacaaaatagtattgattatcattattatgtgtgtgttgtattgtataatattattattatatatatatttatatgtgtgtggaagagaagaggtgaggtgatgatggttcgaacccaatccaaaccatcattgcgaatcttggaacggcctagcccaccatcatgcaagccctagccataagtcccataattgtccctctcttacccataatgtctcattttattcccaaaatacccctaacctctctgccaaagcccaaaaaaaccatcatcattcacatgacgccatatccaccatcacacaaccaaaatacactaaaacaaaataaaatctttttttctttttttttttttaataattttatttctcttacattatttttttcatttcaattttaataaaaataaataaaataagagtcttaaccggccgccttccatgcttacacttgcatgattgttgtgtcagagtgagagaggcatgtcccctcctcatgagcttcctctgtttttgctctttcttttttttttttttttttctcatttttttttttttttt

SEQ ID NO: 106886 - DNA, 595 bp, Cannabis sativa
gctagttgcaatataggtttctatgtagaattccgtaaaaatgaaaaaaaaaactgttttaaagtgtaaaaataaaaaaagcccctaataataaatatcctatttactaaaatagaataatttaactcaatgctaacttaaaaaaacgaaagtgtgatcagaaaaaaatatatagtataaaatttttagtaatgtatatttttaattaatttattatcatatatatattaaatattaaagtaatttatataaatttcctaaaagaaaaaatataatttatatagactgaagactcaagaagtatagttctttgaaagtaggggtattcacggattggtttggtccgaatttttataatttttgaaccaaataagtatatcggtttctcaaatattagaaaccaaactagaccaataaatttctcaaaccaaaccaaaccaaaccaaaccaaaccattaggaacagtttggttttgtttgaaaccatggtttaagtgcaatttataattattcatattttttaagtaattgtactatttttaccaagtttttaattttatttttcaaagtacatatttaacatgataagtaataga

SEQ ID NO: 106887 - DNA, 673 bp, Cannabis sativa
gctcgaaatctacttttaatttttgatttaattgtttcagtttatgaacaatttagtttcaattattggtttgggattttagtccctatttaatattattgcagaaaattcattatgacaattttgagattattaataaatttttctctttaagaaattttattatgaattgcatttatgaattgagcttcatatttttttttaacttgtatgtcaataccaattatatttatatgtttatcatgttttgtatatgtttgtgttttattattaatgcaaaatctatggtatattgttctctgcaaagagataataccacataaacacttagaatttaaattcaatgtttatgaataatcgttaattcttaagtaattattaagattttgattaataaaaaaatcttttgatatgatagggatggaagaagttaagaagaaatatatgcagttgaacaatctcttatatctattgaactctagattatattcataactccacaggatccctataacacttaggggtggaagaagctattgatatatgcagtttatttttttattttgaactctagactatactcaatacaccacagtatctctatgacacacatactttgattagacatggatataatataatgaacaatttagcaaattattagaacttattc

SEQ ID NO: 106888 - DNA, 534 bp, Cannabis sativa
tgtcacttggcgcgacggtagttattactacctgaagattaaggccaaatttgaagaattcaaattatgggataggatgaggaaatccccttttaaacagttcttcgagagagagccattacaattttcaggagcattgattcatcaattgatattgcataaaatcaaatctgacaagccagaccaggtatatttttacttggcgaagaagagatgcagattcggtaggatggagtttggtttggtgaccgggttaaacttgttgcccgaacctactgaagaagaaattaaagagaaaggaatttcagaccggttgattatggggtatttcaatggtaatccttccatcagctttggccaattgcgtagagttttgagagttacacagaagttaatgatgtttacaagttggggatgaccttgttttttatgggtgtcctcactggtaaggaggagaagacttccgttcctcctcttgtcataggaatggttgataaccttccattcttctacgagtacccgtggggaaagatt

SEQ ID NO: 106889 - DNA, 580 bp, Cannabis sativa
aaattcaaaattcaaatactttacttgcacaaatagagagtaacccaatggagaatgtcaaggccataacacttcaaagtggtacacaacttgaatcaccatcacactaagaagcacatgatttgattccaagtcatggagtcaacaattcatcccttgaaggatcatctccaccaaaggttgaatctcctactttagttggtccactatcactgaaaaagctatacaaaccaattgtaccaacttatataactccttcaccttttccaagtagattgaaaaaaatccaagaaagaggagcccatcaaggagatccctaaatctcttcccaaagttgaggtaaaaatttcatatcttgaggtaattatagaagagtctcattctgctaacattcttaaggagttatttctaaatgagaaaattttgaatggtggtgagaaataagtgtgggggagaatatttctgttgttctataaagaaagtgttatacaatcacatagattatgaactattcaaacacacattaaacattattgctcataatcattaaatgcaaaatcaatactttatttagagcatc

SEQ ID NO: 106890 - DNA, 573 bp, Cannabis sativa
agatagataataataactttgaatgtaataatgaatatatgtgaaatacagatgataatagttttaaaatcatataatgagttttttttagttttatcaataaaaaaaatctctattttgtgtgaagatctctatttttttttataacctttgaagatattaatctattcatctacggattggtttggtctggatttttaatttttttttaaaccaaactagtattacagttttttaaaaattcaaaaccaaaccagaccaattaaattatcaaaccaatccactctaaaacggataggttcggtttgaaccatgatttgtattttgtaattgttctaattttttttttttacaataattgtttattttttttggtattttttttacttttaataagtttataatatataaataacaataaaaaattattatcgtagcaatataaattcaatatcaatatcctacgtaaaattattcccaaatatcaacattttgtcccaaaaaaatatattgcgtatatatatataataattatacgtattggtttgatttgagggttactgaaattttttt

SEQ ID NO: 106891 - DNA, 501 bp, Cannabis sativa
  modified_base (348)..(348): a, c, t, g, unknown or other
caaaagaacatattcactcggttttgtactccccgagcaatcataagcgatgaagggagtcacttctgcaacaaacagttcgaagcaatccttttgagatatggtgtccatcacagaactgctctaccgtatcatccgcagagtaatggccaagctggaatttctaaccgggagataaagatgattttggagaaaatagtgcagagatcaaggaaagactggtcaagaaagttagatgatgcactgtgggcatatagaacagcattgaagaggccaatcgggatgtcaccatatcggttggtgtttggaaaggcttgtcatctaccagtggaattagaacacaaggcntattaggctatgaagactctcaacatggatttaaaagctgcaggagagaaaagattactgcaattggatgcattggaggagttccgaaatgaggcttacgagaatgccaagatctacagggagagaaccaaaaagtggcatgaccgaagctta

SEQ ID NO: 106892 - DNA, 657 bp, Cannabis sativa
  modified_base (327)..(333): a, c, t, g, unknown or other
ggaaggatggcgtggctatcagagaatccagccaacccaagacccaaacctgggctagaagacctttgcgcaaacctctttttggtatcgaggaatttcctgaggctgagaaagagatctcagctttagtaaatgggatcttctgctgatgaggagaatgaggtctgtgcagagatcaaggctctctacatgtagccggtctttctcaagctatatgaagatggtctttctcgagtttatcggcttcccctctcatcctttgtttaggaagatgacttaatggttttccctagtggaattttcgtaaagacaagtttgtaacccaannnnnnntttttcttatcttaaaagccttgtactattttcatttgaacttaatacaatagtgtttgcttccgttttaattcacaatgtaaacaactttattttgatcaaatgtacagtacttttgggtttttccattgctcgtaatcttcctgtttatgtagttattgatctaccaaactttttaattttcgagcaattgtcaattctgcctcggtatagcagttataatttgccttaagcaaacttaaatatactttaatgattttatcactttgtatattcttaattagcttgtatgaatagttatattatttatccattttctaggtt

SEQ ID NO: 106893 - DNA, 845 bp, Cannabis sativa
  modified_base (254)..(258): a, c, t, g, unknown or other
attatcatgtcagtctaaatccagtgaactgacaaatcatgggagttaaacttttgaacatgtaatcataatttgtatattctactgtgctgacgacactataatcataaacaaatatatatttatatatgttttgaacttaatagaatttatacattaaatataatcacgaaataaatcatgtgaaccatgcaatataaaagcgatttctgatctttattaattaatgaatctgattatattgaaatggattnnnnntagggcacaaaacccaacagcttgctgccaaaaaaattgtgtcaagtgttcatattagtattttggccataacttcttcaatacaactcaaaattagacgattcaagatgttccaagaagttgagaacaggatctacaactttaatgttgaactccaagtctagttctacctttaaagtcatcaaaatgtgcaattaagttctgtcttatcaatttgagctcgccagcttcctctattttctaccaaaatatgctaaagtctttctaaatgactccaaatgtatgattagtattcaaaatagtccaaaaaaaattataatcacattgatcaataatttaaagaatcaatttaagaatattaatacataaattggttatatttataagacaaaatatcgacttatcaccaacctggatgacatccatatcatcatacctccagttgtgaatcttcccagaaaacaataatgaagcaaaaaatgaaaagaaaagttactcggtatctaatcttggatggggttatgtacatacgtggttttttaatgccactattaagatatgtcaccaagaaagaagtcgaagggcta

SEQ ID NO: 106894 - DNA, 677 bp, Cannabis sativa
atgcttggttaggttctgttctactctacttgtcttgttttgttttaaaataaaactgctctgctgcttctaacatgtggtattttgatagtggttgttctagacacatgacaggtgaaaaaaaaatatcttatgaacattagatcaatgcagtgtggagaagttacatttggtaacagtcttgttggaaaagtcatagggataggaactctcaagtttgaagggcttcctagactaaagaatgttatgttggttgatggactaaaagctaatcttcttagcattagtcaaatttttgatcagggttatactgtgaactttgatagaaatcattgttatgtgtataatattcgtgataaaattgtctcgcaagggttcagatctagtgataattgttaacgtatgctacttgtcattctgtcgttgtaatattactgatttatggcatgaaaaacttggtcatattcattttaaaaatctaaggagattgtcaaatacaggaattgttcgaggattacctaaattaggtaaggagtctttgggaaaatgtggaccatgtcagcttggtaagccactaaaaatttctcataggagtgtttctgatgtgaatacttctaatgggtccaatccaggttgaaagcttgaatggtaagaggtatatttttgtgtgtgttgat

SEQ ID NO: 106895 - DNA, 1615 bp, Cannabis sativa
  modified_base (393)..(397): a, c, t, g, unknown or other
accttgtcacattccttcgcactagctaaatgccttttgtgacttgtctccaccttcacagctccacctaaaatagtcttaccgactaatttatacaaattttactctttcttacccttcacaactagaaaagccacctgtcttgatagttatttcaccatcttttgcgaagtagacacaaccttgagtatccaaagctcccaaagaaattaaactcctcctcattgttgaaacatttctcacatcagttagtgttctcacgacaccatcaaacattttcaccttaacagtgcctattccaacaactttagagctagaatcattgcccatcaaaatagtacaaccatcatatgccttataagtgtcagaacactccttatacgggcacatgtnnnnngaacaaccagaatccaaaatccaagagttagaaaaattttcattagctatgacagagagaacatcaaagtcattttcaaagccttcaccagcaatatttgtggaatctgatgtgtctttgcattcttgattcctcattgcttcaagaagcttgatcaactcttcacaattccacctaacatgcccctttctatgataatagtagcactccactttcctcgaagtgcatgaatgagtgtgattgtctatttatcatcatatcttcctctcgatgtactcctaccatgacgtgattctgaccttatactagagcttgataagtatgaaacacaccacttggttgcttgatactatctgtctccaaaagagcacttgacacctcatctatagttaaagtagtctttctaaccaaaaatatagtcactaatgtctcatatgattttggtaaagatgccaacaaaataatagtttgatcctcttcatcaattttgacctctacacttaacaattgagttatgcactaattcaatctatttatatgatccctaacatcttatcctccaactagttttaactcatataattgattcttcaaatataatctatttgttagagattttaacatataaatattttctaacttttttcataactcagacggacatgtttcattcaatacactatattttaattcaggagcaaaacttaaacgaatagtgcttatcgcttttgctgcaactcctcccaatcttcatcaatcatactctcaggcttctttccttgtagtgcctgtaggagcccttgttgtaccaacacatctttcaccgtactctgccataaactaaaattattcttcccatcaaaaagcttgatctcaaatttttgtaaaagacaccatccttgatatttttagtgtagatttgaaccttggctctgataccatctgttggaaaaaatgataataaacttcaagtgcagcgaaataacaaagaaatgaagcaaagcaatttactcattttggtaaaactatcaaacacacaaagagagatatatttcacttatcacttcaaaattacatatgctctctatcttaatctctcaacctaaatctcaatacaccattttcttcttcctcactctcaccacacaacaaacttaccacacctctcttttcacaactcactatttttctccgcacaaatacctctctctctctctc

SEQ ID NO: 106896 - DNA, 779 bp, Cannabis sativa
  modified_base (412)..(415): a, c, t, g, unknown or other
aattttatttatgtgttatttttttgggtttttcatttttcattttttttagttataatttctgttacatattgttgttttttccatgtttttgtttttccaaatgtattattatttttcatttcagttacttcatttgatcagttttcattttttaattattttttcatagttttttttatatagttttaacaccttgttgtatgtgttttttttttcgaatatgttgttttctagttgttttctgtccatttttatatcactaatgggtaaaaattagaattatcatggatgttgatgttgaaggagatttttctatatgttagtttgtttacaattattttgtagttgtatatagttttgctacttgcatatgctatttcattatatttgctttctttgtaaaatgcannnntgggttaacaaattcagtcccaatgatttctacagatcgaagtgtgtatgtacgagtaatttctctgttattgataacattaagaatattttatctgtgaatttgttaacaatgtttcgagacaccaagtttgggcactttttatatattcctgactttgtttttcacccccaagttgttcacaacctacttttgagggaggtttaccagcccaatcccaaagaattttgagcttatgttgctggtcgttgtatacggttcagggtcgaggagtattacttgattattggtcttgattattttggggattgcaataaactgttgttttcccaggaatcaaaccagttaattaaggtttgtttcc

SEQ ID NO: 106897 - DNA, 592 bp, Cannabis sativa
tttttttttttttaattttcaaaacaatgctttaatttttttttaaaattttgttcataaaggcattaaagtcgtgccatgaaaggtataacgagttaggtgaacgtctaaaattgtttgcataattactaaagaaatataattttatcttaaaatacaaaatgctagctaggcaaacctagcttgaaaggtatttgagatatgtaaataaaatttatttaaggtcaaggctaggtgattagtaatttttttccatcaaactcattttgaggagaatcacttaagtatgcaacataaatcctgaacaaagtatcaagtaaagcatagttaaaagatctttataaactatggtgtggttagactaataatctaagtacatatagggagatatttatatatatagtaaggaactatactttattttatactcttaataattaaagagctacaatttttgtgatcccacattatgggtcaattttgagacaaaaaactttaataattttgaggatgttgagtttgggagagaaataaaattattatatatatttttcttgaggagaaattgatgttaaactcaattccaactatc

SEQ ID NO: 106898 - DNA, 556 bp, Cannabis sativa
tgtgacaacatcgatcagtattttagccaacatacatttatcagtaatcagtacaactctaagtatactattactgctatcaatgtattctaacaagcaataataacaagtacgttaaacatgtaataacatatgcatgacattatactaatcttacctcaattctgaattcaggtgtgccaatcaacctgagtggaacaactgctcggcaaattacaagctcctaaatcacatcgataacaacacgaataagtgatacgctaaatcacaactagggacttaggttttaaaccaaaaacctatctattgtaacttaacatggcaataccctaaactaacaaggaattaaccaaccaaagctctgaaactagcacgaatcgacaacatgaattcttcgggtaacccagcagcaaatcccagtagtcggttttacatgccctgtaaaaccgattagccggtttacaccaaaaaacccaaaaaaactccaaaacctaaccaaatcgattccaagctcagaatcaaatttcaccattaaagagccaagcttgagttctaa

SEQ ID NO: 106899 - DNA, 527 bp, Cannabis sativa
ttgccccaagtgcgttttcaatgcttgaaatgcttcttcacatttgtcagtccattgaaactttttattaccttttagtatttgaaaaaattctttacattaattggaagaacgtgatacaaaattatttaaggctgtaactttacttgtaaggctttcaacctctttagacttggtaggagatcgcatctccaccaaggcttttattttggctgggtttgcctcaattccttgctagtttaccataaaactaagaaattttcctgatcccactccaaagacgcactttaatggattaagttgcatcttgtaattatgcgggattctaaacatggaatctaagtgggcgatatggtctatcgcatgttaagattttacgagcatatcatcaacatacacttccgttgtctttcctaggaaattttcaaacatcatgttaaccaatctttggtacgtcccacctgcatttattaacccaaaaggaattattttataacagtacaaacctcgatcaatgatgaaggagg

SEQ ID NO: 106900 - DNA, 834 bp, Cannabis sativa
atgttggactttttcttcttcccggactaaggctgcactgacagcgttctcggagacggccaagtacagtaacaagtcctctccgtgaactggctctgatagaatcagaggtttggccatatgttcttttagttttttgaatgcctcctcacattcttctgtccactcaaatttctaactcttctttaaaatgttgaagaaaggaatgcacttgtctgttgatcagaaaatgaatcggctcagggcagcaactattctggtcaagttttgcacatctttacgcttcttgggggaaggcatgttcactaaagcttgaattttttcaggattttcctctattcccctttcattgaggatgaatcccaaaaatttccctgatttgaccccgaaagtgtacttcttcgtgttaaatttcattccatacctccagaccactttgaaacattctgcgaggtcgtctgcatgactcccgcacgctttagacttgaccaacgtgtcgtccacgtaaagttccatatttcgtcccaggaggcctttgaacatccggttaaccattcttcgatacgttgcaccagcattttttaacccgaaaggcatgaccaagtagtagtatactcccttatcggtcctgaagctagtacattcttgatccgtaatgtgcatcttaatctggttatagccggagtaggcgtccatgaaggataataacctgaattcggaggtggcgtccaccatctggtcaatccgggataaggggaagtagtcttttaggcaggctttgttgagattggtgaagtctatgcacacccgccatgtcccatttggcttgggcac

SEQ ID NO: 106901 - DNA, 1304 bp, Cannabis sativa
tcaaattttggtagtaaaaccctcaaaactgctaaactgttagaaaatttaaggtgtcacatatttatctcaattaactgttgacatggactgtatgtgtaccatcatgtacacgtgggacatttatattggtccacctaatataattatttaaaagttataaaaaaaaatattttcaaaatttgtttttttcttaaaaaaaatatttctcaattttgaaaaaaaaaaaatcaaataataaaaaaattattttttaattttcctcttgtttaaataattataggtagaccaatataaatgtgccatgtgtacatgatggtacacgtaggcagtccatgtcagtagttaacttaaataaataggtgtcaccttaaattttctaacagtttagcagtttggagggttttaccaccgaaatttgagattggagggttaagtgcaagtgaaatgatagttgagagggttagccgcaaattactctaataaaattaataatttttttatctttaattttttttttataattaaggtcatatgtttaaattttttaatgtttcagggggttttgttgtaaatatattaataatttgaatgcaaaaaaaaaaaaaaaacttaattgctaaaagaactttatttaataactaattgtaaaaattaattagtaattataattaaatttaaattttaaataaattaatcttgatattttataaggaaataaaatataataataaatgaatagtagtttcaggtcatagctaatatataatttatttttattaattttttaattaatcatatccattcaataatgatcaaatggtcaaaattaatgtaaccatcatggttacatatctaacgtaaacattgagtagtcacccttaaataaatatatataaaaaataaatgaaaaaaaatgcatcatcataacacattacctctttagtttttacaattacataaatatataaataggtagatctgattatttagttaattgtaaatttaaataaaaaaaaagtatatatttatgcattttgtattttatcaatttttataatgttatatttatatatttatatgaaattatacatcacctaaaacagtttcataaatttattctatatttttttttaatttgcccaatattttttcttatagaaaaaatatgagaaaatcacaatttaattagttttttttttcatcttttatcttaggacaattttcatttgtatacaagtaaatgtataatgttacaaaaaaagtgcaaaaaaaatataataacataattctatacaatttta

SEQ ID NO: 106902 - DNA, 1364 bp, Cannabis sativa
  modified_base (40)..(40): a, c, t, g, unknown or other
  modified_base (186)..(221): a, c, t, g, unknown or other
  modified_base (961)..(966): a, c, t, g, unknown or other
tgttgtgactaaaatgtctgtggctaaaggtattagtcanaaaaattacaatttattgtgactaaatgtgtatttttagtcacaatacttgttgtgactacttgttgtggctgaaactaataaattagtgacttgaaactaaatattatgttttagtcacaagtgatattttgttgtgactaaaannnnnnnnnnnnnnnnnnnnnnnnnnnnnnnnnnnnaaaagttgtcactaaaagtagcaagtttttttagtgaattaacagttccacgtacaaccatgcaatatgaattggctgaaaggatggaccaatggcttggaattttatagagtttggtgcatgttaaccaactgagggttgccaaagagacgtttgtgggcaaacaaatattcaaagttactgattggcaggggataaggccccacaagacttagtgatgattatgaaccaagatcttatgttgaagagattgggcttgacaaaaacaagacttggattttgatagaaaagtttttatttgtaaacgtcaagttagatgtaagtggataaacaagtacaaaggcaagacagaaagcaagattggtagcaagtggtttcacatagctagagagattgagttgattacaattgtagatttagagtatggaagtgacttaggcataaggagattccaaattgattatatatatatagttatattgttccagttagaagggtgcgcaattagccggaaagtaactcttcaatcaattgttgatttatcaatatcagaagcaagcagatattattgcttgtactaaaattgtgaaggaagtattgatatggcaaaagtgattatcaagagattttggggccgatcccaattttgttccttagtgacagccaaagtgtattggatctaaacaagcactacaaaaaactgctaccttttgtaataatcttttagtcacaacataaannnnnngtgattaaatgtgacttttagtcataataaaaaactatttgtgactaaaacatagtatttagttacatcactaatttagttttagtcactacaaatattatgactaaaagaacatttagtcacaacaaattgtaatttttgtgactaatacttatagccacagactttttagtcacaacacaatattgataatttataattaatcacaatttttttatctttattccataaatttagttgtgactaaaagtatgattttttgtagtgaagaatcaaatcgtgcatgagtaaacaaaacacattgatgtcaaactccattcaaaacgcgttgttacctcagaagacaaaataaaacttgagaaagtttcaagacactacttcgacgtgttacatgttgt

SEQ ID NO: 106903 - DNA, 1023 bp, Cannabis sativa
tatttcgacacgtggcatttgaattgggtttaacgaatctgttaacttggagaccaacggacaaataaaaaatatgaccttgagaactattgcccctatttttggagagtgtaatttagtttctaccttgtttaacattgaagagacaaaaataatatccaaacctacacaattttctatttagatggagaatcctaattttattcgggatggatcctcattggtccaggaaagaaaatgtacccccctactttaagtgactagtgcctacgactatatagaagcgatattttaccatttagcactattctttaataaactcctacttactagtcttttttaaatcatttaccttaaaagagttgactcgacttagttttaggacagagacttgtaatctcttgtgaagaacttttgacttgttgatttagtctgtctcatctagaaaattaagaaattgagaatagcatagggtgattgggacataccaccgtcctctaacctcttcctttgtaaccattttcattctttactgaaacaaaggtgaatcataagaaaaatatatgatataaatgtatcaactaaatatcaatctatatatatttcatatattattcaatttccatttacaaatctaaccccccttctcccggttcctgtaaatttataattgaatacaattatacaactctgttctgactacaataagatagagaaatccaaccaaaaaaaatgaatcactgaatccgcccagcttaattagcacatttgtgaattatatataaactagcccagcttcagatgattatgaaaaatggccaagacccttttctccaactactcttgggaatgggatccatatgaaattacataatggaacatgcgggggatggttcctggtagggtatgctgtatgacacgtacccagactggggaacttggcaacaggatccagacgatgagtaataaggttgatagtaaatgtatttagcttgttcctccttcttcttcttttcttcctct

SEQ ID NO: 106904 - DNA, 526 bp, Cannabis sativa
gacaagtgggaaagccaattatggtggatgcaatcactaagcaaagagataaattggcgttccctcgagtcttaattgaagtactacttaatcaacctctgcctgacttgatttggtttgagaatgaatttggctccaatgtctctgttcaggtgaaatatgagtggaaaccaaatgtttgtgggcactgttttggtttgggacatagcacggaggagtgtcgcaagaaagtggcaaagaagcagcaatgggtggtcaaaccaatagggcagccgggtgctgaagtgaaagttgcagagggaaaagccactgcaattgattctgatggtttccagccagtagtaaaagcttggaaaattaaagagaaagagcctgttcaacaattgagggttggaaacactttccaagctttagttgaggcatctacaagtgaggagcatgatcggaatgagagtgaagatggtgcagcagtcatagaaatacaagcaccagtcatgctaatcggaaagggtattgatggggaaaa

SEQ ID NO: 106905 - DNA, 544 bp, Cannabis sativa
  modified_base (239)..(244): a, c, t, g, unknown or other
  modified_base (314)..(317): a, c, t, g, unknown or other
gtggtacaacacttagtaattctcgggagtacaattatggctctaccaacacgagtacagggttggtactttagtgcatttggtacagtggtcgtatctcccttaagaacgttcttatccatttggtgagcttaattattgagctcggggcggcttaaacacaacgccggcatcgcattacttatatatatgttttgcatatcttactgagtcaattgactcatcagtttgctaccttnnnnnngtaaaggaaaagcaaagctggaggaacagtgagatggagctcggcattgattgtacatatcgcggcagtnnnncctggagggtttcggtcttttactattttgagtctgtattttgaagttacctgttcgcgtggtcataaaaagaaatactatatgtatatgttagtaaaatacttttttatcgaattttgatactcgggatcccgactcatatgttaataaagttataatatattaaaattatcttttgaatttagtaaattataagtacggacgttacatagacccatggtcccctc

SEQ ID NO: 106906 - DNA, 594 bp, Cannabis sativa
caaaatcactagaaggcgagctatcactagatgaaggggtagaaggaccataatattcgctaaaatccctacaacctataattttgaatatattaaaaggcacgattggttctaaatcccaaatcgcatctatgtgacttgctttgtcttccatagtaccgtattgctcggctataccataaaatgactcgtgatagttaatctggacgtggaatctaggataccaattgtcaaacttatgagcaatgtagtccacgagaatggaattccaagtataaaaattaagatgggagtcttggaaggcaactaatgtattacgctcaaccctaagtacagtaggtgaccaaccacattgattacctcaagatgctcattcaccggattctcgaggggcagtgctttgaaggtattgtgcttgggccaagcgatcctaggcctggtctttgggtggaacaattatttgctaccaagaagaatacttgggaatcttgtaatcacaagtgtattctttgtcagcgagaaggcccgccgatttcaagttaacttcgttcaaaaggaatttgcatgatcgaagaccgtaagggagagtcatca

SEQ ID NO: 106907 - DNA, 609 bp, Cannabis sativa
cgcctctttctctttcttttgcaacaactaatcatgcgggttaacttgggtgtccattctggcttccatgtacctatctttggcttcctgataattcttaccaatatctcctattacctccttgttgaactttttcagcttgtgtttcagatgcatgagtttcaagaaaaggcttttcaacccaactgcttgaactagtcgggaccaatcttccatcacaacttttttaaactcttgatgatctgcccaaaagttgtaataccgaaaaggtttcctccctatgttctcatccaccctcatcgaaataatacaaacacaatgatctgaaacaacctcccaaccatagtgcgcctttgtcaaaggaaaattgtctacccattcttcatttacaaaggaatgatcaatcttcgagtagatccgcttgttaccttcttgattgttagtccaagtgaatcttgaactcgttttaataagaggcacaagatgacttttagcaagccaattagtagcatcttcgacatctcccaaagtaaccaagttgcctcccttcctatcatctatttcaaagagagcattaaaatctcctgtaacaagccaagaggctgctgg

SEQ ID NO: 106908 - DNA, 1059 bp, Cannabis sativa
atatccaagataaaatcgaatttcagaagcctttaattgtgtgttatgtttcgggagccaacccccactatcaatattggaaggctttgcttggaggatgtggaaggaaagagttgaacgtgttggaatgatttcgtctggtctttttcttattaggttcaattctatagatgacatggatgatatcttgaaagcgagatacctatttttcaacaaaaggcatgttgtcatgaaactgtgggatcctgaggttaatttcaagaaggaggatgttagggtggtgcctatttaggttcaccttgatgaccttgatctgaaatattggggagaaaaatctcttttcaaaatcataggccaaattggaaaaatgattatggtagatgaagtaactaaaaggagagacaagcttggctttccttgagttcttattgaggtgtttttgaagcaagaatgtcctaacactataaaattgaagatgaaaaagggcataacacaactgtgtgtatttccaatgagtggaaacctataatttgtagtcactgctctggtttagggcactcatcaactaatttctggaagaaaggggccatgaaacaagcttgggtggtgaaaaagccaatgaaaaaattagagaaaactggtgttatagaagttgcagcaactgtggattttgagggcttttaaccagttgtcaaagggtggaaaccaaaggataagacttctgatgtaacagcagcaacaagcaattcattccaggtcttaatgaggaatacttcacctaaaatttgtggaggatatgatagctttttgaagccaagcattaaagaggtaaaactaggagaggagggagctccctctcttgtcaatggatagaattatgagttgaaacgtctgagggatcaacaacaaacagaagcaaaatgtagtcaagcaatttattggtaattagaattttaggcttgttggtttcctcgagacgagagttaaggttcctaattttggagccttatatgttagaatgttctcgggatggtgttttacttccaatagtgcttggca

SEQ ID NO: 106909 - DNA, 652 bp, Cannabis sativa
gttcaaaaagttacttaatatgtgtgtaagaacgaacagttgtgcatgcaataaaatatttaaattttatttttgacattataaactactcgaaattttttaaaaatttctaggtgctcctaaaatatacaacgtacacgatcatgaaaaacaaatagattaaaaaactcttttggataccgaaccagattgtgagtctaacaaaataaccctttcaaatgattatgaaatatctctaaatatttgtaagacacctcataaaaatagattttttttttatttagttatttaatttaactgttatatttgacataaaatttgatgatacttatatacttgttttgatttattaaaaactaaaaaacaaaataaaaatttgtagatactacattttttttttcaaataattatcttttactataataattatgtttaactagaaaacaattatgaatatcaccgtttttttgctttttattttttctgtagtctttttttgcaagaaaaaaaagacataattatgtaaaaaagacataattaggaaaaaataatttatttaaattattaatagtatgattctgtaatgctcccggcttcaagcctccattgggtccttacacccacggaataaagggctcttatacacgagtac

SEQ ID NO: 106910 - DNA, 634 bp, Cannabis sativa
gtcttcccgactaatttatacaaatttttctctttcttacccttcacaactatcaagccacctttcttgatagttatttcaccatcttttgcataataaccataaccacgagtatccaaagctcctaaagagattaagcttttccttaatgttggaacatgtctcatattagttagtattctcacaacaccatcaaacatcttcaccttaatagttcatattccaacaactttagagctagaatcattgcccatcaaaatagtacaaccatcatatgccttataagtatcaaaacactccttattatacaggtacatgtaaaacaaacaactagaatccaaaatccaagtgtcagaaaaggtttcatcagctatgacagagagaatatctaagtcactttcaaagccttcaccaacaatagttgttgaatttgatgtgtctttgcattctaggttcctcattgcttcaagatgtttggtcaaatcttcataattctgcctaacatgtccctttttgtgacagtagtagcactcaacttctctccaatagcgtgaatgagtgtaattgtctcttttgtcatcatatcttcctctcgatgtactcctaccatgacttgattctgaccttgtcacaa

SEQ ID NO: 106911 - DNA, 840 bp, Cannabis sativa
tgaaattgtgtttttcatttatttttaatattctaaatgtgaaatttttgcttaacaccgagctttcaataagtagatctaaaattcaccaagtcaatcctttaacttattaattctgtcttgtaccactatagatttagaattgaatatcactctcaattatataggacgctctatatgtaccacgatataaaaacattatggttatccattgttacattccttgtaacgccctaaataattaggcacgctacccaaaatacttaagaaatcctaatccccaaagtggaattactaatcaaaatagcacagaatttaaacttttattacgagcagaatgaaaatagaacttgtaataatttaaactttataacagttgggatcccaaaaatatttacaaactttattacaagtctctttaacttagccggcctaagcggcaaaatagagtttcaaaagttcaaccttggtagacccttaacccgcttggtctgatatggcccgaacatgtacattcttcccttagcttctggactcttggctgatcagctaaagccttcccgtttcctgtacaatagagcacctgtgagccaagcccagcaagacagtataaaacataacattaataatatgctcatcatactatttaaacaataaagccattcacatatgtttgtgtgacacagacttgcatatcgcactgacatgcccaattatgtttacgtggtgtagacctatgtgttgcgctcacacatctatttaaatctacgtggcgtagacctacgtgtttctcccacacgtctaaatacaataaaaccttagaattggttcatctcagtt

SEQ ID NO: 106912 - DNA, 830 bp, Cannabis sativa
ttttcttgctttcaaatgaatatacataatttctctcaaaaaaaaaaaaaaatgaatatatataatatacatgtgttccacattttatacatcattttcctttaaatgatttatcacacatggatttttttttaataaataataattacatctcacttttttaaatcaactaataaatattaaaaaaaagaactctttattagtaacaacaaaacaaaaaaaaaaataattgtgttttgttacaaaagtctattagcatcacaataattttaattataattttgttaatgactattcattacataaatattatgtaactaatattaatttagatttttgttaattacttactattgtttaaattattattattagttttaccctattaaattcttgcaagtggatgatttcaaaaaaaaaaaaaggaatcttgcaagtagatggtcccccttaatataatgttatacttaaaaaaatgataatgactaaacaatatagattcggacaaaaattttagtttctcacaatcatgtatattataataatttaataaaattaaaaaaaaattaaaataatttacaatataaaaaataatattatttcataagtatataaaattaaaaaaattattttcagttaatttttttttttaaattttataaaatatcttaaataattagaatatacatcaaaaacaaattcttctaaatactaaaacagatattacaatgggggttcaagagcggacttagagcattgggtgaaaccagttatggaaaagattaaggttaatgtcgatggtgcaatctttgcaagtgatggtcgatttg

SEQ ID NO: 106913 - DNA, 513 bp, Cannabis sativa
tcgggactactcaattctgagatattatcgttcttgtcacgtgtcaaacattgatgtccacattactaaggaaattttctgagttaacattaataatttaatgcctatttttgagaataaggcctaattatctactgagggcatataatgataaagatcaaacaaatttttaattatctgctaattcccataataaagttaagaggtcattacaattatcccccgttaaaaggattttatcctaaaaatctaacttgaataactctagatattaagccctcatgtcaaactctaattcctaggcggcttcctccactgcattgtttctccaaagtactttgaccaacactatggtcttgtttcgaagaatctggtgttttttatcaaggatccatatctttgggtttatgccgtaaaatttttgtaaagatatttatgattattttaatatatgcatgaatgttaaattattaatatttaatattgaataatttatctataaatatcgaaaaa

SEQ ID NO: 106914 - DNA, 1061 bp, Cannabis sativa
  modified_base (321)..(321): a, c, t, g, unknown or other
  modified_base (401)..(414): a, c, t, g, unknown or other
agggaaaaatgagtacgaatttcagagacagaagtcaatactggaggcattctgcagaggattttcaacattattttattctttatcttcttttctttcttaaaattaatatgtgtgattttgcttccacgaacatgtgtagctaaacacttgattaggtttagatggatgttgtttgacattgctttatggttttaatatgatttattttctccctaatttctatgtattctattttattcatacttaattacttttaattgtctggccatcaattaactgttttatgatttcgatgcgagatctgagaagtcagtgtcnattatgctatagtgaaatagaacttaatttcgatataggaccactactagaaaaacaggttttagtgacacacattgagnnnnnnnnnnnnnntttagtgacacttcaacgcgcatcactaatgagggtgactggaaagacagtttttagtgacacttcacacgtgtcactgaacccttttacattcactttttccgcgtcactatatgcgtatagagtcagattttgtcagactgaaaaagtaacagccacacgctaaaagtgtcactatatcattttttcttttttctttttaattttttattattatttttagggatatagtgacacaaaaaatgtcactatattaaatatttttttttaaaaaataatatttaattattattacattccattttaacaaaaacaaattaaaatcttttttttttttttttgctggaaaataaacttcattgaagaaaaaaataccaaaatagaacaaggttcacggttgcaacaggggtgcaacctccccaacatcaaacacaggacaaacattcaaggaagccgcacgcgcagcaagatgatatgccaccccattatccctacgagggatccaactaaccccaaacagcgccccaaaagagaaaccagaaaacaaagagagaaacacctgagcaagtttccagtcaggcaccatctgcttcgtaaccgcatcaacaaggacctggcagtccgaaaaacaaattaaaatctattac

SEQ ID NO: 106915 - DNA, 711 bp, Cannabis sativa
ttcgagtttttattctcacgagatggaattacagaaaaatggctaagtgtttatgctctaatttttagagagagaaactagagagatattctctgacctttatggctacttgtttgaatatgaaaaatgagctagaagagctctccttttatatgtgaaggaggtccttgaaaataggaacaaaacaatccaaaaatatgaagaaaaaaaataaattggctatttttgaccgtatatgatgatctaatggagaaaattaacttctgaggttgatcgtcaatttttagagcgcaggtcgcaacggcgggacccactctaggtaagctgtggcttatttttgtaactctcttacggtgagatttgaagtcaataacttcaaaattgcgattgaagtgttagacattacttgatagatcattaaaataacttcgaaacaaaagttgaatcttgtcaataaaatcaatattgagtgatttatggccattttactaaaagctattctagacctagcgcctaggttgacatcccagcgcctagtttgacatattacgtcaaccccaacactaggtgagtgggaatacctcccaaggatgtattttttgatgcctaagttatattttggcatcacttagtccaattctgtgttctagcaaagctggtcaccaattctcaaagataatattgttttgcagaaatgggaaactcgaaact

SEQ ID NO: 106916 - DNA, 677 bp, Cannabis sativa
  modified_base (500)..(501): a, c, t, g, unknown or other
ctgtcatgtaattcttctttctcaaagaggaagtcactttatcattccttcttcgtagttctaaataattaatatattgtatatgtatcatttgattgaagaggaatcataaaaaaaaaagaaaaaattgcaaaagtttaaaaattattgatcgttttgattattgatcttgaatatatattattgaaaggtttgaaagttactaactgttagcggttattgaatttgaatacgtgttattgaaaaagtttgaaagttagtaattgttattgattattgattttgaatatgtattattaaattttttttaaaaaatattaattgttattggttatggatgttgaacatgtattctttataaacttagcaaccgatatgttattgattattattaattattgattttgactatatatcatcagcaaagttagtacatcatttactggttattgatctcgaatatgtgttattgataaaaatatacatatatgaaattgttnnttattttcaagttgtgtctaaaacgatatacggattaaatgggagtttagatgtgatgtataaataataaattctgatcatattctagtattttgcactattctcaaattttgtgatcaattattcaaaaatatattttagaaagggtgaaagtttaaattttataaaacaataga

SEQ ID NO: 106917 - DNA, 1346 bp, Cannabis sativa
  modified_base (489)..(494): a, c, t, g, unknown or other
gagaaacctgcaggaaaacatgtttccctaccttaaatgtaatatctctgtgcttcagatcagcttaacctttctgcctgctttgcaaagcaagcatccgagccttgatcttttctataacttcattgctcttttgaaccaattccggacccaagtacttcctttctccagtttcatcccaatgaattggggagcgacatctcccaccatacaacatctcataagaagccatcgctatcgtgctttggtaactgttgttgttggagaattcaattaaaggtaagtacatactccatgaaccctcaaagtccatgacacaggctcgcggtaaatcctctagtatctaaatagttctctttgattgcccatcagtctgagggtgaaaagttgtacaaaacttcagctttgtacccatgggcctctgaagactcacctaaaattttgatgtaaactttggatctctatctaaaacaatagatttaggggctnnnnnnagacgaactatctcctttacatatagttcagcgtacaaatccactgtgtaggtaatctttactagcagaaatgagctgactttgtgaatcggtccactatgacccacactgaatcaaacattcccatggttctaggcaaactaaccacaaaatccattgcaatgtattccaacttctaataaggaagtgttaatggttacagtaaccttgtccatctctgatgttcagctttgatttgttggtaagttaaacacttggacacgtactctaccacatctcttttcataccataccaccaaaagtagggggtacgtcttggtggttccgaatgcaatgaataaggtgtggtgtgggcttcatcaagaatttccttcttaagttcaccaatattaggaacacagacccaagctttatacactaacatttcattattccacattgaaaagtccttaggccgaccagccatcacctcatctcgaatcttgattaacccaggatcttctaactatgcccttttgattctttcaagcaaatgaaattgaagtgtcaagttgtgcaactttcgaattacaaactcgattccagcattaaccatctttgactccaattgaggagctatcattacggtagtgaaaacctactcgcggcctcttctactaatgcatctgccacaatattggctttcctggggtgatattgaatttcacagtcgtaatcgttaaccattccagccaacatctctgcctcatatttaaatatttctggatgaaaaagtacttgagactcttatgatcaatataaatctcgcatttttcaccataaaggtaatatcgccatatttttagagcaaat

SEQ ID NO: 106918 - DNA, 521 bp, Cannabis sativa
tccaaaataatatatatcctttttaaaataatttacatattatatatgatgatcactaatgtattattcttgtatattgacatatttattttgtaatttgcattataattaaaatataaaattaaattatataattttttattataaatatttataaaaaaaattaaagaaacaaaaatataaataaaatgaaacaaaaaaagagactggcattacacctactagactcattagtaacataaaatgttatattataaaatgtttaaagtaagaggtttttacatcaaaatttctaattttttttcttttttattgtgcgatggaattttttttaaaaaaatactgtgtaagtttcatactgtttcctgtgttaagtttttactgttattttacggttatttttttttatttattctaccattatttttaattgttttgttttgttattttacgttattttataaaaaaaaagtatttttgtaaaaaattccgtagataaaattgtaaatttttgctcaaaa

SEQ ID NO: 106919 - DNA, 734 bp, Cannabis sativa
atcacaatgatcagatttacctataatatggggtctttttaatattatacttaaaattgtttttatttataaaaatacctttaagaaaattatttgcataaataccggtgtgccacgtcagcacaactaccgaaattcaaaataattaccgaaagtggagaaaacttgaaaaatctcgctttcagatatttcagtgttttgcaagttttaaaaaaagtaacctcttgattgcttttgatgtaaataatatatcacttagttactttttattaaaaaattatttcaagatattttttttctaacacacatttggttacctattttgattagttactttaaaattatgattttattttttaacgtttaggctatattatgttatttaattatttaagataccatgaggttacttttttcttttagcaattttaaatcatattttgagttgtgaaaaatatacatatattctgatattaaaaaaagatgaacaagatagaagtaacatttcatttttttatataaattattaacaaaaaaaagtaactaacatttatatttgaataaacctaatataccaactaattttatgggttactattatacttaaaattgattatatttacaaaaatccaaaagtattataaaagaaatttgtgagaatataatttactatgtaataacttttaaatttgaaaaaaaaaatagtaaatgataaatttagttgttatattgaa

SEQ ID NO: 106920 - DNA, 737 bp, Cannabis sativa
ctcaactacaccaagtttgtcaaccaagaaatgaaatctgtatggagttaaactctttgttaagcaatctgctgtttgatcacttgagggaacatatctaacttcaagcttcttgttaatgactttgtctctcacaaagtgaacatccaactctatgtgttttgttcgagcatgatacaccggattggcagccagtgcacttgctcccatgttgtcacaccaagtgacaggagtggagagcaatggaaactcaaattctttcagcaaagcttgtatccaagctatttcggctgcaacatgtgcaagagccctgtactctgattcagtacttggtcgagacactaccgattgctttttggaagaccacgacacaagtgtttctccaagataaacacagtacccagcaatgcttcttctgtcatcaggacaacaagcccagtcagcatcagagtaacctgtgatggcaagtctatcagatggtttgatgtgaagaccatgataagctgttccctttaagtacctaagtactcttttggctgcattccaatgaactgtagtggggaattggagaaattgacttagtttgtttacggcaaaagacaaatcaggtctggtgtgagtcaagtactgcagcccccctatgatgcttctataatcggatggatttgctagaggttcaccatctgatttagacaatggttttcccactgtcatgggtgtggaacacggtttaagat

SEQ ID NO: 106921 - DNA, 1710 bp, Cannabis sativa
ctacttaaatgtttcactttggctactgcatatatcttccaccaattgttatttaccatcacccggtcaagacgtttgaaaaccatattcgctgtccttccattgcaccaggtcaatttgctgccttccaattctagttctcgaagagcacacttgtctatggtggtattaaatttcttcattaggtaccccggtttccctcctcctccaagtttctcatgattgcctctaatttcgttgaagtcaccaccacaaagccacgacccaatgtagtttctagcaagtcttttcataagtgtccaagagtgtctcctttgagaaggattaggatccccatagaatcctgtaaaacaccaattaagatcatcctccatattgatccaagcatcaatatggtagtcattgaatgacattaattgaaccgaaaaaggagccttccaaaggagggccaaccccccactttttcctttggcatccacacaaaagcacccctcaaatcacaaccgaatacggatcgactccatgtaatggcatttcgatcgagtttcggaaaggaaaacagtaccaggattaaagtctttcacatgagtggctagagtagtcactgtccaagggttgccaagaccttggacattccaaataagggaattcattgttctcggcgaccctgccccacagagtttgctacttcattagtctgcacagaggttgaatcatttggcatagaaacttcccctgttagagcatcaaatctggttccccatcctttagtctcagttgcttgaatctttgaacgaatcctagattatggaacaaattttcttcgcttttcccgctgccttttctgttgaatgttgttccctgcatcaaaggtcacgaggacatcaaagaggattccatttgaccccaaatccgcaatttcaatctcactagttcgggctttgcaagacatattcccgtttggactcttggttgactcattcaccatagcttctcacattcttttccggatgcccatttcattctgttcctgtctgttattcatggcttcttggatacaatcctcatcccgattatcataagaaggaatagagttaatggttagattagttccatctttgtgtataataggttgttgataattattaatgtaaggagtatgaagggggttacctttcatttggtttgcttgctgaagtgaatcctctccctctttggaaatttgttctatcaaccgagatgggggtaagttgttgattccctgtctatcgggttgattaatcaggcatgtctctcgtttgttatttgagtcaattctccccgtcatatttaccttaagccacacaccatatgccggagccacttctccattttctttaatcacattagcccgaattttagaacattggcacaattcatgcccaatctttccacaattgaagcacatatatggtagccaatcatattggaattgaagccatctacgccgtccttcatggggaaacaagtatcctgggaaaagtttggattgaatggagttccttactgtgaatttaaagaatccgttaattgtaatgcgattgatatctggttcttggatgtctataacctctcctgccataccagccggtcgaagcatatttgttttcgtaattgctttaattggcagattcagtactcgcccagtgatggtgatgttgggttttatgc

SEQ ID NO: 106922 - DNA, 584 bp, Cannabis sativa
  modified_base (186)..(186): a, c, t, g, unknown or other
  modified_base (401)..(402): a, c, t, g, unknown or other
  modified_base (435)..(441): a, c, t, g, unknown or other
atccttctaggttttgttgactgcctcaacttgaccatttgcctgaggatgcgccactgcggagaaacttttgatgataccatcgttcgcacataaatcaataaaagattggctgtcgaactgcttgccattatctcagactattttgtacggtagtccgaaccggcatattatgttcttcacaanaaagtcttgaactttctttgatgtgatggttgcgagtggttcgccctcagtccacttagtaaagtaatcagccgctaccactgcatactgcactccacctttacgcttaggtaattgtctgatcaggtcaatcccccaaatggcaaaggccacgaactttgcatctgtgttaactcttgttaggtaattttcacacttcttaacataggcttttnnatcttcaatcattgtcggccagaagtaaccttnnnnnnnaattttcttggataagctttgtctggcggcatgatttaaacagaatttgtcgtgtacttcagataggagccgtgcagcttcttcttgagtgacacatttgagtaatggcatcgaggatcctcttctgtacatgactccttcta

SEQ ID NO: 106923 - DNA, 687 bp, Cannabis sativa
  modified_base (202)..(209): a, c, t, g, unknown or other
  modified_base (539)..(545): a, c, t, g, unknown or other
aaaacaggtttgcagaaatgcaagccagaattgaagaacaagataacgaaattcagcggttaagatgacagggtgctcctgcagtgcctgttccagaagttccagtggcacctgcccctgttgtccaggtcgaaccagtggtagcggtaaatagaatggaacccctgtacgaaaggttccgcaagcaggcacctccagtttnnnnnnnnggtccggacgtcatgaaagccgagcagtggctaactgtgatcaccaagattttgaattttatgggtgtcaccgagaatgacaaagtggtgtgtgccacctttcagtttcaagaggatgcgttggtttggtgggacatggtgtccctgatacatgatgtcaccacgatgacctgggaaaagttccaggaactttttaacgcaaagtactacaatgaggtcgtcagaagtgccaagaggaaagagtttacccacctgacccagaaggaaaatatgagtgtgacagagtacacaacgcagtttgatcggttggcgaggttggcctggggaatnnnnnnnaccgatttcagtaaaaaggaaaagtatttggatggacttaatgtgaagattaaacatgacttgatgatggaaaaagaactgcgagctgagggcgcagttgggtgtatgactaagtcagctaggactccagtgagtggcgggg

SEQ ID NO: 106924 - DNA, 588 bp, Cannabis sativa
cacattttttcaaatctaaatcttgttttccttgctgttttttcctaaactaaagagatggacaacacattgacagcaatagcccgatggtcagaagaaaaataatccaaatgtgaggttgtcatgggttggaaagtggtattccacaagtcatttgtgaaacaccaatccaagcgctccttgatggcattaacattatctctacctttgatccaagtgtaaggatccccctcaaagggtagctgagaaaaagaacaataatccaacactgcacggaagtcatccatttgtctttcattccttaatcctcccccaagtttattttgatttgaaagaatttcattaaaatcaccaattgccatccatggaagttgaggggcaacatcttttagtgtttttagaagagtccatgttaaaggtctactgtgaacagcaggagcaccatagaaagccgaaaagtgccatttgggaccatttgcaacaaccatataaccatcaaatacactttcattaaaatattgcaaagttacacctacatcatctttccaaagtaacataagaccaccacttaaacctactctagggact

SEQ ID NO: 106925 - DNA, 822 bp, Cannabis sativa
aaaatcatgtatgttcttggtagaaggctaaaagcttagaatgctctttaagggggtaccctggtgtcagctctccaccaccccctgacaccttggtgttaagtgagatactactagtcagtgtgactattagggcaggcatatgaggaccacgaggggactcatatgtctccatgagttggagtactcatggactttatcgggccaacctggtagtgcgtctaagaagttgccagagattaacgggtacgtttccattagcttgccggtatgccgcttgcacgagacgtggcctaaacctccaagagatgttgtggtgcaccttggccacgagtctcaacacgagatgacacgtgtaataccccaggattaagagaatggattagcaaaatcctaactagttaattatgtgttattgtgaaattatattattatataatttaatatatgagaatttatttgagttataacatgttaaggccccgttggtgagccaggagaattttagtaattttgacccgagatgggtaaaactgtgaatttaatttatttacgtgcttaagaactatatcattatatagtatatatgttgtgtcctttttcaagtgtgttctgacaggttggagcggtatagtcacaattaggtggccgaaccgggttcggggccgaactataattcagggattaattattggcattttaaatatatctgaataatctgaatttttatttgagaagatttatgttggaaaggacatttttacccttgtttgatgagtatttggcaaataaagattgaattttctagttttcctctctctc

SEQ ID NO: 106926 - DNA, 520 bp, Cannabis sativa
  modified_base (51)..(69): a, c, t, g, unknown or other
  modified_base (230)..(237): a, c, t, g, unknown or other
caaagaacatgtataatactcctgggattgaacctaatcatgtcaggattnnnnnnnnnnnnnnnnnnntcaagtaggtgatattgaattgaacagatattactgtaagtttaatatctctgattcaaagttcaatattggtcccttccgatgcatgctccatgcatccaacccaagctttactttaaccaatgccctgaaaagaacatagcatttatccaaggtgcaannnnnnnntgttgtagattgtcatatcagttaaaccatatgtactgataaatctaggaatatatatttaatcacataatcttgattactttccactatgctggcgacacaataaacaagaatataaatgtgatatgggttttgatgaatttataaatcaaataaagaagtaaatgataacatcaaccaaataccaaatgacacacaaataagtgatgaaaacacttctgtttctttattgatatttaaaagataaagattacattgaaattggagttttgtttagggcata

SEQ ID NO: 106927 - DNA, 883 bp, Cannabis sativa
aattcaaaatatttttttagtttgttaactaaatataatatttagattttaaatttagtagaacaaaatatatgagatgtttgtagttaatcgtatataaagaaccagcgaatttaaataaaaaataatattttaatataataaaaaggaaaagaaagttttattaatacaagttaacttaacaataataattttaatgtataaaatttttgaaatcagattattttttttagtacaaaattagaattatctaattatatattattattgattattgattatcagattattattgtatatatatgattaaataacatttaacatttaaatttgaattatagaatatattaattattaatatagatatttcagatatttttacctaaatttaatttgggaacctaattaaatcttcaaactaaaaatctttaaaaaagaaccactatttttaaatgtagtttattaaaaatgtattaaaatagtttcgttctttcaaaaaaaaaaatgttaaagtacactacaaaatttaaaacattacaatgtaattaaggagaaaactatattttaggtatgtatattgaaaaacaaaaaaaaaaaaagttgaaaaccgttgtcatcaccgtatttaacttagccgctacattcaaagtctttgttaattatcactatatctcacttgtaagatcacctgaacatttaaagtcattgtcattactatatcttactcttagtcgtcattatttttaaattcgttattaccgtatcaaaatttgaccaaacatgatcaaaattcatagaataaaaaaattaataaaaaatttattcattgttgctatcacactacattatcatatatgttataaatattaataattatgtggat

SEQ ID NO: 106928 - DNA, 555 bp, Cannabis sativa
ggcaaagtttgcttcagatgaggttgctattgaagctgctaggaaagcaaagttcattcgagggttggatgaacatatcgcacgagatgtgattgttgcttctaaacagctgggggttgttcgaacttatgctcagatagttgaattggccctagtttctgagggtgcagaagctcagataccaaagaaaaatattgccagaagagattcatggaagcaaacatcaggtgctggttctggtaggggtactgatcctggtgaccgtaataaaagacctagtgaattatcagctacaggcccaaacaaaaggttccagggtaaccaaggttttcgtcctggtgggaacgaaaactggcggacttttcttgaatgtccgaggtgtaaaaggcaccaccagggcaagtgtcaggccaggacctgtttccactttggggtggtgggtcacatgaagagaaattttccatatatgctacgactagagcaaaagaaggatgttacaaccgctcctgcttgagtgtttgctctaactcaggctgaggctgatactggtccttc

SEQ ID NO: 106929 - DNA, 748 bp, Cannabis sativa
tgtaaccgtcaaaacgtgatgagaaaaatcgggtttcgaggcactaattaagtcagagcattaattagctaaaaactgaagagacacctaatcagtctcacatcgaatcacgaacagacgcacctaacgcgtgtcacccattgaaatgcaaaggcagctcggatgaagtctacacttaacttcggaagtcccgtacagacttggggggcaaatgttatcccaattttggcactccgaggtggcatcacataccggtgacacgtggaatcgacttcacataattgctcgaaagagatacgccgaacagagcatcgcgaattcctgtacgaacgaaggcttcttagccgagcaatggacagtccgaagagcatgccaacacttagcaatttcaacacttgcatcttgagtcatagaagcaatccctataattttgggatcatatcacagagatatggcaagctgtccaaatctcttgatcagtgtattctgtatttaatgtgtaatcttaccaattacagccgttgtaaatagaagggaaacttttccctcaaagcttatagccctataaatagtgagctattctcactgggcgaagggtcgaaaaaacttatctaagagatatactcagagatatcattgtaaaagctctaagagaagtatcactgcattttttgttcttaagtcaatacaaatcaaggggagtaggttattaccgaactgctcagggccgaacttctttaaaaactct

SEQ ID NO: 106930 - DNA, 1032 bp, Cannabis sativa
agcagccattgatgctcgacaaagcttgctgaaacaaacattcaacaacatttcaatgaaaaatcaacaaagaatttacctactctaataatcaaactcacagaaacaaaaaagaaacataaacagaggtgaattcatcaacaacaacttctcattgatcaaatatgcttacacaaaggtatcaacgattctatattctaatctcataaagaactgaggtatcatcacttattcttcaaaaattgtaatttgaatgttccagatcattcaataaatagacgagacattgttgaccagagctctctaataaattcaaattcaaattgaaacaggtattaaacaaccaagccacaaaattcataataaatacattcgcataacaaaacatataattgttgtttgattgttgcagttcgtagtacaaatgagttcacaaattgatgatcgcaactccctattaaatccaaaaatattcaggaaagaagtatgaaaaaacaaagtaatgaaacacaccattaacagacaaatatttatactaaaaaacataaacttgtttttaaattgttgcagatcatataaggatgagttgaaaattgttgatcggagctcccaatcaaatccaaacatacaataacaagctattgcattacttgtgatgattgcatgataatgattgaaacatttgattcaaaaaaattaaaaaaaatcaaaataaataacagtgaataattattgttgtttttttgtttaatttatgtaaatcatttaaataatcaaaatgttgaagaataaaacaaaaaaaaaataaaaataaatagttacatttaccttgaaattaaaagaaaaatgttgattaatgtagcactattattaattattagtcttgtcttttgacatgttctctgtagcctttgtggttgttttgggttcatagtaaatttgattttgacgtcttttggtttggttcctgattcaattttttctgattttttttttttatctcttttggttgttttctggttttgatggcct

SEQ ID NO: 106931 - DNA, 764 bp, Cannabis sativa
atgaaagcaccaaactgttaatgcagaatttcattaatcaaaatttgagcctcacagtgataatctcactcagaaaaagttaaagcagtaaaataaaaaatatgaacaaaagggagtttttacgtgattttgcagttaaaattcttcatagtccacgagtcaatcttattagatttctgatagttttctcagggtcttttttgtgtgatttttttcgtcccctttgatcttacttggtactatttataattacatagtaggcagttaattacgaagttgactgtaatctttgcaacaattatccccttaaataatgggatctgattacatatcacattaagtaaatgcggttttcatttaaatttcacagagctgtgaatattccgcatttattgggtcaaaatgagcgtgtattaaagatatatggtaagccttatcgtattggaatgcctcgctgggaatggagtcgagttaaccttgatggcgagctggagctcgtcatatgtcttcccaaggttgataatgcttttactttaattctaacaactgcagtttctggtgacaagatgatcttttttcgcttgcatgccttcctacggcgaggtggacgcctcgcagtatctcgctttgcttcacccatctattatacttagcatgtatatcatacattgtacgctaagtatctctattgtcattatatctcctccacgtaacgaggttagtgcctcgtcttgcacacctaaagttacatggtttctcatcga

SEQ ID NO: 106932 - DNA, 534 bp, Cannabis sativa
tgccttcgtctaaatcaaccgtaatcactgtgccagctttagcccccaagattttgccattaacaatggagaaatagtctatcgggagattaaacatgtgtatccagattctaacatgttcaaacatgtcaaaatgttccttccttggcgcccatgctttcaagataaaagtgtatccacgtacacaccaaggaccatgttcaagagcccaagtgcggttttcagtgcttaaaaatcctaactcaaaacagttatggttgttagcaccatcattcaaagctacaacagtcacattaaacttccaaactttttccacaaagtcaataataatggcctcattaactaccattgggaccacaactttcccaagaagacaaaaagttgataatgcctactaagaagagcacacggactgatcttgactgaagcttcctcaaaagaataacaccttccattagtagaggagttggtggcattaactaaagccattgaaagcaaacaacgaaaggacaagctaccaaacaaaccaacctc

SEQ ID NO: 106933 - DNA, 645 bp, Cannabis sativa
aaatttcttaaagagaaaactttaataaaaatctcaaaaaatgtcataatgaattgtctacataaatatgaaatagagaacaaaatctcaaaccaataattgaaactaaactgttcatatactgaaacaattaaatcaaaaataaaagtagattttgagcttcatcttcacttggacaatctccacccttctgtccaaccatctgactcaactcgctaggatagcaatccaagtttaagcagttggagcagaaataagaagaaaataaacttggttattagatcccgaattaataacccaaggggataataattctctaagacacgtgagtttatagcatcaatggacataccttgtttcttttcccaaaacttagggcactggggtttccagtgacccttttcgttgcaatagaagcactttcgtttttgctttgcattgggattagcagcctttttcttattagctattttaacagcattaagaggcttcttgttattcttccaattcttctttttgatgggtttgaagtagaggcaatatctgcctcaactttggccgtaccattagcagtgccagattaggagctttagttcctcctttctgtggtcctccaatcaaattttcaaatgtctgaaggttgtt

SEQ ID NO: 106934 - DNA, 505 bp, Cannabis sativa
ttgacaagatcattctctgcaaagagtcaattatgcctatgtccagttgaaagtatgataatctatattcgaatatggatgtacattcaacgatggatatgagttttcgttatattctttagacgattactctagattttaccttgtgcaaagaaatttgaaatgtttgagaaatttcatgaatttctagcaatgttgaaaacattaaggtaagtggttaaagatcttgcgaactgaggggtggagaaatatttggtggatatgcagttcaaagatcattaagttgatttcgaattgtatccaaacttacctccctagaaattcagtttgcatattgatgaaagtaaaaggtctatgattagttactagtagttgcctaagtcctagggaataccctagtaataggaaaattttagaatgatggaatggttatgtacttagtgtaaaccattactagaatcatggatgtcctgatcgtgatcttaaaaaagctagaacagttaac

SEQ ID NO: 106935 - DNA, 513 bp, Cannabis sativa
  modified_base (340)..(341): a, c, t, g, unknown or other
gctcgaggagaaaagatgaagcaaaatacatgatctgcatgatctgctcgcacaattcaaaagctacggtctcagataaattccaagggaaaaaatacaactgcaggcgtgttagctcgattggcaagcagcaatgtaagtgacaaggcgaacttggttcctatccagttccccgaagagcctagcatcactggcacagaagaaatcgagatgattgacacttccccaaactggatgacaccaatagcaacctacctcgactctgggaaactctaagataatcgaaaatgaagctcgaaaaatgagaagaaaagctgcatggtatatcatagtagagggnnttatgtacagaagaggattctcaatgccattgctcagatgtgttactgaagaagaagctacacgactcctatctgaagtacacgatggattctctggaaatcatgccgtcgggcaaagcttatgtaagaaaattctaaggcaaggttacttctggccaacgatgattgaaga

SEQ ID NO: 106936 - DNA, 506 bp, Cannabis sativa
tagtagcacccacctttttgaaaattcgggctggagcccaagaatgagctaccgagcgccaagcattggcaactacgaatttgcttctatcatccctcgtccatccttcctcaaacttgaaaaatctcttgaagctagggggaggaccactagtatccaagaagagaggtctatggtccgagttgctcgtctgggaagagcaaataacaactttagggaacatttggatccacgctccattaactatccctttatcaagagcagatttcacatgactgccctcgacctgtggttatcccaagtcatcttgtctccttttatacacaggttgattaatcctctggaatcaacaagattagagatgaaagggataaaatggtcctttcctgaagaaccttctctttctgagttgctgagaacaaaattggtatctcctataattagccaaggacccccaaacctatctccaagggccattaactccgcccaaaactttttcttagcgt

SEQ ID NO: 106937 - DNA, 744 bp, Cannabis sativa
tttttattttgtagctctatgcgataacattcgtgagccaacatttggtcaccttgcactactcccacacccattggtgtctgaaaaatcacggataagtgcttaattgaactaactgcccctagtccaattaacgctggtcgacccagcaatatgttgtaaccttatggtaggtcgacaacaaaaaagtcttgcgctatcgtggtggataaaggtgcttcacccaatgttaatggaagctcgattattccttgattggcgacattgtcacttgtaaatccacacagatttaccgtgcaaggttttaacttagctttttcaagtcccattttctttagtgtatccctataaaggatgttcactgaacttcccttgtccatcagcaccctttttatccttttgttggagagctggatggtaattactaatgggtcaacgtgaggatgtctcacatatttttcatcttcctccgaaaatacaatcaaaggttcttcggtcttagctttcttggaaggttccgaagcaaaggcagactactcgttcttcacttccttcacatatctcttttgggcattgtttctttctctcgcaatatgtggtcctcccgagataaccaggatatcctcttgttcaagaggaggaggttgtaatccctggttacctaggttattgggcagatttggcttgttttgtccattgccttgccttttcacatattgcccaaagtggcctcgtgcgatgaga

SEQ ID NO: 106938 - DNA, 805 bp, Cannabis sativa
ttcttcagaatagaggaattcaaccagcataggctctataaaaggataacccaagagtcttaaaggatcatatcatcttgactcactgaacgcttattcaagcatttacgaaatacattactattattattaccgttccttctccatcagtctacggtggaaatatttattttctatcttctttatttacattctattattctttattcgaattatttactgacttgatcgtcggagtcccttcagctggcaccatcccggtgtcccaaggtctcaattatccttatttcctttgttctataggttgtttgtgcccgcgatccttccattccaatcattttagattttgccctctacaatttggctcccaccgtggggccctgacagactgaatcaagagcaagggacacatatcaaataccatggccaatttggaagaaggagagatcgatgctcaggcccagattgctactcttgtatctcagatgagggaaaccaaggaaagcctcagaagggtacaagaagagaataaagcattccaggaaaagaatgctttgctgaaatcaaaggtggagatacgggagtccgttcaacgtagtacgacagagtctcagtcaaggtttcgcattccaattccttccatgcaatcccatgattccactccaactacaaatgtaggccaatgtccagcggtcatgggaacaccacaaaaccaaacaacaccccatcattcaaccacaatgactattggagcagatggatcggtaccaggggatcttctccaacacatggaccctctttggta

SEQ ID NO: 106939 - DNA, 633 bp, Cannabis sativa
ccatagatgagagcatccatttttttttagtggaatgagagcattccatggatgagagcatccatttttttggtggaatgagggcattccatggatgcagggtctgccctgaaatttagtaggccataggcaaaaaattatttttgagcccttatttagaaaaaaaaaatggtatttttcaaaatcagcaaaaaattgtgtaattttaaaagggaatttttttggggggcccctggactaggtgggccctaggtacaggcctagcccgcctctgcccagggccggccctgcatggatgagagcatccatttttttttcgtggaatgagggcattccatggatgagagcatccattctttttagtggaatgagagcatttcatggatgagagcatccaagtttttttttttttggtagaatgatggcattccatggatgagggcatccatttttatttatggaatgagggcattccataaatgaatagcgaaacaaaaaataataaacatcaaaagaaataggaatgagatcattctctgaacacccttgaagctttttgattgttgctagaaaagtatcgtagtttttttcctgtgtttctttactctctttctcagatttttttcaaagtat

SEQ ID NO: 106940 - DNA, 549 bp, Cannabis sativa
attgaaaatattattttaaatttagtttatgttcattttgcaagaaataaaatgatttttggtattgccaaagaagagataaaaaaaaaagaaagcaataaattgctacaaaataagtgggtaaggccacttcttggtctgaacccgtacaccacaagaggatatgcataatcaatttcatgcatcaaagttggcagccagctcgagatactcttcatcaacataataataattgattttgttttatctcttgtgtgaaccaaagggaaagaaaggttatcaacttcttcatttatccgcagtccaaggcctcaacatctcaatcacatttgactaaatgagggaaatctatttcctataattagttttccatttattcaaattaattaatataagatcaaagtcaattaattaggatttttttttttcattgaacggttatagaatgtcaaaatcctatatattgaggggaacttttctttgaagtgtataatttgtcattggcaaaaactatagtaaattttagttttattttatctatctcttctc

SEQ ID NO: 106941 - DNA, 533 bp, Cannabis sativa
taatcgcagaataaaaattatacaaggtacacaataacaaagacaaattcaatgaggagtgtgactttttcatttagaataatgaaaaatgaaataaagagataaatgtgttgataccatgagaaaaaaaagaatatttgtatcatcaacaacatcttgactcatctcatctaaaaaatgataaaattgttcattcactagtaggatccatctttccacaattcaacattgaaaaagaaaatcaaaaactaaaaagttgaaaaaaaaaataaataaaaattacaaaatattttaaaggagttaataagttattttcatattgttgtgaagctttgtttgcgttgtttttgcaacatttcaggttcaacttgaaaatactttgttaaactaagttatttttatgttgttgtaaagttcattatgagttgcttacgtcacactaccatttcaacatgtaaaatctaatggagggcctccatgaacaccgccaagagaagattagcaaatgagagatttccatgaacactgacttg

SEQ ID NO: 106942 - DNA, 939 bp, Cannabis sativa
tcttcgatttaaagaaactctacatcagtacaagaacgcttcgggaaaactagtgaatctacgtaagtctactgtatgcttctcttctagtattcctcttgattttcgtgagtatctggcccacattctcggggtcccgcttgttccttgtcatgataaatatcttgggttgccttgttttgcgggtaaaagtaaaagtggtctatttcagtcaattaaagataagattttgaataaacattttggctggaagtcgaagatcttctcttttggagggcgtaaagtgttgttaaaattggttatcaggccattcctacttatgccatgagcttgtttcgtttaccggccggtattattaatgagattcaccgtatgtgtgccactttctggtggggtggggatgatgataagaaaaatatacattggtacgtacatcgtctctgttggcataagaatgatggcagcatgggcttccaggacatgtttttagtttaatcagtctctcctggctaaacaagcttctgggttgtataactcgcctgattgcctggttgccagggtaatgaagggattcgacttttgcaatggctccctgttaactgttgaagtgacaaagcgtgcttcttttctttggaaaagtatcttatggggtcgggatctctagaagtcgttggcgtgtgggctcagggagtcaatcagaattcgtaaagacgcatagatcccaaaggatcatgtggggcggacgtactccttctcgggtggccggctgaacctataaatggttagtgatctcaaaattgattctggatgatggaaatcatctcttgttgaggagtgttccgacgagggggaggcctctaccattttatctattccgtgctccttatttgattgtcaggataggcttatttggcatttttcttataacggttctttctc

SEQ ID NO: 106943 - DNA, 604 bp, Cannabis sativa
agttctcgggttacttccttgggttactttttaggcgtccttgctctggtacacaatggcttgttatgagctttcagagtcttgtagatgtagaagggggattggggtttaccccaaagggatgtgttttccttgtcccatcactttcactgttcagaaccattataggaggtcgagtgtggttgtttctcgtcgaatgttggcagtgctccgaggcttgtgttttgccttctcgggcttgcattttgcctcctgtgtgttaggaggatggttgttgaggttgttctatctttgttcttgttttttttttttgagttttaagtttgtttaagttgtttcggtgtgatgcaccttatgtccttaataggtctttttggggtgtttgtctctttttatgttcttgcgtgagctttgagcttaatgctcctttcgaatcggtgtagttggccgacagttgttatcttctagtgagatcgcgatttatctgctggacttgttaaataaagttttcatttaaaaaaaaaaaaagcatattttttttttcaattttttttaaatagcccttattattaagtgaatgccgttgtaacaccctaactaacat

SEQ ID NO: 106944 - DNA, 524 bp, Cannabis sativa
aattagtttagggattcattgtatctttattatttgatatgtttctctttatagacttattgtacatgttatatatactgctttatatcaaaaataaaataacacatagaacatttttccctaaatctgtcgacttggtatcagagcaataggaagatctagagtttcagatgtagggcttgaaacagattgtgaagacaaaatattacttggagacaaagaagaactagtaatagaagaagaattacctcgggtacttgaagaaccattgttcggggcttccatttgatcttgtgcaaggatgattggatggtctctacttctttcgcagatgttcttccttgaataaaccacaggctcaagaacattacgatttttaatcaatcgtagcatttctgtttctgacaaaccaagatcgaattcggattcaaagatgtaggttgagttttctcaagagaaacatcaagaatagtcttaggtaaaggttcaacaagttcccaaaaattttgtaccactgaattctc

SEQ ID NO: 106945 - DNA, 513 bp, Cannabis sativa
aaaatctacgttaatagtttggtgcttttattgagagcctttgtaaaaaaagctcagaaaaaccctccttatatataaaaaataatccttttcatggctaacatcgaagaaaatgttgacacacctcacaaagaaacccctcattgtcctagaaaagagccaatgggttctcggaggcctttcaactcaccatttgaacgggctactagttcggagagaacccacaatctgggaatcaatcatgaagggcctagaatgaacaacgacagtcctctccctaatccagttggtgaggatggcgcctatgatccaacaaagtacatacaaattgtcaaattagaaaatcgccatcttaggtgccgcttggaggaggcaaactagcgcaatactgagtttgaacgtgaggcaaccgcggccagggcagcacaagggaataatacccaaaatcaacctaacccttgagagagaggaccacaaggcaaacctcgagactcgcaaaccagggggcaggag

SEQ ID NO: 106946 - DNA, 2395 bp, Cannabis sativa
taattataattaattaattttaaaaagaataaataaatacttttgtcggcgcattcctgcaccggtaaaaagtggcccaaaactgttggcgccaaccgtcagattggcgctaatagttttgtcggcgcactattgcgacggcaaaagcttatcaaagcaggttcatagcggataaggggattttttaacaccgacgcttcttttttaccggcgtgatttctcgccggcgcatttagtctacgcgccggtaaaaagtcttttaccgaccaagattcccagacaagctttgtcggcgcagttagtgtacttttgccagcgcaaaaatacgccgacaaaagagggttttcttgtagtgaagtaaacctttagaactactataaatttatcttatttatgtttaagctgttgttatttgcatactcgcatatttttctttgagtattagttactctaggttctattccgaatatttgtattttttggtgtccattttcctctaacaacaccatgaattagtaaaggataaaaccttggaacatcgttaagcagaaaagggaaaaaaaccccttaaaacatccgttaaaaaaagaaataaagaacaacctcgaatagtataaatcagttggacaatattaaagtataatataactctacttctctacatattttattaacgttttgttttgtagcgagggagacgaaatggataagaacttgttttttttgtccaatatcttaataattgctacaccaatgcctctatattttatatagttccaattgcaaagcttatatggaagacaatttttcttctttggagcttatgctttaaaattttgacccaaattgggagttggacatgtctctatctatcacctgttctccctatccgagttgagcactgttcttcaatcagcacaccaatcactaaacatgcaccctcaaaattgcttacgtggcagtttctgattggccttgactaagctaatatcttacaaacttataactaccaagtgatcacactaagacaacagcagcttccttgaaataacacaaaccattacctaattaacaaactaaaaagacttgcatttcacaaagtcaatgaccaaacttttccaaagcacataataactagaagaagcaaaaacaagagaagaaccttaaaccaaatattaaaagaatcattaatggaaggagaaaaagacttgagtctccctaaatccatggccaaaggcttgccattaacttcggcagccaacaacagttctaattttcaaacaccatctccattctctatctcagtagcttctactggttggagctcaaggcctacaatcaaccacttcagcctcttcttgaggttcttggcttttctattctcttttgtctctgctctttcacttgtcatccatgcaccaaagaagaaaatcaaaggatcatcatctccttctagctttggggaatattccgaattactgtaagagtgactacttgttccatataacaagaaaacaaagtgttttgattatgtgatcttggaattttatttagtggttttcatttaagaattttatttgctgtttcagacaaccaatcattatgaatttgttatttatttatttatttttttttaacaaaattcttaatttttggatgaatgattatatactttgtgtaatatttattggaggtttataatatattgcaaagtatcaaagttgttcaaaaaaaccatagaagtttgttaaaaatatatatataactatataagacttgacaaaatggacaaatttgtataacaaacagaattaaagtttgcataacaaatttgtttattacatatataatatatatagttttgtcaactaaatgatattattgtgtgtgtatatatatatatgtaatataggtactgtttcacaataacgatggtagctttcgcatactcagttttccaacttttcaaaggcattcttgagattgcagacaagggtattattatgtcagacatggtctctgattacactagcttcattgttgatcaagtaagtttaattaattgttgaaaaccgaaaatggtcagagaattaagtactctatttgattaattactatatatatatatatatataacatatgtatatttattatgtgttgtcatcagttgttggtgtatcttctggtttcatcttcatcagtagcagtacctgccattaagaacatggaatcatcttcctctctttggaaggcctctatcgtctccctcggattctctttcgccacttttctagttatagccctctctgctctcttctctggttacaagctttgtaagagaataatctggtgaaaagctgatcttgattataccattcatcatcatatatatata

SEQ ID NO: 106947 - DNA, 1165 bp, Cannabis sativa
tcgttcttctttctctaacattttcttaggcttgcagcctctggatcctgcttttctttccctggatcctttttcaagttttcgtgactttgaacccactatcgttcccccattgcacttcttagaggtctgcagctgtccttgctttgagcaggttgcattgggcttggagacttacgcctcttctcgtgctgaggctgcgccacccttagcattgtgcccctttgtcatttttcctcctgttttggcacctgtcgaggaggttaaggaggagcgccaggtgtcagaggggggctcgactcagacgacaacaacttactatcctaagctcgaagctactgcccaatccaaaaacttcgaagaggtccatgccttaaccgacgatttgccttcggtttttttcatatctgattcttcctttcctcaagagttacctcgggtagtttctgagattatacgccctccttcttctttcaaccgttgaggatggcttgcaatgcggagagcatttcaacagagggaaattttttctgtatagggggtctatttactttatattttgtgtatttttagcaattgtaagtttagtgctctggaatgggtacttttgcccttatgtgatattttggcaggccactactcccctagtttttggaatagagttcacactctttcaaaatcttttagttttttgtaagggggcaatggtcatctgtatatgtaacttaattcctctaattattgatgtttattttactcattcttctggctttttaatgagtgccgttatttatggatttcaaacttgtatgaatttttacttttggcgttgtgtgatttgctttctatgcacgctttatttgctgttggccattttaggttttacgaacgtggatcatgtattctcatatagatagcctttcatgaaaggtcttagttacgtgtgcctttcgtgaaaggtcttaagtatccaggattttaccttccgtggaaggtctttgaacatttagggtttcgcctttcgtgaaaggtcttaggaacatccggtcttgccttccgtggaaggtcttagatacgtttagtgttgcctttcgtaaaaggtcttaggtctgtttgttcttagtttagaattttttgttctgttatctataatccgtccttcttt

SEQ ID NO: 106948 - DNA, 598 bp, Cannabis sativa
agaagttgttcaagagagagtgcgacgacatcaccttcatggaaagtgatgcgagatgggtccaccatccacattctgacgcattaatcatcgttgccaatattggcggagataacgtccaccgtatactcgtggacaatggaagttctgtgaatctcttgaacttccaagccttcaaacaaatggggttgcatgagaaggatctgcgacctataacatcgagtatatacggttttactagtgacgtcattacattaaaagggatgatcaagctcccaattactttgggaactgcctctgtggtagccaagtcgatggctgactttgcagtaatcaaccaatacttagcctacaatgttgtgattggtcgccttattctaaaagagatgaagatcgtgacgttgatctatcatctgacaatgaagttccctactcccactggagtaggttctgtgcgaggaatccagtcagactcacgagaatgctacaacacaggggtcaaactcgcagaaaaaaagtcagtcaatgtcatctatctgctagaggcaccacctcctcgtcaggaggtcttcaaaatagaagaagtgccgcataaaga

SEQ ID NO: 106949 - DNA, 544 bp, Cannabis sativa
  modified_base (140)..(146): a, c, t, g, unknown or other
atttcgcactcaccaaaatgctaccgaaacctatccaaatcacttcaaacttcacagagcacatatatacaaaatatactacagtcctaacgtaaccaaaattaaaagcgagcccttaaatgaaaaacgccattaacgtnnnnnnnaagctttaaaaagttccaaacttgatttctaacccaaaatcacctcattcaattagtaaacattgaaactagtcccatagctaccaaggaacaattttacaaagtcagaatctttataatcactctaaatcacaaagccactatataaaactaattatttcttacttaaaacgaaattaaagtataccttaagctttcgctcttcaaagatttgctatcgcgctactaccatagcttagatcgctaggtttcgggttaaaaatttaagaaaatgaatagaggagaatgagaaattcatttaattgagagaacagaatttcatttcatttcgtactgttattattttaaacttataaaatataaatatataaacttatcaaaattgataagttttaaaa

SEQ ID NO: 106950 - DNA, 937 bp, Cannabis sativa
  modified_base (82)..(100): a, c, t, g, unknown or other
aaaatattggttacaaaaatcacaatttgttgttactaatgtttttagttacaatacctgttgtgactaaaattaaattagnnnnnnnnnnnnnnnnnnnactatgttttagtcacaagtaatcttttgttgtgactaaaaatcacatttagttataaaaaatttatgttgtgactaaaaatgattttttttttgtagtgattcctaacaataaggggtagggtgaaagccgaacccttgacttaagtaaagaaggagactaataaaaaaatttctaccaacatggtttctttcatataattttacttaaaaaacaaaatatgccatattttttatgatctctttcattttgagggtaattgtgtatttttcaaaaaacaaaatatgcttgggtaagagtagtactaaatatggccacaacttatttgtatagttccattaattagtattaatttataaaaaaatgaaacaaaaaatggattccatgtgcaaaggggccacttaataacttgatcgtgtgccattgatcatatatataggtattggataagaaacttcttatttatttatttatttatttggttagctgtgaagaaggtttattatttaatgattcgttatataattcgtaccctattaatttcaaaccttatacaactttgttatttattcagaccaccgtgctgtcgagaactataaagaaaaatatagcaataaataaataaataatatgctctaagaataataattatagtatttttttttcaatttttatatatataactttattatataaaaattattcaaagacattttgtatgtatcgatatatttatttattagtgataggagccactacaataaaatgttggttcgtttaaggcgaccaatgatataattatatgaatatatattttttaattacatactaattatg

SEQ ID NO: 106951 - DNA, 806 bp, Cannabis sativa
cacaaattagaattttcttcttgtataataaatttttaaataattaattatttttcaatgatattaaattattctttttataatagaataactaagtatgagtttttctattcgaatttgagattgcttcgttttctaggagagcttgactttgctttttgactctggtttggttttttgagtaaatgactccttataaaaaaaaagatagaggagtttagccattttttttagaaaatacttcaacctattttattttttactttttaaatatttaaattaaaaaactaaataattaagtgtaataattttaaattaaagttataaatataataaaattataaaagagttttgctttaaaaattttaataatttaagggcaaaaaaattgctaaaagatccttatttaataataaattacaaaaaattaattaataattataattaatttaatattaaacataattaatcttcattaatgttttttaaggaaattattaggttataagttaattattatttatttgtatttaatttctaaattaatcacaaccattgaatagtaatttaatgaccaaaaaatgtaaccatgatgattacatatttaatgtaacaattgaaacctcctccttatatatatatttataaaactaatcctactaacataattaaatttaacgaaatattcttatatttttaacatattttattaaactaacaaaaatcgttagataatcacattttatatataaagatatgatttttttaaatttagtgtgatgatatttataattaaaataaataat

SEQ ID NO: 106952 - DNA, 586 bp, Cannabis sativa
ggttggggtgtgcctaaacaagaaaaaaaaatgtaaattaattagttttgaaaattattcatttatttattttatgttattttaaattaaaattatgatttggaccaataaaatatcaacacgtgttcttttggagcaacaaacagagcaattaaattgggtacctattaggggtgttcatcaaaccgttcaaaacgatcaaaccgcccccaccgcaaaaaaatacggtttgaatttttttgcggtgcggtcgcggtttgtatttttcctaaactgcgcggtgcagtgcagtttacaattttgaattgttaataataggactgtacaaaaaaaattgtacaccgcccaaaccgaaccgaaaaaatcaataaaaattacaaaccaaaataacctaaaaaaattacaacccgcccaatctgttaattgggcggattgaaaataggtccaacccgcctaattaaaccaaataacctgaccaccttgactttggttttttttttttactttttagttttcattatatataacataaatgattaaatatataataatatatataaaattatatacttaattgttaatttca

SEQ ID NO: 106953 - DNA, 834 bp, Cannabis sativa
ttattgcgtgttacttgtttgtattcattatgttatataaccccaattctattttagttataaccggtttgagttattttgtgttatgtatttttattcattataacactattatagaaccggttctattttaattataattggtttgagttattttgtgttatttttattcaattataatcggtttaagttatttgtttttattcattatgttatagaaccgattttatttttagttatatctgagacatctacttcatgtgacttttccagtgacttttctggcgacaataacttttttggtgacttttccggcgacaatgacttttcgatgacactaacttttccagcaacttttctagcacttgtgactttttagcgaaacttattattacaaattttattaaatttatttattgttttttcccatattttaaattttaattattatttaattccatattttttttacattatttatttatgccagaaaaagtaaattatatcctcaatggctcaattcccatatttgtgaaaatttaccaataaaatatcacctcgatagttttatttaggacaattagtattgggcttactcaattaataacaattatttatttaaagttgaattctagacaggcgacgtcaaattaaatttacttatagatatggccttgtgtgttttaatgcggttttataccatttatattttaaaagaatttgtaccacgtataccgatataaaaggcttttgcctctatgatatattttgtgtgtattacacgattataaaattataactatatcatagcctattctctctctctctctctct

SEQ ID NO: 106954 - DNA, 626 bp, Cannabis sativa
tttattgctataaataccgaaattcgaaaaatagtagcataaatcctcaaatttctaaacttaacagttttataattttattggtacccaatataatggtcgtgaagggaggtcaaatcaaagaacaaaaagaagacatatttgagtttggatttgattcatttatggtttaatttttattctgatgtgtgtgttaagttttaggctcaaattttattgtgtatgtttttaatgtttgagttttagtgttttattggtattctactgtttgagtttgcgtttatgagatctatttttttttatttatttattttcataaatttttagaacttaaaatttgatgttgttttcattgattattagaattgagagtttgatttttcatatgggaattaaagtttgtcttttcgtttcattgattggaaaatattagaagaaagtttatggaatgagaattttgaatatataaaaatagcatttgaatcgagaatcaaaatttagtgttaatctccttaaaaaaactctattgttaatatgtaaaaataacatagctggaagaagatgaaatataataaataatttgaggatataaatatgaactgcaatgatgacatcaactttatatg

SEQ ID NO: 106955 - DNA, 1173 bp, Cannabis sativa
gagcaatccaaatcgtaaatttttttttaaaaaaataaaaaatagtatatgaggtaatttctctaaaatataaatatctctatttattttttccttaatttttcatttttctattttaatttttttttaaaaaaaataataactccaaatctatcacattttttaatttttttgtaaactagagttaatgagatacggtaatgacaataggtaatatatacaatgatgagaacaattttaaatttcggacttccattgtaaaaaagagattttataattacatgtcaaagttacctatttgtacacctaacttctcatattatcaaagaaaaattatatgaaaaattagtaatattaaatttttttaaacatccgccgcgaaacgcgggttgttaactaattatttgaataaaatagaacaaaaaaaaaatactaaaaacagatataaaagaaaataaattgtgtatatgttaagaataacaccacatcatcaagggcagctatataatatattattcaaatatacaaattgcatgatttttttctatttattttctatttgtattattcaattaagaagaaaaaaaaatctaatttaattagctagtcgacattcttttaaaaaaaaagactttcatgctatataatatagtattcagtgttttttattcacatatatttatttattatataccacaaattattgtatctgtaaaataaatagctagaacatttcatagaacgttttaatttaatcataaacctatttattaatctattaatccaccactagttataatatagaagtaacataactttatacaaataaatattaatgcgacgattgaagataaatattacaaagttatttttatacaaataaatccacataaaaagaaaagaaataaatgaatgaacaactgaagataaaattatacatacataaaaaatacaaatgattatattacaaaatttaaaaagaaaaaattcaaagcgaaagctatagcttcacacccattctaaataaataagcttaataaataataatgaaccaccaaatcactcatgaaagaaaattaaaaataaaaaaataaataaaaaataaaaaacaaatagttttgagcttatacatatctcagtactgatcctctaaaatcatcataaaattaatgt

SEQ ID NO: 106956 - DNA, 618 bp, Cannabis sativa
gccaccaccacaatatgctccagctgatgagggcaggttaaggtagagtggagctcgaccgcttcccaccccgtggcacgaggcttaaacccgtcctgggcaacgacacctctcatcacctcttccagggtggccaggcgctttcctcctttcttggaagatttggaaccggatgtagacattttggttctgaaaaagatgtaaaattccagcagtcaggccccataccaaaccctaaatcaaaaaagggaatggggttcccctaaccgctggaaagaggccccctccggacggttgtaaacaagaaagccttagaaggttttttaggacaaaagtcgggtgtaagaatcttacagatagtgacattacacatgagcaaagaaaagaaaagaaaaagaaagggtaaaatcgagaaagacaaagtcttctctgtacccttgaaggtcatcacataaagaacagatgggcctttggaaaaatataatgcgcaaaataagagcgactcaaacaccagaaaaaaaaaagaaaagggaacctaacgtgttacgcagaaactcaaggcgaaaaattcccagaaacttcaaacattaaacccagaaaaagcagatgaacagtaaa

SEQ ID NO: 106957 - DNA, 628 bp, Cannabis sativa
agaagttgcggaagactaggtaagataaacaaaataataagtattaaaggttgacttatattatatgttgagtgctaacaaaaagaaagtgtatatatgataataaactatacacatcaccacccacactaatatggaaaatgtgccttaaatattgcatagctacaaagttagaacttcacctacttcatcggccactttattaacatccatatatatatataaatgtacatcatgaaagttaaataaaaaagtcttatatatatatatacttttttttagatgtatatttatacttttgcatatagtaaaatgcaacatttcaaccactatattttaatgaaattattttattctaaagtgattatattgtattgcatgatacattattagggaatatgattagtaaattaattaacattgaagcctagttgcagatatagacaaattagacttttgcttagggctcaaatattatttttttaaaaaatatatattttttaactgattttaaaaattattatattttttttcataaaaatttaaaaataatttttttcttataattcactaaattttaagcctcgttacactatatttggtcaaaaaaaaatattggttcctttgt

SEQ ID NO: 106958 - DNA, 1657 bp, Cannabis sativa
cagatccttgcatctatggtgaaaggtgaaatcggttttctgcccaagtttcctcatgatccttgttaaatattccatacccagaacaaaaagcaaaggggacatatgatcgccttgtcttagtcccctttttgcctcaaagtagccatgtagggatccattaatcatcaatgaaaacctgggggttcggatgcacaacattacaagttgaatgaactgatcagggaagtgcaatccatacaacatttcttcaatgaagttccattcaattgtgtcataagctttttgcaagtcaagcttgataacacaactaggctttgtcaacttccttccataatgacgaactagatcttggcatatcattacgttgtgtgcaataaatatcccttgaacaaatcctccatgattacctgctatcaagtgtggtaatacactgttgagtctcgagcatattagtttggtggctgccttatatatcacattgcaacaagcgataggcctgtaatctctcacagtgttaggacattttaatttaggcacaagggttaaaacagtgttgtttatttccctgagtagtttccctgttttaagtaagctaatgattgcttcagctacttcagtgcctatgatgctccaattttttggaaaaaaagaactcccaaaaccatcaggtcctggagccttgttaccaggaatagcaaaaattacctccttaacttcctcttgattgtaatctctcaagagaaaatccgcttgctgctgggaaaggaattccccttctctaagaatactctgctgaaccgatttccttccttgcatactgctgccaagtaattcgttgtaataatgaatgaaggcatcaatgatagccctcggctcttcaatcctttctccttcagcattcacaactgtaataacttgattgtgtcttcttctctctcaaatactagagtgaaacaaagctgagttttcatcacctgcctttgcccagcttatctttgctttttgctgcaaaaaagacaagtaacttttgaaaacaagggtataatgagccctgagatcatgctcctgctgatgtagctgttcgttcataggctgctgctgaagtaaagattgacaatcatcaagtttggctttagcaatcgcctcctgggcacttatatcagaaaaatgatccctgttcaactccttgagagcaattttcatactcttaagttttgcaataatccgaaacattaaggtccccttgtattgaatccgccactgctgctgtacaatttcaacatatttaggatgcaattcccacatagaaaaatatttgaaaggcttccttccactaataatactgttgtgaaaatttagaactactggggtgtggtcaaaaatactttcattcagaaaaataacttcagcagtagtatatgcttccagccactcttgattcgctaaagcacgatcaatcttagagtaaattctgtcatcaccaaattgcttattgcaccacgtgaaaaaactcccgctgaatttaatatcctccaatctacaatgagcaatgcaatcaatgaattccgtagaagaggagtacctcactcgcttgccaattctctcttcctttgacaaaatgtcattgaaatccctgttggattttatgccctaa

SEQ ID NO: 106959 - DNA, 569 bp, Cannabis sativa
actcttcaagaaacgctgggaagaatttatctcgtggtccttttagtcttcaaaccaggctcatctgtcaattgtgcttcaaaagtggacacactgctgctgtgtgccactatcgctttgacaagaacttcgttcctcctaagtctgctcctcctcgagcatatctcactgagcttgaagctgacagtgacaatcaggtacataatactaccattttacctgactttggagatgaccatctgtggtttgttgatacaggggccaatgttcatgttacaaatggttcagagtctcttgacaatccctctccctatgctggtactgaggcactttctgtaggcgatggtaagacccttcttatcactcacagaggttcttcctctctgtctactccctcttctcatgctttaaatttacattcagttttaaatgtgcctgccatcaaaaagaatttaattagtgtgtctaagcttactaatgacaataatgtgtatcttgaatttcacaaaaattgttgttttgtcaaggacaaactcactggagctgttcttctcaaaggaccagttaaa

SEQ ID NO: 106960 - DNA, 558 bp, Cannabis sativa
gttttatgcgatgtacatggagtacacgcacagggagccttcgatggaggatttcagttatttttatgatattaagaatgtgggcctccataatggcttctattgtttcagcaagtgggccacttctgaaattaatttggtggaggaatggtttccaatatgggagattggaaatctaagtggttttacgtgttcaaagtaccagggattaggactgactttaattgccgacccaatatgttgtgctttttagcacttagttaatattcatgttaccttatgatatcgggttaacatttttcctcttattgagcagatagaccggctcgacctgttctggacccagctcgcaaagaagtcgatgaagttctcggtagccttcctgtttgagatcgcaactggcgattattgtgcacaactttgaagttgggagaacataggctaatttcggagaatgctagccttcatcgagagccggtatacaaagagccatatgaaaaacaaaagaagaaggtagacaaacgtctttccaagcagacctctcgaccaacatcaggt

SEQ ID NO: 106961 - DNA, 582 bp, Cannabis sativa
aggctgactgggcgtcccttcagtttttggctaataaatgctctgatgcaattaatgctttgaaaaccaattttttctcaccacgtttgacggttgcacttgattgcttttgatttcccatattcacttttgggggaaccgaggcgtctgaggtttctgaaatgattaccccttttcactgtttgactataaataccattgagcatttgttcacaaactcattttcaccaaccttctttgttaagcaagttcagagcaaaaagagaggtttttagcttcaagtttgccgaaaaaatttcacgggaactgtcgttcagctttgtgtaacctgaacccagacgttcgatccttgagtaagttctcgatttcttttactttgcacatttactttctgaatgcaactttaacgttgttgtagatgatatgtagaaaaccctaggtttagaaactctgcgatttttctttgtaacgattcatgcaactccatcgttcataatgcttgctttttgaactgcacaaaccctatctttcatcttgcttattctaagcttcatgaaatttttgccctaactcatgaaaatt

SEQ ID NO: 106962 - DNA, 612 bp, Cannabis sativa
caaacaaacataaaaaagaatgtgaagcccctatcctaatttggctccaactcagaagctagaagcacacacccaaagcatcctctgagcatctgtagtcatgatttgtgatgccaatacaacttgaactgcctactgggagtcacactgaaagataatctctaagcaccataaccatgttgtatctgtattgtcaatagttgaaatttttaaatttatatatatctgtcagtaaacgtctctgatacaaagtagttgccgatataatcattaagacactcacaatacaaaggttcaatgaagcaacactataccacatctcacctcgagggagggtgttgaagagtactccttccactacaaataacatatcatcattttcagttgtcactacaaatataagctagtaatttataattgtatctcgattaatgagtataatcaaaatatatctactaaatattttaaagctcaaatctctatctaaagaacacataacagtaaaattaaaaaatttataaacacttactgattggggataacccacatcgacaatggaataccaatttccctgcgaaaatctcaaatgttatgtgcaagaaagaattatag

SEQ ID NO: 106963 - DNA, 1239 bp, Cannabis sativa
aaagccaaatgggacatggcgggtatgtatagactttatcgatcttaacaaagtgtgtgccaccttcaggttcaagctattatccttcatggacgcctacttcgactacaactagattaagatgcacattgcagatcaagagtgcactagcttcaggaccaataagggggtatactgctacctggttatgccttttggattaaaaaacgctggtgcaacatatcagagaatggtgaaccagatgttcaaaggcctcttaagacaaaatatggaagtttatgtggacgatatgctagtcaagtccaaagcatgcgtgagccatgtggacgatctcgcagaatgcttcgaagtagtccggaggtatggaatgaaacttaacccacagaagtgcactttcggagtcaagtcatggaaatttttgggattcattgtcagccaaaggggaatagaggcaaaccccaaaaaaattcaatctttcataaacatgccttcccccaagaagcacaaagatgtgcaaagcttaaccggaaaggttgctaccttgagccgattcatttcccgttcaatcgacaagtgcatcccttttttcaacattttaaagaaatgttaaaaatttgaatggactgaagaatgcgaggaggcattcaaaaaattaaaagagcacatggctaaaccaccaattctgtcgaagccagttcacgaagaagatttgttattatacttggctgtctctgagaatgctgtcagcgcagccctagtccgggaagaggacaaggtccaacatccagtgtactacgttagcaagcggatgataggggccgagatacggtatccgttgattgagaagttagttttcttcctcctgatggcttcaaggaagttaagaccctacttccaggctcaccccatcaaggtactaacaaaccatccgcttcggcaagtcttacagaagccgaaagcgccaggaagactcctcaaatgggccatggaattaagccagtttgacatacactacgcatcacgtatttccataaaaagacaagcctagcagacttcataacagaacagagtgagtgcaatgcaatgcaatgaatgaagcagagcagaacagaagctagtgcaagcgtgccagcaccgcgaaccctagcatggaaggtatttgttgacggagcgtcaaacaaaaatagatccgatgttgggatagcaatgatatattcagacggactctagctccaggcg

SEQ ID NO: 106964 - DNA, 783 bp, Cannabis sativa
gggtccaggtcctgggttcgggtcggaaattgatgttgacctaaattctttgtaaatattataatacaagctaattcagaccatttattatgtattaaataatacaacatacattgtattaaaaaatttggtcgtaataattaatacaatacattgttttatttaaacatagtgttatttattatttaatatagtatgacccttgtacggcataccaaaccagcccttataaattatatatatatatacaatttatttcggcttgcaatgttttagactatgaaatattatgaatggtatatattggtaaattttttgatgtactattgttttatcgataaacacaataaaaccctatcatggcagttattatttaattaatttgtaccattctactattacaaaatgtatattatatatatgttgcagtatattttggttcaaacaatttaatttaaattttggtgtttgtttatgtttaatattttcagtaaattaattgaaataatatgtcgctaaagtgacttttttgtatagattaatttatttaaaatatcaagatagatgtgtatttgtaattgatacatatattgactgacccaaaggtaagtgaatattttgctaaatttcaaacatatcttgtggcaataaatatgtgacaattataaggtattttgtgtgaacaatacgttagtgcaaagattaatatattgtttgacacaattttattgtcaatatttgattgctacaccaagagtaccgcttacagttaatattactgtc

SEQ ID NO: 106965 - DNA, 630 bp, Cannabis sativa
  modified_base (62)..(75): a, c, t, g, unknown or other
acttaacaccgctcttaaggacttaaaggcaacacacttttaaaataattaattaaaatctnnnnnnnnnnnnnncatgctttcacattcacaattatttaacatactatacaagtacgggcttactgaatagtgaaccgagctttctctgatgaagattgtacatgtcttagcaaggttcggtagacaaacctggcagctctgataccaaaattgtaacaccctaatgctaaggcacgctacagtgctttttaaattacagtgcaatcttcgctaatcgaagagttttcttgaaaaatgtatgaaatttaaacttttatattaattactaaactttataatatattaaaatatttataatgccgggatcccgttttcaaacttattattccaaaatacacaatttacaggtcgctcagcgactacaaaatataactcccagatgtcccgagcccgaacactccaggtcgcgccgcttcgacatgtacaatctcaccctagctcaggttcactcctattcagccttcgccttttctatacctacacacggaagcagaactgtgagtcgacagactcagtaagaaatgcatttaacatatcacataatttctgacctgtagttaggcgccc

SEQ ID NO: 106966 - DNA, 1431 bp, Cannabis sativa
  modified_base (432)..(433): a, c, t, g, unknown or other
aaaattacttgatttaagttgatttaaaattaattaacaaattaatttttaactttaatctaattttcaaaattgaaaatttcaaaatatctacatttaaaattaatgtaattcaaaatttaagttggaaatgattcttaaaataaaataaaatatattatgaaaattattttaatttaagttgatctgaaattaaaaaatttccagcttaaatataattttctatttaattaaattcattaaaatagaaataattaagtatctagaataaaatcaacttaattattaattcttatttaatatccaagaaaaataatctaatttaagttggtccaaaattaattgacaaattaatttttaacttaaatatattttttaatttagttaaatttcttgaaatagaaataaataattaagtatcttaataaaaannaacttaattattaattctaattaagttctaaaaaaatattctaatttaagttggtccataattaattaattaattttcaacttaaatagatctttctacttaattaaatattagaaaatattaattagttactagaaatttctatcttcaaaatttcattaatctaagtgtgttttttaaattaattttaaaataattaaatgaaaaattaattccatttattttaaaattaatgatgttgttaattcaattttaattaggttaaactagtatatttagccaaatacaattatttaaataaggcaaatgggcttcagagttagggttgttcatgtgagggaggtctgggttcagtatgtcgtacccactaggggtgttcgcggtgcgggtggtgcagtttttgactattttttgaaaccaacccgcacatgcaattttttcaatttcccaaaccgcaaccgcactgtgaaactaaaaaactacaaaagtcgcatcgtaaaaaatagtacggtgcggtggagtttttgtggtttggactatcactaaataattaaactatcacaaatacaacaaaacttgagcaacacttgtcaaaaatactgtaagacttgaaaataaattatgaaaaaagtttcaagtttacacaatacaataattagtgggcttaggttggccttcatgtattagacctaaataaaaataaaaattagtatttttatagtatgcggtgcagtttgaaccgcatattaacaattcaaaatcggtaactgcaccgcgtggtttaggaaaaattcaaatcgcaaccgcaccgcaaagaatttcaagctgtatttttttgcggtgcggacggtttgagcggtttgataaacacccctagtacccactactaatgaccccataattctctcacaaagcccaaaggagagaaatttaatcttaaattaaagtattgttattcattgaataagccctatactaattgggcctaaataaactat

SEQ ID NO: 106967 - DNA, 791 bp, Cannabis sativa
  modified_base (85)..(88): a, c, t, g, unknown or other
tcaatttaaaatataaaataaataataataaagtaaaagatatgggtaaaaatatttataatattttaaatttaaatttctttannnnaaatatttacataatttttcattttattttaatataaagttaaaccaataaatttaaaaataagattaaaaatatcaataatattttatgtattttaaattaaaataaaaatttatttttatataatatctatataattttttatttttaaatatatataataacattataaaattaataaagaatattctgttaagtaataggatattctaataaagttaacgtagaaactaaaaaagtatcgttaaaccaagaattctgttacatagccacattttatatagaatagatataaatgagagatatgaggcagtgatgtgacagtctaaaattactttatttacctttatatattctctccttaattctctcaaatatatatttttttatttggtttaaaattttcttatatctattttctacaatattcttttattttattttattttattatttttaaaaaataattattcaatgttcaccttaatcgattgcatgtatatagatctattctatataaaatgtggttatataacagaattcttggtttatgagaaattattaggtgcctttttttttaataaaaaaaataacaaattattagatgttgtcacttaaacggttagcatccatgtagttagttaaacctaaatataattaatccacctaaagtgttgcaattaataataaatttgttcatatt

SEQ ID NO: 106968 - DNA, 500 bp, Cannabis sativa
tataatacaaatatattttaaaataaatttctgaaaataattttttttttttaaaaaaatatgcatacaattttctccttcttcctctaaatttattattttttattttattttattattgaaaaaaaaatcataataatttatttcattttactattagttatgtgaaaaaaaatatttttaataaatattaagaaacaattaatttaaaataattgatccaattcacaattttgtaaattagattagactgaatttaaattattatagaaattaaattagattaaatccaaaatataaaatcctcacttaatttaaatcaattaaactataagtaaaatagtactaatttaatttgataaacccctacatcttaatccctcaaatcttaacatcacatgggcttcctcccatattcattgatatatagatatatattttcggtttcaaaagttttttcacattttcaccaaaaattttgggtaactaagtaaataggc

SEQ ID NO: 106969 - DNA, 681 bp, Cannabis sativa
  modified_base (231)..(234): a, c, t, g, unknown or other
cgccaacttccattgcatttgggactttagcaacgaccaggcgagcctctctgggcatacatcagtagattaatgatagaggagaccaaagtttcacgggtaactgaagacggaaagttatccgcgatactggggggcattgaagtcctcgatgaactttggaagaatataaggaagaacgggccgtagactcaatgagtgatttccttgaccgtgccgaaggcttcatcnnnntcgaagaagccattcaacgagcggaaggagaataaaagcttgggaagtcaaaggctccttccactagggcatccccccaacttccccactacccaaacaattcaagctcaagtggcaaacgctccagcacaaccacaagcaaggaaatgggaagaagggaaagttcactggaaaatctgaacaagctccccgggagaatcatgcaaaatatactgcattcactattttgattgaagatatagaaaatgtgtacatggcaactcaatcgttggccccgtataagaagctcgagcctatgaagaaagatgccaacaaaagtgacatgacaaagttttgtcggttccacggagattacggtcacgacactaatgaatgatacaacttacagcgggaaattgaattcctgataagaaaaaaaatccacacctacaaaagtatgttaagacc

SEQ ID NO: 106970 - DNA, 551 bp, Cannabis sativa
  modified_base (209)..(211): a, c, t, g, unknown or other
gaccaagctagtgtagaaaaattccatgaagctgagagagcgaaagcaacactcaagattcaagaagaagaaatccagagaaagctcaacgctttaactttgtttctccagatagactaaagatcttatgattttgcttctcaaactttttagttttagttttagtttttgttagcttttttgtgtttattagccttgaggactaatannnttttgtcatttagaccttttagaattttgactcttttgtttggagggataaataatatattatttttattttgtggttgcatctaattttgtttaaattgcctacgtacctttttaagggatcaagtcgttcgtagttctttacaattttttttaggagaaaaaaaattttattttgtgtagctgggcctagttataaactagattccctacgtacctgaagtgggatcaagccttacgtagtttattgcacactcgtcttttttaagtgcgctgtctacaccatgggtaaatacctttttgtttaagtgtagaactttttgatgaacttcccattaaca

SEQ ID NO: 106971 - DNA, 755 bp, Cannabis sativa
gtttgtgtttgatttgggatttctcggctggcttcaagtttctcagagagaaactctctgctagggttttgagcaaaacctagggctgagggaaagtgattgggaaggttctcgatcattttggttttgtgttggacaaaacggagtcattttgactttgctgactttgaaaagtcaggaatacttaaaggtcgaaattgaccttgtttaaaatgattaattgattgtttgtgtagggtagtttggtaaaaagcaccacatttctacaatggtatcagagcttggttaagctggaagattcaacattcaaactaatcaggaaggaagaacaatcaaccaagaaatcaagaaacacaaacaagaatttcaagaacttaaccttgacctaaaaaaatctttaacaaaggatttttgggaacatttctcaaattaaactttataaaaattgcttattatttatctttatctgattttattaaacatgagcaatttaaaggtagacattgacaaatttgatggttctagtgattataggatttggaggagagataaaatcactcctggctcaacaaaaacttttgagggtacttaatgaccctatagaatagccacaagggacaaccaagattcaacaagaagaatacttggaaacaacaattggcatcatgatattcaatttatcagatgccattatcaggttgattgacaaagaagaaacccctgccaagatctggaagaaactggaagaacagttt

SEQ ID NO: 106972 - DNA, 547 bp, Cannabis sativa
aaaacataccttggccttggacatagtgggttcggttgggtgtgggtctccgtcgacgtctccgtcggcgtcttggtgattgtggttttgggtggaaagcaggtaatgggattgataggttggttttggatttgatttgagagagaaaggaggaagagagagatggttgagaataatgagaggggtattttagggtttagggaaaagtaatcctattttttcaatagttataaatattagtttagagaattaatttgggtataaaacatggatagaaattcaaatttccctataaatatttcgtccaaaaaaaaatatattaagtataatacaataattatataaattgatttagtttgaaccgttaaaagatttttaaaactataaccgaatcagagaatttaaaaccgtctaaattgatcaaatcattcacaccagattcatttagtccaatctcaaatagtttgatttaaattgattggaatttaaaacgtattgcaaaatgttaaaaagtttttataaagaatctcaattatttacagatatt

SEQ ID NO: 106973 - DNA, 594 bp, Cannabis sativa
cttagaaaatatatttaaattgaattttttttcttaagaccagcttaaataagaatatttttttttttgaaattgataattaggtagatttttctagatacttagttgtatagattttcttagaaaatatatttatgctgtataacaacttaaaatagaatatttttcaaattatgttgatttatccaagatacttaattaattatttaattaaatttttgaaaattatattttattatttaattcttgagcaacatggcacaatcaatgaatgtaatatatcaaaccagtacagtttcattcacaaaagacccatttcaacaagaaatgaagagacaaaaaactaaaattagttgaagagataagaatttattggatcttaataacagagaaaagtagagaatcactacaaaaagcaattggtaaagaagatcaacatatatattatatatttatatatatgtaaatttaaaataaaaggagaaataaaaactcaaagtagaaaaataaaaaacatttcaattatatatagatattgataaacttactccgtaacaggtcgccggaggtgagagatgttggaaattattttac

SEQ ID NO: 106974 - DNA, 502 bp, Cannabis sativa
ctagaattaacaaaattcactaaatagaatttaaaatagttccaattaaaattacatacaatacaaagttgctcctaaaatcatctcaaaacattacatcaacaacccatccaaattcatcaagaaaaacttaaatgaaaaagagagagagaaaattacccaatggaccgcaccactctctctctctctctaaaacttgaaaaaaaaacaaaagatttaaggcaaaccaattttttcaagtcattattcatctttcacagaactattgtttctaaataaaaaatgcttgcaccagatctgaaagtgtcatcacccacttcatcatcttcgtcttcgtcttcgtcttcgtctttgtcttcgtcacccacagatctccgtcgaagcttgcctagtcgcagatcttcattcgagagggaggaatcgaggggaagagaccgtcgtcgaacttgctctcagtcgcagatcttcattaatgccggcaagagagaaatcgaaaggggat

SEQ ID NO: 106975 - DNA, 562 bp, Cannabis sativa
aatggattttatgggtctttgaatttgctccccaccaaaacctagcaatcatgctttctatatcatggagaatgcctttagaaatacggaagcaactcatgacatagcaaggtaaagcttgaatcacggccttgattaagatctccttacccgcttgagagaaaagccccattttccacccttgaagtttagcttccacccgatcacggatctttccaaaaacttcctttttattttttcccacaaatgtcggcatgcctaaatactttgtatgattcttcacaaggtgaattccaaggaaggcagccaatgaaattgccatgtcgtctttaattttccttcccacacaaagatcagatttgtctagattgatagtctgacccgagagtgatgcataacaatccaacacctcttttagggctttactttcctcgaagttggcattcaaaaagactaggctatcgtccgcaaaaaggagatgggatagattatgctccatgctaccaaagcgcagcccatgtaatttcccgactctctccgtctcatgcaataaacaagttaa

SEQ ID NO: 106976 - DNA, 551 bp, Cannabis sativa
tatatatatatatatatgatttcaaaatctttgtaatcactgaattttatttgtagtcgcatcactgtctctaatctctatcatcatcattattctttgaaataaatttactctatacataaagctaatcaaacaataagttaactactcacttttataaatgagcgaatttgtaaaatataccaaaaaaagttcatcaaattaataacgagaaaacaaataaagttatatctaattagatttaaattcaaatgatatatgttttgaacttttttaatttcttatatataattatttactttaagagatatcttcaaactttataataaaaaaaatattagaaaagaaattgataaatatatagaaaactcattttatgattttaaagttcttgtcatcatcgtatcttacttgtagttgtaattatattcaaagtcattgtgttattattatatgtcatttatagttatcactgattcactatatcattctcaataaatttgctctatgtacatagagcataattataataatgaaatagagatgaagag

SEQ ID NO: 106977 - DNA, 1321 bp, Cannabis sativa
  modified_base (912)..(918): a, c, t, g, unknown or other
tatactatcattttcaaaagaactacaagtacacacattaatcgtcttcttcaagataatggtggtttgaatagagaccccaaaagtccaatacgattgcctttttaatttggtatgtgtcttaactaataagatgactttttcttttaataacaatgacattacaatacaataggaatacttgtatataatgtctattttattaataaaaatatatatatttggttctaacttggtgcagttatcaataacagctcagtacaattacaaataaaaataattttttaaattatagaaatgttaaaaagaaattacaaatccttcaaattaattgagatgactagctcaaaatataaatagaataacctaacgaaaatttaaattgagcccagttgattatttggatttggaattattttagaaatacatttaaataacaaaaaaattataatttatggttgtacggatttttaatatttttacattatttaattaaaaatatcgtattttacatgttttcatgatattttatatattgtattcttgttattttgttgttagtttttgttattttatattatttagatgttattttccgatcatgtaatttttttattgtttttataaaactctataaaaatgtaaaaaaatagtactttatgtaaattttttgatattatttcaacctccaatataactcaaataaactaatttataacttttaatatatataatatatattatataaattatgtttaatgtttaaattattttatttaaactttagactttacaaattaatggtggttgatttaaattttatagttgttgatttttattgtttttggatattaataaagttaaaactttagaatttagagtaccacatattatcattattattattattannnnnnntattattattattattatctttctgttttaaaatactcactaaaatattatacactgtcataacgtagcaatatatttctaacaaattacatttatttaatgggaccactatttagaaaaatagtatcatcttgtgtaatattttgtgtatattttaactgcacgcgtatacatttataatatttagttattaatttacaagtatgtatgagagtaattattctaagttaaatctgctattaaaaattttaaaaaaaaattatatttttcaatgtattagctagtagcctagtaagatttttattactagcaaataactctcttcagttatatattattagactacaataaaattaatatcaaaacaattattacacgtaggtttaatatataaaaaacaatg

SEQ ID NO: 106978 - DNA, 640 bp, Cannabis sativa
tcatcctgcaagacccaacattccagagtagtgtgaccaatatctttatggtacttacagaatttcttggggtctctcttgtcacggtttcccctaatcgagggcggcttcttgaagactccgttcctttcctcaattgcgtagatatggtctcgtgtcaccgcgagttcggtatagttcacgaagcgtggtccacctttcctttttggcgaagactccttctttggaggagatttggccaacttcgggcttcgctgtcttcgtgggctgcgtcttctcggaattcgacctctggaattcttccctcgaggactgcgagatcgcgatcgcggtactggcgacttctgcttgtccttccctttttccacctctgttagagaattcttaattcacttatgaggttcaaccatagcgaagaactcgactagcgattctggtcttcgagcttgtaactccttccaaaaatcggttcttggcaggacacctgttattaacatacaaacaagcgaagactcgggggccttctcgactttcgttacttccccattaaatcgtttaaaatagtcttgtaaagactcaccgggttcttgtttgatgttagccagagtagtatagggagacctataagtcatcgtggcct

SEQ ID NO: 106979 - DNA, 571 bp, Cannabis sativa
  modified_base (349)..(365): a, c, t, g, unknown or other
tgataatatattattgtaattgagatttattaagttatttttgtaattattttatattttacgtatatttttgaaaaaatcccataatataagggatgcaaataccgtaaattaaatttggagaaattttgatattattttttacttgagaaatatgtaatgagattcttaataaataataggatggataatttgtgccataaatatataagtaataaatatttaagtttaatttttgacggtaataatacttaaattatatttttagaactttcgtaagtacttgacgttaagtctcaagttaatgaccatatggcagtctttaattggtcaaagtcattaaattttnnnnnnnnnnnnnnnnnattaatttaaatatactaataagataatgacacgtgaataataacttaacacatacaaaagttccgaaaatatatcttaactattattactgtaaaaattaaacttaaatttttttatgaataatccaagagtaatttgcagcataaatacctaagttttatgccgagtagcagataaatatctaagtcgtatttttggcggtaaa

SEQ ID NO: 106980 - DNA, 1529 bp, Cannabis sativa
gtttttattattacccattgatatatagttgctaaaaaatttaactacaaatattaattttaaaaatattaaattattatattttaatccgataataaataatataaaataaatttgagtttcatgcttaattaaaaaaatatcgatttttaaaatatatttatataaaaaacattaaagtcaaactcaatttttttttttatttctttattttttttttctatataacaatctcagccaatataatataatttttttttattagataaaaaaaatgaaatataaaaattcaaattttcttaatatgggtataataccattaaaagtacatgggttgtggttgttttaggcctcatataccttaggactgaccctatatatagatacacctttaatgggtattactcatgaatggatactaattaatagaaaaatttaaatttttatacttaatttatctatttaatttaaaataacactcatttttatatgaactagggttgtttgacaaaaaaataaataaataaatttgaatttgacttaaatattttttatataaatatatttttgagataatataaatttcttatatattattttattatataattaaagtaagcatagaaattcaatttttttaagaatttaaatttctcttttatctcttttattatttgctattggagctattggatcaaaatttaatagtttaatatttttgaaattaatatttatatttaaatttatttagtaaccatcaataataggtaatactcattgagaaatgtttaatatatattcaacattttaaattttaaattttaaattttttattaatattaatgaatagtcttctttccacatttagctagctatttctatatatacacacaatgacatgttagtgtaaaattgggagaaacatcaccatctagacagggaggatacctttcttctttttgtgtagtgttacattatatatttatataataatatattatattttgtataataatatcttcttttgttaattaattaattacttcaacttttgtagggacaagtagtacttattaattataataaataaagacttgttataaaaggaatggtaattatatacagtaatgtagttgaactttttcctaatttataagggaattcaacagtactatttatttatatgtaatatatataagtctatatatttatgtatatatgcatgacccactagtctacacttgaataaatgatcaaaaatagtttaataaactattaataatgataagaagaataattgaagatctgtttaatttttatagggtacatatatattccaatctaatgcctatatgatggaaattatataaatggaatggaattaattattttaattaatttatataatttatataaatagtttgtatttgagagccacatatatataaatgagatagggcacattccatttcactctcaaatttttattcaaatgataaaataatatgttttaataaacccattcaaaa

SEQ ID NO: 106981 - DNA, 555 bp, Cannabis sativa
agagaattcactatttggtatgttcagagatcagattgacaaagggaattacaaaggatttcaaaattttattgagggagtttaaatttatttaagtcaattatatttgtaattattgtgactttactaattgattttattctctgagtatgactccgtaaactaacagtatttgaaagaatactaatatatgtataattctcttatgtcaagtgttaaattttgtacaatttatttatgtttctatcttgttactggaagttcgtgttctacagtctcttatattaagtgttaaattttgtacaatttatttatatttttatcttgttaatggaagttcgtgtagcaaatttttaatagttattgcaagtcattataattaaattttaattatagttattgaaaaaataaattattttatataaaaatatcattttcataattaatattccaccttttaatttttaattgaatgtaaagaattacttgataatcttaaaaagaaggttaattagaatttttacctcctaaacattaacatgtactaaattacgc

SEQ ID NO: 106982 - DNA, 564 bp, Cannabis sativa
gttccacctgaacagatccaggtccgatctcaatgttgctacctgcatggtcagtttcttttgtacctgcactagggttagttgtaataggcaaacatggaaaaatatcttctttaaatattacatccctgctatttattgttttaaaacctctttgttcccaaacccaaagcctataagccttaactccctctggataccctagaaaaacacatttcatagccctaggttccaattttccaacactttggtgtgcatatgctgcacaaccaaatactgtaagattagataagccaggaggtttaccagaccatttttcttctccccaaaatccttgggataaccctgattgtaacagcaagcatctcactttgttgataattgctctgttcattctctctgcaactccattctgttgggctgttatccttaccgttctgtgcctctgtatgccattttctttgcaataatggttaaactcctcattacaaaattctaatccattgtcagtccttagagtttttaatttttcatttgtcaaattttcaacaagtgttttccact

SEQ ID NO: 106983 - DNA, 537 bp, Cannabis sativa
gtttgaagaaaagttttacaacgttgctgtgagaacttcacatatggaagactttgtgaagcttacccaggggaagatgtctgtggccgagtatactctggaatttgatcacttgtcgaaatttgctagtgatctggtgcctacagatttcaccagaaaacagaagtatgtgagaggactgaatgccacaatcagtcgggacttgaagattaccacttcacatgacactctctataagaaagtggtagagctagccttgattgctgaggaggctgagcaacatgttgcaaaagagcagactgtaaaggatgccgtcacggcattgaatcctcctgctagttgtaatgtcagtaaggggaccgacagtggcaaccctgatcacaaatggaaggctgaggcttccggagtatcaggaggtaacagaatgttttgggaaaacagaggtggtcgtgagggtcacgggtccttattccgatcaaataccgagtgtcctaaatgcaagaaacaccatcctagtgagtgtcgagccaaggcatg

SEQ ID NO: 106984 - DNA, 708 bp, Cannabis sativa
tttgtatagacttcaccaatttaaacaaagtctgcccacaagattgtttccctttgccaaggatcgaccagatggtggacgccacctccgggttcaagctactgtccttcatggacgcgtacgctggttacaaccagattaagatgcatgtagcggatcaagagtgcactagcttcatgaccgataagggggtatacttctacctagtcttgcttttcggactgaagaatgctggtgcaacttatcaaaggatggtgaaccggatgttcaaaggcctcctagggcaaaatatgaaggtatacgtggacgacatgctagtcaagtcaaaagcgtgcactagccacgcagacgacctagaagaatgcttcgaagtagtccggagatacggaatgaaactcaacccaaagaagtgcacctttggggttaagtcagaaaagtttctgggcttcatcttcagtcagaggggaattgaggcaaatccagaaaaaattcaagctctcctgaacatgccttccccaaagaaacacaaagatgtccagagtctaaccggaaaggttgctgccctgagccattttatctcccgatccacagacaaatgcactcccttcttcaacatttttgaagaagtgttagaaattcgaatggtccgacgaatgcgaagaggcattcaaaaagctaaaagagcacatggccaagccaccaatccta

SEQ ID NO: 106985 - DNA, 584 bp, Cannabis sativa
ctgttgttgatcatgctcctgttaaccttaatcttcctactaggaatgttttggataacattatctctttcccatcatttctggctgttactggtaattctgggtctggttttctcagtcctcatacttcttctactgtcatgatgcctactcctcttaatcctaatagtggtcatgcttttcatactggtcttaatccttttggctgccaccctttgaggccttcagcattcacctcttattccactgactctttggtagttgctaccactgttggcactactgttatgcattctggtgatatgagtatctcgactactcctgctgctgaggttgtctcggctagtccagttgagactgttgggactcatgctgaagttggccaacctgactcgctggttcgtggaaaagggctggcttctgcttcgggagttaaacgcccatctttccatcctcagcaggtggttgttggtggttctgttaggtctcaattgaaaagagctcgagctggggatagagaggaggaatcttcatctgcttcaacggacatggaacaggcgggtggtgcgttgcacacccgccca

SEQ ID NO: 106986 - DNA, 828 bp, Cannabis sativa
ttggtggttcctggatgcaatgagtaaggggtagtatgagcttcatccaaaatttctttcttaagctcagacttatcagggatacacaatcgtgctttaaatagcaacattccactgtcagagatcgaaaggtccttagctttgcctgctaagacatcctctcgaatcttagacagttcaggatcttctaattgagccactttgattctttccaacaagtctgattgaagtgccagattatgaaatttcccaatcacaaactcaatatttgccctggacatgtccgaggctaactgaggagaaatcattaccatattgaatatctgatcaggtccttttcagcttagggtatctgccacaacatttgcttttccaggatgatacaggatttcaaagtcatagtccttcactagctctaaccatctcctttgtctcatgttcaaatccttctgagtgaaaaagtatttgagacttttgtggtcagtatagatctcacatctttcaccatacaagtagtgtcgccaaattttcaaggcaaacaccactgctgcaagttccagatcgtgagttgggtaatgctgctcataatctttcaattgtcgagaagcgtaagctatgactttatctgcttgcattagcacacagcccaaaccctaccttgatgcatcgcaatacaccacaaacttctcttgatcagatgacaaggctaaaacaggagttgtaaccagtcgttgcttcagctcttggaaacttttctcacacttatctgaccatataaaccgctggttcttcctagttaactcggataacggcattgcaatcttggaa

SEQ ID NO: 106987 - DNA, 530 bp, Cannabis sativa
agtcttgttccgcaataccttttccttcttgtccagaatctatactggttgttcttcatatgacaggtcggtttgaagcgcgatatcttcataactttgtacatgagttgtatcgaatacgtatttctgaagcatcaagacatgaaacacattatgaaccccagatagagtagtaggtaaagccaaccgataagctacctgacctactctctcgagaatctcgaacagaccaataaacctgggactcaactttcccctcttcccaaacctctgaattcccttcattgaggatacctgaaggaaaataaaatctcctatctggaattcaacatctctacgctttggatctgcgtagcttttctatctactctgggaagcaagcatttgagctcgaatcttttcaatagcctcactcgttcgttggacaacttcaagtctaagatacctacattcaccagcttcatccttgtgaatgggtaaacgacacttccttccataaagcatctcatacggagccatgccaatggtac

SEQ ID NO: 106988 - DNA, 570 bp, Cannabis sativa
  modified_base (79)..(82): a, c, t, g, unknown or other
  modified_base (271)..(274): a, c, t, g, unknown or other
attttttataactaaaattatatattaaattctcatttgattgaaaattgctaaagggcaccactggtgcctagcaccnnnntacgtgtcaatatcgctattgatgcaattaagtatcgggtctcatatagtttaatataataatttttatggagtatcgctaaccaattgtaagacgacacatctagaaagtgctaggcaccactggtgcccaataacaattctcatttgattgagaattgctaaagggcaccactggtgcctagcaccnnnntacgtgtcaatatcgctattggtgcaattaagtatcaggtcccatatagtttaatataataatttttatggagtatcactaaccaattgtaagacgacacatctagaaggtgctaggcaccactggtgcccaatagcaattctctagatttcatgaaattgaatgtgctagtattaatttctaattaagatcgaaatcaactttaattataattaattaaggtaactagatctatatttaaggaagtttatgatattcttattattataatcaataataattatataagtgattat

SEQ ID NO: 106989 - DNA, 734 bp, Cannabis sativa
atgttgaagtggtaagatttttttggtttgaacaagttttgaatacgaagttatgatctgaaatggggttagcataaggtaataaataataaagtgttacaaagaagaatgtgatttgaagaacaatgaatggtttcgaatatgttggttccatgtcgatatctgtagtattgggtgttttgttgttattggttcggctttttctatatgtggttctgagtgtaatatttcgaccaatataaataaagcagtgatctcttacttgtttggttgagtgagtacttttctcttctgggttgcttagaaaaactaaggcttagagttatttttcaactctaactctatctaacattgaagaatatatttatatttatatatactaggtgagtttacaagtgtaattgcaagtatgtaactcttagtttgatttttcatttcaattttcattttataattaattgtgatcaaataagatttaattttttaaataagtataaattgtaaaatatatattatattatacagtagtaattataaattaactaaaattcagcattttaactaagtgtcctatataagatgttattattttttttttttgaacacaagatgctcattatttaaatatatattttatatactatttacattatttgtacataatttatatattggtttatattattttgtaaatgctttaagcaccattgacaatatttgaggtgcttgactca

SEQ ID NO: 106990 - DNA, 981 bp, Cannabis sativa
  modified_base (163)..(164): a, c, t, g, unknown or other
gtggttatgaaacacacagctatagctattcctccacaacaactttcctgatcattatctaaaaagcttttgatttgaatctgtccttgcaaagattactaagaaaaggattggtatcttgcctggactgacactaaggacaattaattattattattattannattattattattattatggtagaaactaactagatccttctgtacttgttttctgggtttctactttttagttgaagaagctcatggtcaaaaaatatttacaaaaatagctatttttaagttaacattcctattatagcctctattttgatttatagttttatttatttatttatttatttatttttttgatgtaatagttataactttttgtgtgtgttttttttttatttgatttaagcgtttacatattacaataatgcataatcttgaactcgaactcagaacttccaacacatacgcaccctctatggctacttaagtcagtttcaagtggttaaaattttttgtgttgtttctaagcaaaattattttcttttattttaaatataaaaaactttatttgtttttcttgtttctatgagaacgtgtcgggaaacatgaaagaatgtgaaaatattaatgtggccagaatctaagttttatttgcttaggcacttaaaaaggaaaaaaataaaactggtaaacttttgattttttttttgtttggtaaaagtacttccaaacataagcgaacctacgggtgttgagggagggctaaaacctaccttgagatttgaaaatatattagggtaaatagcagcagtacttaaaatttaagttttgtaagtgacataaacctaatgtttatttttagtggcataaataccaaatatttgtaagtagaatttttctctaatttttttagtacaatctctgtgttaatatactgctaaaaataaatattgactttatgccgcttacaaacttaaaattt

SEQ ID NO: 106991 - DNA, 500 bp, Cannabis sativa
taccagttgagattggggaaggttccctacgaagagatgttttcaacattgaacagaatgatgaaaagcagtcgctttacctcgaccttctagaagaaaggcacgatcaggctcacttaaaaaaatgtggcttatcagcggcgaactgcaagatacttcaactctaaggtcaaggaaagagttttgcgagtaggagacttggttcttcgaaaaataatgccaaacacgaagaacctagcgtagaaaaggttggcaacgcaatataccgactcgcagaacttgatggtactgcaatttgaagagcctcgaatggcgagagcttaaaattttattatcaatagtactcgcactatatcgtttgtactcgctatatatttatacttagtcatttttacataaaaattctaagtataacgggtgtataccactatgtactattgatcaataatgaaatttttttgagattttgaaatttctctaccttaatgcttattacacca

SEQ ID NO: 106992 - DNA, 879 bp, Cannabis sativa
ggaattccagttcctacaggccattctgaaccggaattccggttcagtgcaggaaaccttaaaaaattcatttctcatgcaattcaactccaaaacttaccaaactctccagacctactatttagaccccaaagaacatattccaagcaataaaacaaagcttcatgcacaaatacaaaaatttccattgatgagtcaagcttgagttcaaaaactcaaagcttgctcatccaactaattagctatcaaaacctgtttaattcaccatatataaccataatataactccagaaaacaaacgcaaacacaaaccacaaccacaacagctaattcaacattttaccataaaaatcctaagttttgagttcaaaactccacactttgataaaaccaactaacatgcatcaaaacctactctaatccactcaattgaacacatttaaactacagaaaacatcacataaatacagcagcaacaacaaccaaataaccaagcatgcaaactatcatatttttcttacaactcaagaaaacacaaagagagttggtagagataaaaccttggcttgaattacacaaagagctgctggaaactaaggattgagagagaaaaaatcaacagccctagctgccctaaaggtggccgaaagagagagagcctgagagagaaagagggattttgaaattttcctttttccttaatttttgataaaatgaaatgataaattgacatattcaatacttatttcagctaacatgattgaaactaaatcaaataattacatcatactaagtccactaaaggacaaaagcttatggggcaaaatgacattttgcccctcccacacaaaaggattaaaaagcactaaaggggtattt

SEQ ID NO: 106993 - DNA, 1469 bp, Cannabis sativa
gattagattaggctttcattctacacagagagttttatgttattttatataatttgtttttaaagtattttttttttttgtaatttctcttctcttctatttattactatttgaatgtttttgaatattttattatgatactcatattttttcccaattaatttctatcacggtattattatattctagctttcctataataatctaataaataattactattttcttccctttttttttcatcctctaatacatttggcaatattttcttagcggcttatatgccctatatgttttataggatgttttgttaaccattgcttgaaagattttttagcgtaaatatctcaaactaatttattgattattttactagttttccataaatagggcaaaaaaactatattaaaggtttttaaagtgtttccttattatggtctatgtatataagaggcgcttaactattacttttttatttatctatttttgttgacggtaagaactcgtcactatgttaaggccaaaaactcattgttcatgtgaaagtaagtaaactattgagaatgattagctaataaattaaaagttaatcttgaatgacaaaatggagatgagttattgaatccaaatattgtgtttacaatgtatttacaatcccttctcttaaggaaggaagctctatttattgaggcactattggccttggtatacatgctcctaaaagaaaaaaaaatactcccagatttgtacctaccaaatcaatgttataggtgggtagtggaggtagtagtggtcgggtgtcagttcgtactgacacctatagatttagtctccactgtcctttgtacatctactacttgctcaggttttgcagaagtgtggaggctattttagatggttcccaccatgtgtattgtacatggtgtctcacaccttgctccttcatgccttttactctcgcacaatgtgtctcgagatttgttacatagtgatttgtattgaccttactatagggtttgtggtgagaggtcaataatggttctcgtatcaaacatttttgaaatggaccccgtatgagcgagtgaatgtgggtagcgagtgacaccttgtgaggggcccctcacttgatggttgtggggtctgacaaagggggaatctcgtggctgagagggaggtagcgagggaaagccttactcggtgaggtgggtgcatgagggagttccctcacgggcatggtggagggcaataatggggagccctagcaagtgagatggagggaagcgagagggttccctgacaggcgagagggaggtcagggagggggagccctcacaagtgaataagggtgtcagtctttatccctgtgttggtgtgagcatggcagtcttatctttgaaatttcttgtttatcttaatggctctaaagcatttttggttcatagtctttcgtggtgttaatttctaatatc

SEQ ID NO: 106994 - DNA, 1083 bp, Cannabis sativa
tagtttcatccaactaacggaagcgagactcacaaccctggcaagttagcagatttctttatatccgcgatcgacgtgagacacatcttgtcgatcttggaaagaagagtggttccatctcgccattgggatcactactatcaagtttctgtcgagacatctccagaatcgataattaaaggcgtgtttaatacacgttatttctgacccagtaaaagcaggaaaatcacagctgtatgactttcaaaatcatgcaaagcgtttacattttgtaatatgtaataagatcccacgatttaagggataataactgtaattacatcttggtcagccttgtaattaattgccactatgcaattataaataatggcagacaatctcaaaaaagggacagaaaaactcttatacaagaggccctaagaaaaacactcagaaataagattgatttgtggactatgcagaattttaactgcaaaaccacgtaaaaaactcagtgttcatatttttatttttctatagtttttattatttctgtgttgaatcataatcgtgaggctcaaatttggttaacgaaaatttgcgttaacaatttggtgctctcattgagagcctctgtgaaaaaactcataaaaagccttcccttcttttaaagaaaaaccttctcctttatggctaaaaatatagagaatattaacaccccacatgaggaaactaattgtcgttctggaaaagagcctatgggctctagaagatcaactaatccgctgtccagaaggaccacccattccaggagggcccaacttgaggatggtcccagtgctcaaaccacaagtccccggagaactcaacccaacgttggtcctagtacgcggacaacacgctcgaggagaacttagcgtgggaatggtcagaatcctgagacgatggatgaagagctcaatcgtggaggtgcccaatctgtgaaagaaagaacttatgaaatggagagtcgccgcttgagacgccatctggaagaggtgcaacatcaaaacgctgagttagaacgagaggcagcctcggccagggcagcgcaggggacgaacg

SEQ ID NO: 106995 - DNA, 862 bp, Cannabis sativa
  modified_base (502)..(503): a, c, t, g, unknown or other
ttatatagaatagatatactaggttgaagttacgtgcaatgcacgttattgcacgtatgtctagttattttaaatgattataatgtttttttaactattaaataaataatattattttttaataattgtaaactttttaatataaagtataaagtaaaaacatgacagtaatttgaaaaaataaataaatcgaataaagtccaaaaaaaaaaatgagaaatttttaatataatagttagtacctaaaggaaggtaatttggaaaaatgtgattttgaaattataaaaattaaagtaaatttaattattttaaagtacttaatttatccacgataaaaaaaattaaacagtttcaattaattttttttattttagaaaagtaataatggatgggggtgtaaaaaattttcaataggtgatatgacatatgtctatatagatcttgggagatatatttttgttagcaagttttaattttgaaaaattgagaatttaattaaaannatgattaatttaaaaaattaattagatcagtatgatttgaaaaagttgggatgctcacttccataaaattggaattttccatgagaaaagaaaaaagtgttaacattgaaaggtggcgcatgagtaaaacatactgagatgaaactgttaaatataaaccttgtatttttgttttactttggcttcagaccttgactactcatccaaagtattgtatacatataaaatatgatacaaatacagttcttaatttccttatgtagatcccaaaatcatattgagtatttactgaggttcttttttttttttttgaatggaaaaaagaaattgaaatgcatgtactgaaacaaatttacaaa

SEQ ID NO: 106996 - DNA, 897 bp, Cannabis sativa
taaaaaattaccaaaaaaaaaaaattataataatatggttgtataaatcttaaatattttttaaatacagcttttttatgttatcatgttatttttatggtatacttatgttattttattgttggttttttattatttgtataatatttatatattgatttcatatagtttttttgttgttttcgtattatttttattgaataccgtaaaaatatataaatatatttatttgaacgtaaaagtcagagtctctttttagaccttacttgtttttttgttgttttcgtattgtttttacattttgaatactttccataaggtagagtctttctctagacttgtaagtgagaattctcccttagctcattgttttgtaatcttgtgagaaataaaagcttgaagtaaaggtatcaccatttatcgtcacgactaggggtgtgcataaattgatcaaatccaatgagaattgatcgattcaattacaatcgaccgccaaacattggatatctaactgtgatcgatcgattggaaaatctacatttggatcggaagagatggtaaatgtggtgtccgaaaattcaatatatccaacatctaatcgaactaattagtattttcatttattttggatgagtaattaaattttatattgttataaattaacattaaaattttataaaatttttcttaggttggatggatccagtctaaaatattagattaaactaaattaatcaataaatgtatatgaaatacaatgaatgttggatcgattggatgactgaaatgaattggattagactagatgttaaaatttaacatctaacatataattagagttgatctggataagtctaaaaatattgaatcaacaatttttacaaaatataagatcaa

SEQ ID NO: 106997 - DNA, 660 bp, Cannabis sativa
aacactctcacggctgcagaaatcgtgaaccagttaactgaactgttcgcgatggcatcgattcaagcttgctttgaagagactaagaatttcatcaatgcacggatgaaacctcatcagagtgtgcgtgatcaccttctctagatgactagttacttctaggaagctgagaaccatggaactgttatagatcagacaactcaagcgagtttgatcttgaacagtctgactccagcctttctgcccttcacttcaaattatgtcatgaacaagttggagcttgactttcacgagttaatcaacaaccttcagacatttgaaaacttgattggaggaccacagaaaggaggagctaaagctcctaattctgggactgctaatagtgcggctaagactgaggcaaacattgcctctacttcaaaacccaacaacaagaagaagtggaaaaatatcaagaagcctgttcaagctgtgaaaatagttaaaaggaaaaaggctgctaatctgatggaaagccaaaaggaaaatgtttctattggaatgaaaagggtcactgaaaaccccaataccctaagtttcaagcaaagaaacaaggtatttctttctatgctataaactcatgtgttttagagaataattatccccttgggttattaattc

SEQ ID NO: 106998 - DNA, 783 bp, Cannabis sativa
  modified_base (236)..(253): a, c, t, g, unknown or other
  modified_base (722)..(724): a, c, t, g, unknown or other
ttataaaaattagttatgaaaaatgtcttattaaatattttaattaaaaaattaatttattttaagtatataattaatttgagtctaaaaatggaatttttatctgttagtaacctgttataacaggtcataaaaaaatgtaacaatcatagttacatttttaatgtaactatttaatagtcaccaatctgtataaatatatatatatataaaagaattacctcatatattatttnnnnnnnnnnnnnnnnnnaatttacggtttggatttctaaagtggttagcgctagttgcaataggagtttctatacgattttttgttgcaatttaggttgaagcgctagttgcaatagtagtttctatgtagaatttcgtaaaaataaaaaaaaaatgtttaaaagtataaaaatgaaaaagctcaaaaaaaaaaaaactgcttttaaatataaaaataaaaaaaactcttatatttataagaccacacattatataattaatagaaggagataatttggcgtgcgcggaatgactttgtttggcaaaagaagtgttgggttgcttcaaatattgtaacatcagctagaatcatgcttgatcaatacaaatttgctcagggaaggaagggcctttcattgtctcctttgtttgatggggggcggaactgtgagcgttggactgcacttgtgttacacaagattaaagttaatgttgatggagctttnnntgaacaagaggggcggtttggagtgggctgtgtagctcgagatcatcatggaaccatgg

SEQ ID NO: 106999 - DNA, 722 bp, Cannabis sativa
tagtttcttataataaaaaaaaaaattggcagtgtatgaaattggtgaggcttctttaaggcttttagcttgtttcttttgctcttgaatgtgttgatgacatagatattatactcttcatttttagattttcgaattttggattggcctcttgtttaatttctagatcgatcattattgtcaaaaaatatggttggtttgctatgatattttattttaattgtttgaataatagaattatcattacttaatttttaggtgatgaatgtgttatttattatatgttcattggttgaatagatagggagttttgaatcttgacgcagtagcaaattaaagtactaggagtaaaataaggatattatctattaatatttataatttttatacatataactctaattaaaaaaaaaaataatgacaaaagtatatattattttacaattttgttacaattgtacatttttttagccattaaatattaaattagaaacacataacgatatattattagactttgtattaaataagctaaaaaatatatcgtcatgtgtttttaaacggtcaatgagcttaattgacatttactaattaaaaatgggtataattacaacaaaatcgtaaaataaaatatttttattgttattttttttattaaattatatgtataacaattataaatattaaaaaaaaattcattttaaatatctgcacaaattata

SEQ ID NO: 107000 - DNA, 606 bp, Cannabis sativa
aatatctagttattatttttttttaaaaaaaagccactatatataataccacctcaccttttttttcttccacgttctaaaatcgtacgttattattattattaataataatatatctatatatctatatgaggcagtgagatgacgctctaaaatcatagccatcatcaatatatctatatatttacataagccaaataatagtgagttagtgagatatggtgatgataacaaatgatatacaatgatgagtataagagtgttatatgaactatgtcggacttccattataaaaaaaaaagaaattttgtacttacatgtcaagctgacccgtttgtaaacccaacttctcatattattcaaataaaaattatatgaaaattagtaatgttaaagttttttaaacatccgccacgaagcgcgagttgtttactagttatagcataaaacctaaatctacactatttcttctcccttcggtgtttcttgtttacaacaaatcaatatatctatattttttttatatatataaagttgagaaataagagtcacacgtcacttaatttactttagagttatttttctcatatctctttatatatatat

SEQ ID NO: 107001 - DNA, 819 bp, Cannabis sativa
  modified_base (238)..(238): a, c, t, g, unknown or other
cgatactgttggaaaacttgattcagaagcctcaggatcaaagagaaaacatgattccaaaaggctgcccaaggataagaagcccaacaagtatatctctctttatgctgaatatttcgagctcaatgaaactcgaaaaaaaatatacctcgcacatgtacaagaagctgtttttggcgagccaatacctatgaaacatgcgaggcacaagagggatccaaataagcggtgtgaatancatggggatattggtcataccacgaaagagtgtcctcagttgaaagatgagatagaaggtctcatattgcaaggacacattcaacgatatataaaggggcaagaagatgcctattatcagctcgatctgcccaataacttgagcgacccaagattataaccctcctccgtaagaggaagggacaccttggttatctcgagagggagcgggtcataagaatacaagggacagttactccgttgaagcaattttgtaaaagaattgcgacgtgagtagatatcggcctactgtggttgtcgtatcaagctgccacgtggaaagctggatgtcaaccagtagcactcgaagacaaacaactaaaaccaggactacttctcctggaaccccaggatatgtcatggattgaccttggatattgaaaaaattgagggatatgtcagggattgaccatgaacatcaaaacccgctttatcaaaaccaggtgctcctggaagattgataaaataaacagttgaactggggaagttctcatgagattaatgattgtaaatcacatagctgatgaaatactttgaacttca

SEQ ID NO: 107002 - DNA, 774 bp, Cannabis sativa
aaaagactgaagatttagtaaaatttacttgttgccccgaagcaagttcataactattgagaagacgaatcacattttgagcctcatagtcatttgctttgcagaaaacatagctatcatcagcaaatagcatatgggaaaccataggagcacctctagctacacggcattatagcaaatgtttttagatatactatatatgcatgcagtccgagagtaaactaatacttctatttatagatgctactatgatacctaaattaccattataccctctatattggtggcctcgtaattagttaagatttgaagaatattttgcggtataaatactaatttaactcctaattgtaaataaatacttaaattttagaacttctataagtacatgactgttaaataaattgtcacgtgacaattcttgattggtccaaatcattaactttttatttattttttttaaataaattaatttaaatatatgaaaataacatatagataatgacttaacatttaacggtcatacagagttctaaaaatataatttaagtattatttcgccaaaaattaaacttagtcatttatttgcaactgaaagtttaatttagttatttataccataaattactcaacagtactaatataattaaaacaaattaagtattagtaatttagtaatgtctaacactatctaaaaatgttatatccttcttgaagtaataatttattttagtaactatcataaaatacaataatatcatgcaccactaatat

SEQ ID NO: 107003 - DNA, 532 bp, Cannabis sativa
cgaagtcagccattgacttagctgctacaggggcggttcccaaggtaatcgggagtttaatcatccctttcagtgcaatgacgtcgccggcaaaatcgtatatactcgacgttacaggtcgcagatccttctcatgcaaccacatttgcttaaaggcttggaagttcaaaagatttactgaacttccgttgtccacaagtatacgatggacgttgtctccaccaatattggcgacaatgaccagtgcgttggaatgcgggtgatggacccatctcgcatcactctccatgaatgtgatgtcgtcgcattctcttttaaataacttctctggccgctcactaagattgtttacgttggtgagcgacttctctttagcttcctttgcatatcgatcctgtgacttccgggagtctcctgcgatatggggccctcctatgatggttaatatattgcgaggtgttctcgaaccactcgcgttctgattttcctctttgtcatccgctcggggatgaccttcctcgttccttttata

SEQ ID NO: 107004 - DNA, 791 bp, Cannabis sativa
gtttggcgctttcattgagagcctctgtgaaaaaactcagaaaagccttcccctctttcaaagagaaaaaccttctcgtttatggccgaaaacccaaagaatattaacaccccacatgaggaaactaactgttgttctggaaaagagcctatgggctctagaagatcaactaatctgccgtccagaaggactacccgttccaagagggcccaaccagaggatggtcccaatgctcggaccacacgtcctcagagaactcaacccgacgttggtcctagtacaaggacaacatgctcaaggagaactcagcgtgggaatggtcagaatcccaaggcgggggatgaggagctcaattgtaggggtgcacaatctatgggagaaagaacttatgaaaaggaaagccgccgcctgagatgtcgtctggaagaggcgcaacgtcaaaacgctgagttagagcgagaggcagcctcgagcagggcagcacaggggaggaattctcaaaatcaacctgaacttggagtgagaagactgcgagggagcctcgagcagggcagcacaggggaggaatgctcaaaatcaacctgaacttggagtgagaagactgcgaggcagacctcgtggctcacgaaccaggagacaggaaaaggcccgagaaaaacaacctggggaaaatgagacaccccttgaaaatcaggatgaacagccagaaaggagacagccaaaaactaatgaacgagaaatccctcatgaaaatgaggaagatctcagcctgctaggaatcaccagccttg

SEQ ID NO: 107005 - DNA, 920 bp, Cannabis sativa
aatgaaagaatatacttttttcattttaagaaagaaaacaataatactaataataatatagacaattccattccatgtaacacactcatcacacacatgacagtatatatactgagcaattcttttcccgtgtgtaaaggggaatacaattttctaatagcctttaattacctaacgagaagaaaaggaacactaaactgcaacagattttattttatcttttccagtattaattaaacaaatatcaacataaaataaaatctctttgagaagtaaggataacacaaagaagtgagtaaggttgaagatcaaaaaagaaaaaagaaagaaatagaaaaacacgagtccaattgtccaaaatagtaaaacagtacggaaacatagtgggacccaaaagcctgacacttaaaatccctttgcgagaaattagttgggacctacaacaacaccagctcagcacagcacaggcgaaaaatcaatataaaaatataaaaaaaaagagcgtggaatgtaaacgccaagagtgagcgcgtgaataaaaagtgtggggtgtgtataatgtttatatgagagtgtgagctgtgggggtgagtactgggtcccaccacccatgtgccctcctcctgtctccaccagctcctgccgctcaatgattagagctctgttccctctctctctctctctaacccaaaaccccaaagagacacacacaacaacaaccaaaaaaaaaaacctatctttctccatacagaccttaatcaagctcaccccccatcccccactactattactgagtaaagattgtgaattgacgaagagggtaaagctgaggggtcactacagaattggctttacttattcccctcccagcttttttcttttctttttctttataatatgtcgaattcagacgtcggagc

SEQ ID NO: 107006 - DNA, 601 bp, Cannabis sativa
ggaagtttggtggcaggtttataacctggaggaagtttcatgtagatttcttcatgtaagtcgccatgaaggaacgcattgtttatgtccatttgatggagttcccaattttgtattgcagcaagggcaagaaggattttcaaagtgttgaacttagcaacaggtgcataagtgtcaagatagtcaatgccatatttttgagtgtaacctttggctactaatctggccttgagcctatctactgccccattggggagatattttattttatatacccatttacatctaatgggagtgtatccaggaggtaaagaaaccacaatccatgtgtggttgtcttctaaagcctttgtttcaacattcatggcattgttccatctgggatctttggcagcagcagtgtaatgtttatgctcagtaatggtataggcagaaagtatagcttgaagaaactgaggagatagtttatggtaagacatgtagctctgtatggggtgggaggtgggatctgtagtggtgtctacagagcagatgtagtcttctaaatgttggggttttgtgatttttctgccagttttggaagttgtagtgtttggaactt

SEQ ID NO: 107007 - DNA, 505 bp, Cannabis sativa
  modified_base (112)..(113): a, c, t, g, unknown or other
ctatatcaaaaatatgttcatacaaaaatattttttacaaactcaactttttcttttcttatttttcttgctaaaaaatgtttttttttaattttttttaccgatggaacannctcagcccatatgatataaaaatgaaagattttttttaattagatagaaaaattaagtataaaaactcaaaattttctaattttaccaattcatgggtaatacccattaagagtttacccgtaaaaataattatttttatgtatttatataaacatgcatataagcaaacaaattgaaccaatcaaatcttatagaaaatagagtatacagaattttttgtgaaacaagggtagaagattttgtcattactttatttaattggtatttcactttaatagctttatttaattgatgtttaattccaccgttcatctcttttgggggaaatagatgaaatcatctcctccttggaaccctcaaacccatataagcaaacaccagtacaatactt

SEQ ID NO: 107008 - DNA, 579 bp, Cannabis sativa
tccaccgtggcacttaactgtgatttttggacagaggtgtgcagagcaaaatggaactagggtttaggtagttatgccgccaaaatttaagtttttgtagttatctgttacaaaccgtaaagttcaggtggtttagccgccactatccctatctttataatataactaggaaataaatttgggttggggcagttttaatcattttttaaaatttatattaaaataaattagatttttaattaattatgaatgaaattgaaaatatattattttttaattttttaaattatacgatatatataaattaggataaacaaaaataatttataggacaacaataaaaaaaaaaaaaaactaattcttgcaagttatttatagtaattaaataaatttttatttttccttcttttataattggaaatatagattaaaaatataacattttttagtgagctaaatattaataataacagacttttaaataatttaaactgtctttttataataattaaaatatttacagttttaaatatcatttaactaatttaatattttttctataaattatataaattaata

SEQ ID NO: 107009 - DNA, 1667 bp, Cannabis sativa
taacaatctaaaataatccactatgtgttaataatcacattgactatattaaaattaagtcatacaaaataaattgaaattttattggtgataatgaaatgtgattttttttttttaaattatacagtaaaaactgtatattgtagatgaagttatcagaataaattttagtaatttctactaattctgtagaaattatgaatagtgatgtaataaaattacataattattaatatatagttttgatgtttaaatgaattatgtttttcctaatgtataaatatgcttaaatatgaaatctttttaaacaaaaatttagttgtagattatgatagatttaaataattaaataggaaaccagaaaggttttctcttatttctgactaatgcgaatttatcccacgaaactagggatataaacgtgactcgcaagcttgaggattcaagagacatatttatgaagatatttaactcgcattttttggccagatgtatgcgagctgacttcacgatgaatgctggttggatggtgcaacatactttacccgggcattcctagctccttttatatagattgattatttcctgctactaaatcaccctcaatgacacatcgtaggaggagttgcccgtccaggccatagaatcttctcgtgtcactcaggtagatgccacattaccttgtgcataaattgagatagcattataataaataagattatttattgaatctcatcaatcaaataatcgtatttattaatttcatgattactccactataaatatggaattgaactcatagtaattatagaattatataaattgagtgttactgtagtgtccattgatataatcaattcaagtgattatcgctctttggtcaaagttaccattttaccttctaattacttttttatcctttagtaccattagttcactagtgaaagtataatttagattaaatttaaatttgtgcacaactttttagttccaaaattaacactaaggaaccaacattatatatgttaggaaagtcaggattccataattgtgtatcatgttcccaaccatctacattgttagattcccaaaataggagttcagattactcaggattcaggtcgagctgctattgataatctttataatatggattaggtctttatagtaaacgacatgtttgataaaaacagtttaattacacatcagtcattgtcatatataatctctattatgtacaacagtttcacttatatgtcaaactacatcagcaatttgaatcgagatcgcttgcaccgaataacgggcttcagtgaaatgcactaacaaccgttgattaaagatttcataactttaatatgttaccgaatattttactaacagctaagtgatcttagttctccgtacaatataagtcacaacctcatgtataaataagaaactttctgatatttatatatataaattattcaatataaaatattaataatttaaaattcaaaatgttcaacttatatttataaacaaaaatgtaaattttacagaattttcataaaacgtataacatttttatataattttattcatttatttaaactacaatatttttttttgtaaattttaatattttcaacaaagtgatatattagtgtaaggaagaggtttca

SEQ ID NO: 107010 - DNA, 540 bp, Cannabis sativa
  modified_base (350)..(350): a, c, t, g, unknown or other
tgttggtccatccttaagatgacttattagaacaataagatcaatattttctagtgattacactatgtactataagagttcaactacaatattaatttggaatacaaattaaattgtggaatatatagaattgaaattattgtacaatatgccatgaatgaagaaatgaatatcctaaagagcaatgagtctatctttagtaaagttgtctgatggggtggagaacattaatcgtaagtttttcaccaataaatactcattaggcaacatggtgaaacataaagatataatataagattcattgctgagaagttctttttgaactaagaatcaataacaaaggagatttncattctcacttgtctttataaaagattctattatagtaaccttgatatttgttgctcgtttcaattcattcatcaatccccaaacagtaaactagaggataagttatacatacaactatacagatttttctctaatattggtgaacatatgcaagcttaataagtatacctacagattaaaacaaacatc

SEQ ID NO: 107011 - DNA, 831 bp, Cannabis sativa
aaattatgtagataaaaattatatagatattttttataagaaaattttaatttaaatttaaaatattgtaaatattttatataagaaaattttaatggtaaatattttattgatcgatgcattgcacatggtttttaaaggcacatgatcttgaaatataatttatataaattattttctaatatcaaaatcgaaagtattttaagtcaaactatatctgtaaggtaagtcaaaattgatatatcatgaatatatgaaatataattattcataggaggtatatatattaatgttgctgcaatagttaaaatctcaaatctcatttcaaaaattaaaaaataaatttattacttcattaaaacaaattaaacattcatagatttcacttaatatcacctaattaaacttaattaaaaataattatgcctggattgcacgtaacatcaacctagtcttttattaaatgtgactatccattcaaaaaaaatgtgattatctaacaaaaattgttggtttgatggttttttttatattttcattaaatttaacggttaaaactagtaccgttagatcaatcaattaattatcttttttttttggaaaaaaattaatttttaaatatctaaatttaatttattattaaaatatgaatttgatatataattatttaaaagtatcaataaaattagatgattattttttataacaaagtttcttaatttaaatataaattagatgttaattcaattaattaatcatactttataaaaaatttattagttatattatttaaaatatttaaacttttttatttattttattgtttaataa

SEQ ID NO: 107012 - DNA, 1147 bp, Cannabis sativa
aaatctagatcctggtaaaatataatccaacacattcaccctaatggtgtttcttacatttcggacacccaggataagatcgaaatgaagatctgcggccctgacaaccacctctgtttcttcgaaacttcctattaccccttgatatttcgcaagcatcatcttttcgtttgggatcagggttaccaccgtcggtccccttactgatattaccacttataggaggattcgatgttgtgacagcatcctttgtagtttgctcctttattacatgttgctcaccctcctcagcaattaaggctagctcaaccactttcttacaaattttcatgagtagtggtaattctcaagttccgactgattgtggcattcagtcgtgtctcacatatttttgtttcctggtgaaatctataggcaccagatcaccagcaaatttggacaaccgattaaattccagtgtattcggccacaatcattttcccttgagtcagtttcacaaagtcctccatatgtgaggtcctcacatcgatgttataaaatttttccttagacaaactcttcaactcattccaagtcatcacactgacatcgcgagtctaccccacaatatcccaccaaacgcgggcatgatcttgtaacattaaagctgcacaatttactctctctgttcccgtcacccccatattatcaaggatacgggtgattgtactcatccactgcttatttttaattatatcagcacctctcagaaaagttggaggttgcagcttcacaaatcactcaaacactaaatcactatgcaacaacatgaacccctagttacccaccactgacacgaaagctggtggtaacacttgctctacaggggcagccagtgcgggttgtcttaaccgacacaattcttcctcttaacaaagtatgatacctcacatttcttaaaacatctgctgccagtcagtaggcgaattagcattgctaacccccgcattatcccccggattttgcggaggcgcaagcggtgtcgatggattggtttggtctgtaccaagatccacttgctccccctatggtctatatgattgtggagggtctatttttacaagtacccctgtaatcaacaaccccagcgagttaagcaccaatacca

SEQ ID NO: 107013 - DNA, 699 bp, Cannabis sativa
ttaatggtgaaaattgattatgagtttttgtagttgttttattaattggaatatgcctattagggtataatatgtaggtctagaaggtttggtaaggattggaatcgatttggtaaggttttagaatttttggggttttctggtgtaaaccgggtaacctaaaaccggttgactggattttgtaggtgggattcctgaaaaattcatgttgtcgattcctgttagtttcagagctttggctggctaattccctgatagtttagggtatttccatgttaagttacagtcgataggtttttgtttaaaacctaagtccctagctgtcatttagtgtgtcacttatccatgttatgaacgatgtgatttaggggcttgtaattcgccgagcagttgttccactgaagttggccggcatacctgaatttgcaatcaaggtaagattagcataatgatacgcatatatgtatacatgttttgcgtacatgttagttgccgtggaataacatatcagggtatcagtgaggtgtacatagagttgcaccgagataccaacaaatatgtgttaggcaaatctatagccatcatattagcatatcagggcatctatgaggtgtatatagagttgcaccgagatgccaacagatatatgctaggctatcagatagtatgagttatctgctaccacatctgtacgactag

SEQ ID NO: 107014 - DNA, 581 bp, Cannabis sativa
gtttattatggaatctagactggctaaaaatgttgttgataatcttagaatcaaacttcattttgactcgggtttggaggtccctaggattggtagaagtgggggcctccttttattatggactaatgctgtaactgtaactcttctttctcaatctattagtcattttgattgttatgttgcgtgtcctatttctaatgttttcttccatcttacctgtttttatggatcgctgattgatttgctcaaaccacacacttggaaaattttgaataggatcggtaggggtaacccgagagacccatggctaatcataggggattttaatgcttttcttttctcccatgataagcaagggggtaatcctgagaggggcccttcctctgatttccgacatttgttggactcttttaacctttcaccgcttgacccgaaaggtcccctgctcacttggaataacaacgtggcttattataaaaatattcaggagcatatatattgcgggattgttaacagtacttggactgataatttccctgatgcccttctcacgcatattggtttttttggctctgaccatc

SEQ ID NO: 107015 - DNA, 602 bp, Cannabis sativa
  modified_base (475)..(476): a, c, t, g, unknown or other
tagagttagtttggtatataaggtattatatcttattgtattatataggattatattaaattgtattttatgtaatatttttatgtaaaattatatatggtattaatttttataaacatctaaatatataatattttaattataaattaaagtttaacatattgttatataaaaatatgatatataatctaatattccaatttaatataatacaatacaatacgacattccaaacgagtactaaggtggcgtttagttagaggtaatgaaatggaatggaatagaaaggaaataattttcattccattcctttgattgtattttaaagtattggaatgacattccaatagaatgctctttccactattttggtggaatgactattccattttaaaaataaaggaaaaaccattccaatgtaacaagagaaaaagttaatgattttttatcaaatttttatgcattttaaattttnntccattccattcctatttctattcatatttttcctattcctatatttttattcctcccaactaaacgtcacctaaatttagggctgaacatcgggtgggtttaccgggtttcgggttggcgggttt

SEQ ID NO: 107016 - DNA, 1042 bp, Cannabis sativa
  modified_base (438)..(452): a, c, t, g, unknown or other
  modified_base (593)..(594): a, c, t, g, unknown or other
ggcaatgctaatgggaatgggatttagattggcgatgggaatgggaattggaatgggaataggaatgggccagggaatgggaattggaatgtgaatagcaatgagaatgggaatgggaatgagaatataaatgggaatgggctaggaaatgggaatgggaatggaaatgtgaatgggaataagaatgggaattggaataggaatgggagtgggaatgcgtcgaggaatgggaatgggaatgggaattggggtttggggtttgggtttagggtttaggatttggggtttaggtttagggtttagggtttagggttgctgttggggttggggttttgggattagaggttagggtttggggtagggttgggggtaggggtttgagatcagggtttcaggggttagggttctaggttcagggtttagggtttaggggaatgnnnnnnnnnnnnnnntaaaataaaatttaaaatgcataattattgttccttccattatgaaatagaatattcattccaccaaaatggtggaaagggcattctattgggatgtcattctaatactttaaaaagaaactaaacaaaagaatggaatgnnaattatttcttttccattccatttaattacctctaacaaaatgccacctaagggtttgtgctcaggggttagggttcagggtgttagggttagggtttggggtttgggttttggcgtttaggatttagggtttagtgttttacggtttaagggtttgagggtttaggggtttagggtacagggttcagggttcaggaaatgggaataggaatgaaaataatataaaatttcaaatgcataagttattgataaaaatcatttattgttttctcatgttagtctggaatggtatttccttctattataccttgaaatccgggtagcactataaaggatgatgcatgttaaccttagagaatacgtatcaacgaatgtaatggcagatattaatttgtactctaagacttgaatatgaagattggttcgttaaattttgttaaaatggccc

SEQ ID NO: 107017 - DNA, 541 bp, Cannabis sativa
tatctaatatttatctaataattatattaaatgatgtaaatataaaatataattcattttatcaaaaatatattcaaaaaaaaaaatagtgtactaaattataatacaaatattttacataaaacataatctaaatttaaatcacaatataacataatataaaatttacatcacaataaatactataattttttatttactattataaaaattttaatattttattattatagtttaattagtatacttatttacattaaataacttttataattataattatttattattaaattatatatttacttttgcattattattatttatatttttaattaattattagataaatattagataacatattatattttacatcaaaatttacaattatacattaaaacataatagaaaaaattaatgtaaaaatatcaaaaaaaactattatttatactaaatcaacctttgcatctccaattattgaagatggtcttagtaggaattttagaccacaaattcttcttttttatcagtttttaat

SEQ ID NO: 107018 - DNA, 501 bp, Cannabis sativa
  modified_base (261)..(262): a, c, t, g, unknown or other
gaataaagatgtttatttaaattcaaattgagtcgagttcattagcatgttaccaatttaccatctagtgcttacaaaaggtctggtcgtacccaaaaatctgaacaacaaaaaaagcatacttgtgaaaaaataagtgaccaagagtcaaaagtctgctcggtcacttggggagcacctatacatgtacaaagcatttggtaaaaaacaaaaacaaaacgaacacaattgcacgatgattataaacaagggatgaaattnnttgagaataacaaaagcattcaaatccaggattaaaggctgcccgatcagccagttcttcaaaagctgaaaaataatattccaagtttaaagacagctcggccagttaccttgtttcaaaagaaggcctatttgcggaacagacataaaaaaaaagatagtaaaaggagagcacttaaacagtaggagttccaggctctttgtacgggtaagctagatttgaaggggctgaaggatcat

SEQ ID NO: 107019 - DNA, 501 bp, Cannabis sativa
atctacttcaagaacacccgctacttttcggcttgtaggagctctattagttgaccattgatagttgttgctagctatcctttccaaaatctcaaaagcttcattgtaagacttggaaagaatggatccattagcagaagcatccaataccatcctagaggctacaatgagaccactgtaaaacgtctcaagttggatacaatgaggaataccatggtgtgggcacttcctcaacaactccttgaatctttcccatgcatcccaagtggtctcatcttccgattattgaaaggacatgatctcactttgaaactttgcatttcttgtcggaggaaagtactttctcaagaatttttcagccaagtcattccaatttgccaccaaatcgggaggaagagcattaagccatgctctagcacgatcccttaaggaaaatgggagcaacttcaaccttaaagcctcttcacttactccttgtagcttgaaagaatcactcacctc

SEQ ID NO: 107020 - DNA, 850 bp, Cannabis sativa
atctgaaaagagttaggttaattataatctgtcattcacttcaagaaaaggatagcaattaggcattaatgattgggtaaacaagcaacaagattctcctccctattctctcatcttgattaatattcacttgtttatttaagtttcttgagttattttattcttttgaaatcgtaaaaagtattgatttgccaaatagaatcataaatataatttagtggtaattaattcaattctctgtggttcgacctcacttgcgtgaatttactacttaattgcgtgtacttgcgtattgattttacaattttcgtaacaccttccctcgatcttcgaccgtgtgcagaagcttcaagacgttggcagtggtagctccttctccttgccctttggtgcttcaagttcaaaatgacaaataaagatttatattatatatatatttttgttttggaaaaaattattagcccagtccaatgcaaaatttgcccaccccaaccaaatccgtcccaacctgcacccgaaacttgaaaactcgcactcccaaacaagtgggttcgattcacactcaaaatttgcaccagaaaaacccacctaatgttctcttgcatgttaaatatttcacaacaagtaataaattaatgcatcactagttacaaataataaactctacttctaattaattctataaaagggtatttattctaaaaataccacttataataattattcagaactttaataaacacaatattggactccgaactcagtccaagctaaaatattcattgtaaccccatcgcattaactcgacgagagtcacctgtaacacaataaataaattttactacataat

SEQ ID NO: 107021 - DNA, 691 bp, Cannabis sativa
caacattatttaaagataagagaagagtacgaacatcatgaactaatagaccaaaagaggatgacaaagtaatttggctatcaatttccaaaatcaattgtcctcataaatgacggtcaatccagcttaaagcttcttttatgccaacaaattcatctatttcaggttgcacctgctatttcggtataaaaatcactgccattttcttcgctgcctccattcgttgataactactcgacgctatagacacccgaacgaacccataatcaagaaccagtaatttacaccaaaaaccaataaagctgagagaaactatagaattttttttttaatttttattagatatataaaatttattaatgaattaattaaaaaaaataataaaaagaaaattatcaagtgataaaccgcataaaaatttaaaatatcaattctatctattttttgttttgataactcatatatttaatattcaaacttatcctttcgtcaaatatatatattcacaataaccataaacctattttttgttttgataactcatatattctcttcttcttctagtctttttcttacctttttttttaataaacttagcaactttattaactaacaatcattaataattgtagaacgcacttcgttggaataattctctaattgaagcacacgactagagaaacaagaatct

SEQ ID NO: 107022 - DNA, 1241 bp, Cannabis sativa
ctatcatagagaacacatcgttggagagggaaattgttcattttatggctaggaagaaaggatctaaaggctttatgatgattaaactggatatggaaaaagcctacgataagatgaattgggattttgtgagagaagcccttcaatttcatggcgctaaggatccatttttgggatgaataatgagctgtatccaaattaaaaagctgaatctgatgttaaatggagcgagacatggtgttattatccctcattgcgggcttagaaagggggatcctctttccctgaccctgttcattcttgcagcggatttattatctcgactaatttcatatgctaatgataaaggaaagatccgtggttttaaggtgtcaagattcgctaggccaacaactcatattatttttgtagatgatgttatgttgttcggacaagctacggaaaaagaagctgaggctttcctcaagtgccttcacacttattgcgaatggtccaggcaagctgtgaatttccaaaaatcaacggtgtacttctcaataggagtttccatgaaccatgcattcaatattgcgaacctcctgggaatgcgcaagatgaagaaagatgccacctgcttgggtttccctctctttcagtctgccagtagatcccatgaaatgaattatctggtgaaaaaaacccttactagaatcgatgggtggaaatcacgactgctgtctaaggcagggaggacatgtttaattcaacctgttggaggcacgttgcctatctatgcagctacctctgatgtttaccatgtggaacaacaacaaaaatcgataaatgcctttggaatttatggtggggtgcatttgataatagaaaactggtatacaccattgcttggagttctctttgcaaatctaagttcaatgggggattaggctttcgtcaaatcaaagatatcaacaacgcttttattcttaaatggggctggaagctaatcaatgattcctctagtctatggagtgctacaatgaaggcaaaatacttaaaaggggcaagttttttcgatgtggattgcaaaacatctgactcaagactctggaaggctatatatgctgaaatacaaaacgctgttgaatgaaggcatctgtagaaggataggggatggaaggtctacgtccatctcgttcgatacaatgcttgggtacccgcgactgatcacaaaccccgccctcttctagatgctactcaacggg

SEQ ID NO: 107023 - DNA, 659 bp, Cannabis sativa
tgaaaatcgccacgtggcattcttggaggacttactagaactgttaaaataagtactaacggaaataatagaaattgaggatttgagtacttttgctgccatttatagattttgggtatataatagcaacaaattgaacaaaataggtatttatgccacaaatttacctttaaaatatagtagagccataacttttcatttgaatattatttattaatgcatgtattattttattgttcactattataattacaactttgaaatttttatagtataattgttccatacattattgtttaaaacataaattttaaattattaaattaatttaaaagttaaattaataataaataataaaaaaattatgtctttacaagggtagcaatttgatcatttacagtatgtttgaagcacctcataattatccaaagttgtcatagcctatcaaatttatatgagatcgatggtaaatcgaaatcgtttagattttttttagtggaaattttttttgatcaagaagaataaaacttcattaatctactcaccaaatacaaccaataacacttctacaagagaagcaaccaacacaaagtcaactacttacaaatcaatttaagaatcaaattcttctcctccctagaccacttcctatctttaat

SEQ ID NO: 107024 - DNA, 559 bp, Cannabis sativa
aacaaatgatgttgtttgacatgtgacaagaaagaaagaatttacagcagaagagttattaagtagtctcgagtcatagcagtcgacctgggagggtccctagccctacgccaaagttgactctaggaactccaaaatgggtgtttggatccagccaaattgtttttgactcaccaaccttgagtattctgaactaagaagtcaagaagaatccaagtttgaagcttgagaattgaaaaagggttgaaacggcctcatgggcacctagggtttcacctagcccccaggttgaaatcctagctagggttttagttttcaggcctgtcttagtgcaaatggctcaaactttgtacttagatatgaataacacctgttacgaacatgttagaggcactcgatcagaatcagaacacaacccatttagagcacataggcacctagtgcctaggtcacctggtaatgcacctagtgctcaagttgacatgttgtcaatctggggagcttccaaccacctcactcaagatgtatgctgagaattttatttgtcttcatctaaaat

SEQ ID NO: 107025 - DNA, 567 bp, Cannabis sativa
aatgatattaaatttttacccattatcaatgtcgaatactttttttattttaattttttagaaaacactaactataacattattcatttttattattgaatggttaaatattattttaaaatttatattttgtaaaagttattgattatactatttattttgttatataaaaaattagactttgtattttctaaaaaaaatacaaaataatatcttgaactgattttttgtcaaaataaaagttaataataaccttacttagagttgttatgataaaatttagtgcattttctacatttatttgtgatcaaaattatcttcaagttggttaaattaaaaaaaaaaaattatcaaaaattgagttcaagatctgtactattttgaaaaatacagagtccaatttactattttacaaaatatatattccaattagtaacttttataaaatacaaaatttaaaatagtattaaccctttgacacaaaatttaaattttatctcattatcaattcacaataagcaaaataactcctaatagctagcttaacacaatctctcctaagaaaga

SEQ ID NO: 107026 - DNA, 1054 bp, Cannabis sativa
tgataactaattagattgtaaagggtttttatttagggcacaaaacccaacaacaggtgcctatacacccaactataaccctatccccgtgtccaatacggtactgagtttagaatgttctatcgaccataatattaggctatactcgatactctagtcgtaccgatgtgatagtgtcgatctcatacttgagccaaacatacatccattggtatccagtacaactctatgtatatcgataccgctatcaatgtaatctaataggctccataaacatgtacgctaaacatgtaaatacatatgcatatcattatactaatcttacctcacttccaaattcaggtgtgtgcggccaacctgagtggaattgttgctcgacgatttataggcccctaaatcacattattcgtaaaacgaatgagtgacatgctaaatcacttttcgaggatttaaaattgaatttaaaagttttcctatcgatggataatgtgacaataccctaaatattgcaacaataagaaaaactaggattccataaaatgccccaactggcaaactgatttcccaaccggaagaccgattctgtggggtttcctagggaccaactagaattctagttcctacaggtccccaattcgaccccaaacttcacaagaacttccaaaacacctatttataccataataaactgaaaccaagatataaatcacaacagctaactcagaaaccaaaaacaccattaaagagcaaagcttgagttcttaaactcaaaccttgctcaaacaccataatagtccacaaacccagctcaaatcaacataactaacttcaatttaacttcagaatacaaaaccaaacactatctagtatcacagaaccctaattgcaaaaacatgcaaggaaagctaacttgaaacttaaggaatcacaaagggatgagcttgggagcttacataggattggaacctcaataattgtgcttaaaatgctctaaattgtgttgaaaaaaaccctaaccttagctggatgctagagagcgagagagagagagaga

SEQ ID NO: 107027 - DNA, 804 bp, Cannabis sativa
ctctgcccaacccagttcactcctaagggcattaagtatttatctgccctcttcattctctacgcttcccaggggtcgggtactccttctcgccacgaagttgcctagttctttgatttgaagtccacccccaaacaaggcaggtcggggtacttctatttctcttaaccaggcttcaagtggttgaccggcacagacgacaaggccatcagcaagatagggcgttttgctgatgagtactttatggtgaaggacgtgggcattacccggactcggttccatcacattctgacatatcactgtcctcccctcactctagctcttagggatagagctcaaaaacttgcccggctaccgggggaagaccagaatattatccagttaacctccgatgataactttgtgaggtatgggctctatcccgaggactttactcccaagtccgtggcggggaagaagaggaaatctggtgctggtcggaccgaacgagctcataaggacaatgaactcattcaacttaagcacgaggctaagttgaagggaggtgcatgggccaagcaatatgctcaggagcccttgaaccctgaagatgaagctaaagaagcgaaggtgactccattgaagaggaagaagaaactcccggcctcgcccagtcctgttgaacatgcgattcgcataagggatcccatttcgcctgctcggccatcctctgccgtgttcggaaaagggaaagctgtcatgtctgagataagatcgatgtcaagtgatgatggacttctgagtcttgttcgggcggtcaccttg

SEQ ID NO: 107028 - DNA, 600 bp, Cannabis sativa
ttttttgccgttaaaagttccccttgaactattgagattgttatatttaaggacttttgtctaatttttataaaaaaattccaacatggatgaaaattccgggggtatgatttagtacttgtcaaagtttgaggggcataatttggtagatatccaagtctggggagcatagtttagtacataaacaatcactgaaacagtaaaattgaatgaaattagacaatagtccttaaatctaacaatctcaatagttcagggggaatttttaacggtcaaaaacgttcaatgggcatgatttggtacatgtcaaagttcaggagaaaaaaatcttaattagccttaataaaatattgtaaagattgaaactcaaaagaaaaaattcaaacttaaatttttttttacttgaagagtatttcagccttgttatcatagctaacattgctctgtgttatctcaaagcttagaaaaatggccaataagcatatcagagcaaagaccaagtagaccaaaaattcaaaaccccttggtgtcgaaacccaaaacccaattctccctactatcctcgatcagtcgagctcaccctttctctctctctctctc

SEQ ID NO: 107029 - DNA, 715 bp, Cannabis sativa
tattccagaactggagtagagccaaagattatatcgatatatcatacttgaatcagtatatatcttagtgttgattttattattttactgctttaatcatttttagttgtttatacgctattaatctctatttttccttacgattactatttgtgttatgttaatcttgtcattgctaattgtttgattatttaaagtttagttgatttgattctacactactagttgtaatttttccacaaatcagagcttggtaatcgatcaagaatgcataatcaaaattctttccactataattcttgaagaaattttaatgtcatcaatgacaagatttaaattggaaaaattcaatagaacaagagactttgcgttatggaaagaaagcttgaaagaaatcctagtgcaccagaaggtttccaagtttcttggagatgagaaacttttagccaagaagaaaggaaaaaatagaaatggaggagatggcatattacacaatcatcatgtattatttatcaaacagtgtttgaagaaaactcatcacagagaagacgacgaaaagagtctagaataagttggaagagttatactttaaaccatcaacaactagcaaggtcaattttctagaaaggttatacaggtttagaatgattgcttccctttctttagatgataatattgatagattcaatgtgattattgtaggattagctaatat

SEQ ID NO: 107030 - DNA, 729 bp, Cannabis sativa
  modified_base (364)..(377): a, c, t, g, unknown or other
agttttatcagacaatcaaataaaaaaaaaaaaaacacacacacacacacacaaaaataaaaataaaaaaaatattaatcacaaatacaatcaaaacaacgcacaatggatactaataatttaaaaacaaaatataagtgtaagtttcgaacctagaaacaaaataataaaaaagtacttaaaagaaaatttttgtaataatataatgaaactattttttttattcttttaatgaaattatttgtttctttcaatattgatgaaactgaattttaaagtttgtattatttttagattataattttttatattgttttttttaggatgatgttgatgaagctgtttttttttcctgctgcttttnnnnnnnnnnnnnnttttaacaaaaaaaaaacaaacaaagaaaaaagaaacaatagtttaaataaaaaagcaagtttaatttctgtaaaaaaaaaaaaaaacattagatcatttttatttatttattttagtgttttatattttttaaaaaataaatacaaatttaaagatttttatggcattccttatgacattttcccatatttataaatttttttttaaaatatgtcatatttagtataattaaatttttatgccatatatattaaaatttatctttatttcctattttttgtaaagggaaatttgattttttatgcttacatttagttaaaaaaaaaaattctaaacaaataataactaata

SEQ ID NO: 107031 - DNA, 615 bp, Cannabis sativa
ctcgaatctgaatgccaccaaaacttagccataagccgctctaactccttagaagtgtctaatggcaagagaaaacattcatagcataattcggcaatgcttgtgcaatagatttcagcaatacctcctttcccacacgagacaaaatacgcccttcccaaccttgaattctcttccaaagcttatccttaagaaagccaaggataacattcttattcctcccaaccaaacaaggaaggcccaagtaatagccattttcatctgccacataaatttccaactagcacagatagaatctcgcacctcactaccaatattcttgctataaaatacagaagacttagttaaattaattctttgtcccgaagccacctcataagtacccaacaactccttcacattatacgcttcctcctcagtggccttacaataaatatagctatcatcatccaagaccatatgagagattaccggcgtacctcaagtaattttacatcccgtgagtaaaccacgttgtttataactacgtaacaaactagagaaaccttcagcacaaagaataaacagatatggtgataaaggatcaccttgacgtaatcctctttgagcaacaat

SEQ ID NO: 107032 - DNA, 827 bp, Cannabis sativa
attaactcgtaattagcttaagtaagattataatcttactctaatatccacataactacatatttaataaaatatggccaaatcgggatattacatgacatgtcagcagataaaagctaagcattaatgacctgtgggtttgctacaacgtttgacttttctcgagttgaaaagggaagacattactatggattttgtagttagatttcctaaaaccacggggttgtatgatttgatatgggtgattgtagatcgtttcactaagtcagaacacttttttccagtaaagagaacatatatagtggatcagtatacagaattatatgtaaatgagatagttcatctctatggagctttaaagttcattgtatctgataaaatcccaatttttcttccatgtttcgggagactcaccaaaaagccatgagtacaatgctaaaatttagtgtagttttttatcctcagaccgatactgagtccaagaggaaaatacaaatactagaggacactttatgagcttgtcttatggactttaacgattcatggagtaagtattttctattgatacaatctcttataaaacaattatcagggtacaataacgatgactcccgatgagatgttgtacggtagaaagtgtcgttcttcgattcaatgggatgaaattggagaaaagaatatttgggtccaaaggcaatacaaaggacaaataattctatcgagaagataagggcttgaataattcattctcaggataggcaaacgagctatgcaaatcaaaagcatagagatgtagaatttcatgttttcctacgggtttcacccat

SEQ ID NO: 107033 - DNA, 971 bp, Cannabis sativa
tttagtcacaacaaaaaattacttgtaactaaaacatagtatttaaatataagttgtatctaatttagttttaatcacaacaagtattgtaactaaaaacacatttagtgacaacaaattgtaattttttgtgtaaaattaatttagtaatctcacatttgtttgtttttgtaaaatttctatcttcattttgatttgagaaatttacaaatatatgtacttttcttatatgttcggtaaatatggaatttttaatttgttcattatttatggttttttctattagcatgggaacacttttatattgttttacatttaattgtaattttgagtttttgagttgtaacacctttctaccctttctttatttgtattatgttattgctgccctaaatgagaattgtaattcttccattgccacacacaaaagtctttagactgatttcaattcaaagtaattgtgcctaccgacaaaaataccaatgaggtcaaggcacaaagaaagaaaagggtaaataacaatcttctatgtagagggcacatccttaactcgctctgaaataagctttatgacttatataacgacaccaaagatgtcaaaaaaatttagaatcaccttgaaaagaaattcaagaacgaatagaggaaggtcgtaccaagaaatttttaatttttcaatactttgatttaaaattttttgatggtaaacctatcttttacttcaaattcatgagttgcaagtaattattgataaattgaaagtgctcaaaattaaactctctcagacattccaagttgttgtaatagtggcaaaattgccacactcttggaataattataggaagagaatccttgagataaattagaaaatatctattttttatatctattaatcaaaaataccttcatattttattttattaaaatatacccacttttatgagtgggtagcatataatttacattaactt

SEQ ID NO: 107034 - DNA, 680 bp, Cannabis sativa
  modified_base (621)..(621): a, c, t, g, unknown or other
tccgtgggtgtaagggcccaattgaggcttgaagtggggacattacacaatccctatcatatctccatggaaccaggcgaactgatcctatttcgccctcaaaaagcttattaactactatttcaattgttcatccaggttccccaatgtatacacatattttgtgggatttcctagatctagaacaatttattccagctcctcaattggtttcaacaaatttctttcatcttgaatccgtggatcaagatcttcatccttcttctcgccttcttcattcaagactgccattagctggtgaccagcctttctgagctgcagctctatgcgatagcattcgcgagctagcatttgatcacttcgcactactcccatgcccattggtgtttgaaacttcagggataagtgcttaattgaactaacttcccctagtccaattaatgctggtcgacctagtcgtatgttgtatgttgatggcaggtcaacaactaaaaagtcttgtattattgtagtggataaaggtgcttcacccaaagtaattgggagctcgattattccttaactggcgacacggtcgcctgtaaatccgcaaagatttaccatgcaaggtcttaatttagntttttcaagccccatcttcttcagtgtttccctagaaaggatgttcactgaacttctgt

SEQ ID NO: 107035 - DNA, 684 bp, Cannabis sativa
acacaaatatagataatttcacaaatcaagataaaaggaatggcaattgacattgactagagaaaactttaaccaacattcattatcttccccaatttggaatttagtgcatgttcaaatccataaccattcctaaaacaaaatttaacataagagaattaaaaaggaaggaagaaaaaaaccgttggtggaatgaatcttggccgccactctgctcctcctgtcgttcttgacttcttttaggtctaaaattttgcttccccttttctctttctcgtagttttcttttatatttttcatcccagctttcaaaagacgaagttagccttaatccgtacagaacctcagtgcggccatggattccctcaccgcggtgagtgccgatttagacgaggcagtggagtagctcgccacggctactgagcccatctcgaaagcacctctctgccaaatattggccgcgactgttaataaatacgccgcggccagaagtgcaccaaatcctgatttttcaatttttgtttgcttaatttgtcctttattgtacttttgaaacctcaaaagtccgcagctatgggaaacctgaaaacatagaaaacaagcataagtctatcctaaaacattgaaaaacgactccatttgtgacacgatacataggctaaaattagcctaacagtccaggtc

SEQ ID NO: 107036 - DNA, 575 bp, Cannabis sativa
gttgtcactaatttagttttggtcgcaataagtattgtggctaaaaatagatttagtcacaataaattgtgatttttgttactaatacatatagctacagatcttttagttacaacatatgagtaataatttataataattagtcacaatttttttttttatttttagtcaaaaattttattgtgactaaaagtaagattttttttagtgtacaaaaagtgacatgctgtaataagtaatttaattttgagtcacacacatattttgatttaataagtaatataaaaaattattaaccactcctgacgcacaacatcagtgtgctattcggcacaataacaaacccagaatttaattttagagtgaacttaaaattaataacatgctaaatataaatgtaatgatggcttaacaatgtcatctacttgttttagtggtcataagtccgcaactttatgttttgtggattttttttttaaaaaaaataaaatgtaaatacgcataaaaaataggcagtgaattagaaatatatgtaaattttacgcatattgaccaactatcatatttgattacta

SEQ ID NO: 107037 - DNA, 513 bp, Cannabis sativa
aatcccatgaaaccatgaaactcagttaacacagtttgataaattctcacttgtaaacagaaaaatatgagaatttgcaatagttatacactacactatatgggcaaactcaatcaaaaatatttgttgtcactctttagtattcttttgaatggaactctttagtattttatttactttaacaaagcagaaccagaaaacatcaagagagtgaaaaaagctcaagctttcacttaatcaatggtttagaaatttcaaatatcaaatcagaatgtgaactaacagtaacagaacttctcatagagcctaattgctaagggactaatttagagtcctcatcaaatattttcacataaaaactattataaatggctttagaaactcgagaaaaatcagccctttgatccaagcattggttttcattgatggtgcatatattgcatatgatacagtgtactatccaactaagcaccgaactctatccacaaaatttttccaaacacgaaaatcaaa

SEQ ID NO: 107038 - DNA, 648 bp, Cannabis sativa
catctagattcacatatttctatagcaccagattgcagaacactaatcaaacatcaattcttaagttatgcaaggtaaataaaatattcctattccacttacaaagaaaaacctaaatctaggatttctcttgctccaatcaagtttaacaaattgttactcatggccaagaaataacaatccaataaattgacaagcttacttgaatgaacaaaggcaaagatgctaaaatatgcttaaaaattaatcatacccaacataggagttcatagctattcaagcctaaaaaattctatctcatattcaaataagaaaataaaatccaacctaaaaagtatttctccatggctgttaccttttttttttacaattcaacaagcttttaatatctaaataaaagaaacaagaaaagaaaataagaaagaaaaatataaagggaaggtaaaagaaaatcaaacacaaaagcttgtgtcctctctttgcactttggtccccattctctttccttcctcttctgtactttgttttctgcaacgaatttcctccaaaaatggtagctaccatcatcttgaaggagaatcttgtaagtattctttttggttgttgggtaaatagggtacaaaataatagggaaatttacatggtata

SEQ ID NO: 107039 - DNA, 577 bp, Cannabis sativa
  modified_base (293)..(294): a, c, t, g, unknown or other
gttcgagcaacgtcaatccaaccagcagttgtatgaaggcacttcggcgactttgaagccagaaaattttcttttcgctttggagctaacttagcagagaagagagatgaaatgatttatgtgccaatgctatgggtatttataggcaagtcacgaaaagaggtaactatctcaaagaaacctcagacgcctcagcttcttgcctaaaaaacgaatatgggaaatcaaaagtaatcgagtgtaaccgtcagccatggagagagaaaatcggatttcgaaatattaattgtcanngcatttattagccgaaaaccgaagagacgcccaatcagcttcacatcgagtctcgaacgatcacgctcgacacgtgtccccatccaaaggcagagccatctcggaagaagtctacacgcaacctcagaggtctcgtacagactttggggggtaaatgttatcccaaattttgcactctgacgtggcattacaagaatggtgacacgtggagtccgcatggagcatctgctcgggaatgatggccgagcaggatgcctcgctggcacatcctgagtaagatatt

SEQ ID NO: 107040 - DNA, 633 bp, Cannabis sativa
gttattgagtctacttgaaaattattcatgttctggagattgacttgtctaacttttatttttcgatttagtgttttactcgaggacgagtaaatcttagtttgggggaatttgttaggttctttttagtattatttttaggttaatttttagtgtgtttttaatttagttcttctcttgtttggagcaattttacgctttttatcttttatttttacagatttaaaataggagaagattaaaaaatgtgaaaggaataagatgaaaaaaaagataaaaagagcacaaaaatagataatttataaaataaagaaaactgtgcaaaaaaataaagttgaaaattcaagcccgaattcaactatgttcttcttaggtttttgaaaaaaagtcaaacaataaaagttctagatctctctttcatctttccgggacatcttgaatcgtcctatttccagcaatatcgagagagttatagtcaaaatacgaacagtcgacgcagtaaaaagctcactgcccaaataaaggggggcgcacctaagcatggaaatcccatgccacggcccgccccttttaatactaagaaaaagaggtttttttagcatttttttatcctttttggctataaaagaagtg

SEQ ID NO: 107041 - DNA, 554 bp, Cannabis sativa
tgtgtttggttcattgtagtgattcagttccacccttacacccgaatccacttttagccaagaaccaaagattggtctcgcctctccatcttcatgaattcccgtagctctaggttccttgcattgacgcatttcatggcctattctgccacaattaaagcacatatatggcagtctatcatactgaaattggagccaaattcgccgtccttcgtgggggaataggtatcctgggaatagtttggaatgaatggagttctgggctttgaatttgaagaaaccattgacagcaattcggttaacatccgcttcttgaatgtcaatgatgtcccctgccattcctgccagtcataacatgtttgctttagttattgcctttattggaaggtttagaacacgacctgagattgtgaaggaacttaaggtcgtttcccagtccgtcggtatgccttgcatcctttccaagatgagaaaaccagcattaagaacccaaggggattttcccagaatcctttccaaatggctgttcgttttgaacgaaagaaccaagaaca

SEQ ID NO: 107042 - DNA, 519 bp, Cannabis sativa
  modified_base (491)..(493): a, c, t, g, unknown or other
tcgttatagttacaatatcattcattcaaatttttgaaaaaaattgaatagtttacagtactaaaaataaagtttttaatatttcagtctattacatatgttcgaaaaactttaaatttatttttagtattgtaaactattcataactttttaaaaatttactgatattataactataacgaacactaccataaaaaaatcgaaaaaatattttaacatgtatttttgagtacgaaaattaactaaatgattgtaataagaaatttacagtgtcacttctaatattttcttgactccatgcatcttagtataatatctaattatacaatttgtaaatgtatctatatttaataatatgataacccaaataaaatctagtgtgaaaatgattttccaccctaaaatatttggcctaagaactccatttataaattattgtctcaatagtcaatactaaatccaaatgaatgtatctttatatattaaaagtnnntatctaacggcatttcttggtttaac

SEQ ID NO: 107043 - DNA, 522 bp, Cannabis sativa
aatttcaaggattggaaaaggaacctacttatagttctgggatgtatggatttagaccatgcactaaggaatgaacaacttgcacctctcactaaggcaagttcgcatgatgataaaagagaatttgagaggtgggatcgttcaaatcgcatgagtctaatgattatgaaacacaccaatccagaagccgtttggggcacggaatccgaaagagttactatggccaaaattttttttaaacaaattgagaaatattttgttaaaaacgatatggttgaaatgacaacacttcttggttctttaatgaacatgaagtataaaggtcaaggaaatgtaatggattatagaaatgcatcatagtgtcttaagattgatcaatttaagttttattgaatttatattatttaaaaaatatgtttttattagtttcagtttagttttttaaatgtattattttaaataataaaatacacatgtggcgctaatgtgacaataacacatctttcaccaaagatttacgtc

SEQ ID NO: 107044 - DNA, 709 bp, Cannabis sativa
  modified_base (365)..(369): a, c, t, g, unknown or other
ccttattagaacccaggattttagtatgtttgtaagttatgcttttcttactgagtctgtcgactcacagtgttattgctatgtgtacgtaagggcaaggctaaggctgaggagccgtgagagcgagcaggtgaagattgtacatattgaggcggttaggcctagagcgtacgatcctcgggacatcacgaccttttgttgtttagtcacctggcgacaaatattttgtaaggaaatagtaaacttttctaactgtattttgtaaacgggatcccagaattttataaatgtaatatattaagttttaaataattaagcaaagttttaattattcatgatttccaataatctcgttgattagcaannnnntgcacagtacgttaaaaatcacactaacatgcctataatagttagggtgttacacgagtatctccaaaatgtagaagaagatatgaatcattataagaaaacactattctgaggaaaacaatgttgactataatgatctaatcttccaagatctgcaatacctagacactgcttgtaactgcccattctcactcaattttcttgatgaagaaatatgtaggggactctctatagctccacttgtctacaacaaacctactacatcaacaaatggcaccaagagaacaggtccttcattggcgtggcaagaaaatggtagtgacacagatgaatacataaa

SEQ ID NO: 107045 - DNA, 526 bp, Cannabis sativa
agtttgtacatccttgtctcgctagagactatgcagtctgtgagttataaatatatcctattgactccacatttaatgagttactccatttcatattttttaatataattttcattatatttgttgattcgtattcctcaaggttgacacgtgtcatcctctgaagtaccagccaaatttcaggtataacaattaccccttaaaaagttattttcagtgaaaagtgctttttaaatgattaccaaggatatttttgtcataatccattttgaaaaaatgcatgccctttgattttggcagttttgtgatttcgaggcacatcatgagcattaaataaccatcttttccacttcctccttatttctacccgttggatcatttatccttaatttgacaaagatcaacccaatggtataaaacgaaaaaaggaaccaccttttcattatctttgccatttcaaaaattttcttgagcttctctgcaaaaaactgccccagatttttcgaagttttgcatgacatctttt

SEQ ID NO: 107046 - DNA, 554 bp, Cannabis sativa
ataaaataatatataaattaataaatatataatttaaataaaattaaaaaaacatgaaattcgagtatatatggcgtcggttattagctaggaaccgacgccatatatacccctatggcatcggtttctaactagctaataactgatgccataggaatatatatggtgtcggttaaattaaaccttacagcatcaccctgatcagcatcggtaacgaatttcgtcaaaactgacgctgaaagccttgaagtagtgtaacaatatacttcttacatacgtagcctaataatcttcattaattctgaagcctttcttgtccattgtacataaattaaattatttcttagggcattgatcctctcatgttttaataaacacattattataagttattatttttatatatagctagttattatttaattagctttttctccatgtgaggcatgtgtaaatacaaattaataatatatatatttcaaactaaaaataatgaagttcgagtctcaatgatttggtctcagcaataatcagcatattatatttaacttcac

SEQ ID NO: 107047 - DNA, 546 bp, Cannabis sativa
  modified_base (305)..(311): a, c, t, g, unknown or other
gttccctttttcttactttataccaatgatattagcttcgttagatcagcaaaaggtttgatcctacgaacataattcaaagcagaagtggaatagatggtcatttaatactgatgtacctcaaaaccgcacaaccgccaaaatcagaggacatgcatcttttcaaaaagaggatcatgacaaacataccctttgtaatcattaaaaatctctttttattaaggaagaactttttaaggggcaattgttatacccaaaatttggcaagcacatcaaaagaagacacgtgtcgaactaggaagaannnnnnnctcaaacacgcaatcgtaagtacacttgacgtggaatagctcgttacaaacacaatttgcaaagtatgtttataactcggctggctgaacagtcttgtccgagaaaaaaatgtactaacttttgatttgtgtatcgacgataaaccatgtaaatgcaagtgtgcatgatgaggcattaacctcgtcgcgtggaggagatataataacaataaaaatacttagcgtatatgacatg

SEQ ID NO: 107048 - DNA, 678 bp, Cannabis sativa
aagtattttttgagagttgaagtctttcggagtaaacagtgtatttttctatctcgaaggaagtatgtacttgatttgttaattgagacaagaaaattgggaacaaaaccttgtagtactccaatgaatccagttgtgcaccctacaagagatggggaaccatttgtagatcttgagaaatattgcaaattggttattaagttgaattatctaactgtgactcgcccagacattgcgttctcagttagtgttgttaatcagtttatgtcatctccaacaattcatcattaaacagcattacagcaaattttgtgtatttgaaaagagcacaagatgaggtattatttacaaggatcatgggcacccccagattgagtgtttctcaaatgcagattaggaaagttacaaggaaataaaagatccacttcgagttattttctgtttttgggggcaatctgatctcttagaagagtaagaagcaaaatattgtgtctagatctaatgcagaatcagaatatagagctatggcacaatctgtgtgtgagatagtgtggagttatcaacttttgactgaagtcaaatttaagacttcagtaccagcaaaattatagtgtgataatcaagttgctcttcatattaccttaaatctcgtgttccatgagcgaactaagcacattg

SEQ ID NO: 107049 - DNA, 544 bp, Cannabis sativa
  modified_base (137)..(138): a, c, t, g, unknown or other
aatatatattacaagattgagaaggccaaagaagaaaaggataagttttattcttttaaattccaaggatttccatttgctttcttaatttggttgttcgagatattcccaagcctgtctcctaattactgcaagannattgcgaatacatatcctcgaatgttaaattgggagactacttataagaaaaaaactgggggctattcaaaacttgtttctgaggtttttaataatgttgaggtacctttcaatttttataactagtttcttttttatatatatatagtgtatttataacgggtttttaatatgtttgatttctttccaatttttcaggccactgtgaaggatttttatcctgttggccgtgagcttaagaaatctatcttgcaaaacctcaaatttgaaccggtttatcttccaaagaaacctcgaggtttcgatgggaaggtatgcattttttatgttttcttttactttttggttgtgtttttacagtttgtttttcatttagtttgttgttttttttcttatatgttttttt

SEQ ID NO: 107050 - DNA, 1140 bp, Cannabis sativa
  modified_base (773)..(785): a, c, t, g, unknown or other
ttttataacgaatacactacattcactacaaaaaatacaaaaacaatacacatttaatatcattgtaaactatataattaataaatatatatataaaaaaaagtggacaacatagttaccattgatcttattgtgaaagtttattcacaaacacaactttcaaaatatctgtctcacttactctctaaaaatactttgtgctcttgtcaatatctaacatccgaccatagaaattcacataagatagcaaaatgagcaaaataattgcaaaagctttcacaaaactagtgttcccactccaacaaaaaaaaattgttatttggaaagaaaatcatcaccctaaacacaattctcaaatttattaaaatattgatcacactcatgcaaaaacataaaaacaacacaataatataaaatattataaactatcttgtattcatatttaacaaatatattataccccaatctatctaagtatacatcgtaaatcgaattatacaatatacattatttaatacgatttacacaaaaaattaaatcggtataaataatataccatattgtatattatatatacacaaaatttaagtcagtctcataatgcaaataaacactaaaaaaaaactaacctaataaataacacttacaatatacatatattctacactattacatatataatttaacaaacatacactcctacacctaatctaagtatacatcttaaatcatagaacataatacacattaatttatacaatgtacacacattnnnnnnnnnnnnntatgcacaatatacactaatttatacaacgcatacataaatataaattcttatagacaacacaccttattgtatactatatacacacgaaatacgaaacaattacatacgttaaaccaaaacacaaaaacttaaactagtaaactacaaattaaataataactattatgtatctattttaacaataatacattacaacaattatatataactatacattaatatacacaataaacattaacttatacaatttgtatgtaaattaaaatattatatacaatacactttaccgtatattatgtatacataatgcacaaatcaatttgtatggaaattctagagatcagtctcgtcgc

SEQ ID NO: 107051 - DNA, 793 bp, Cannabis sativa
aagattcaagagaacttagaaagcatcttgatgaggtcaatcgaatcattctggacctcagcaacataggagtgaaaatagaagatgaagatcaggatatcttgttgctcagttcattacctaaatcttattaacactttgtggacactatcatttatgggaaagaaaccttgaccatgacagaggtcaaggcagccctcaattccaaggaaattcaaaaaagaatgatgaaaggtctgatggtgttgcagacagcttatttgtcaaaggcaaaaatgaatcaaaagatttcaagggtggatacaacaagacaaattacaagaacaatcagaacaagggacacaatcatgggtacaaatcaaagacaaaatccaagcaaggaaaacagtgttactactgtaagaaggaaggacatttcagagatgaatgtagggcactcaaggcaaaattaaacagagaaaaaggtaaaggaaagaggtgatgcatacatttcctttgatggttatgagtctgctgaagctttggttgtgacaagtcaagaaattggatgtgattggattcttgactctgggtgttcattccataggacaccgagaaaggaactgcttagtgaattcaagaagattgagggtggatcagttatgttgggggacaacaaagcctgcaaaatctcaggaacgggaagtgcgttgatcagaatgcatgatggtcaagtcagactcatacaagaagtcaggtatgtccctaaactcaagaaaaatttactttcatttggtgaacttgtatctagagg

SEQ ID NO: 107052 - DNA, 1494 bp, Cannabis sativa
  modified_base (1301)..(1301): a, c, t, g, unknown or other
acaatgattagagtaattctcaattttccatctagactccaatctattgagaagagttgatcaccaccttagaatcactttctacaattacaaatttccatcccttagtcactgccatatccaaagccaaatagcaagcatgatccttaccacaaacggaatttggaagtctaaatgcgtagtagtcacccaaaccacttcactttaatggtctctaataactattgtaatacacatgttctccatcccactatatcatcacaattcagtttcaaccaatcttaaggaggagggcgccaaccattcaaaggactcgaagtaagataaggaataagaaaatttttgtaatctggacaacaataattaataaagtcaatctaatgttttatgttatagaaataattattatattacaacaatcatatctatatcaactaataccatataaatagtgccaaaaatcatataaaaataccatatttagcattattgtaaattaatatagaattttaaataattattattataaaaaaactaataacctagctaattattaaaaggcactaataatgtctagtagtctcttatatattaatattgttattggtgcaattaaatatcgaatcccattaatttttatcttttatcaagagctaaaacgaggtcaagttatacaactggtagcaataacccttttttcagccatcggacgtggtaactacatgaatacaacccattttcgggatattttagaggaaccaacaacttttagagagtatcactgatcaattgtaaggtaatatgtttagaatgtgctaaattaggaatgttcattttttccatggggatgggccccgtagagccccgcccctaacgaggctgggattccccatctaaatgggaaactaggtggggacttagattattttttgtcctcgaatgttagatggggcgaggacggggatgacactccctgccccgatagggacttatttaatttattaattatctttttattaatattatatattttataatatgtgtttgtatttattttagtatattagtgtattttttataatttttttgagttgtattttttgtttaataattagtatattctctcttttgttgggagtatcacattgattaattcagtcctcatttcgatacacatttgttggagtcaaatttttttgattcctaaaaatatcccgaaggctataaatgcaatttgtcgatttaatgcaatataataattaatgtatactattttaatttttatgtaatttaataatttnatacatttaaatttttaaaataatatttatttttacattaagagattttttgtcgtctctgctacgtagtacgtcctcgatagagaataaactaggatggagacggaagagcactccgcgctaattttctaccccgtgacactactatggtaatgttttattttaagatcacatgttatgtctcctattaaaa

SEQ ID NO: 107053 - DNA, 540 bp, Cannabis sativa
agatttactaataagtatgttgaattaacatactaaatatgaatatctctaaaataatgaaattaaacacatcagaatttagtgaaccttactgttatagtgtgaatttttcacctaaaaactcaagaccaggctcccataagtatgacacgtggattcactctccttgaggagggctgagttgtcagaaggagaccacttgagtaaaagccttgcctgaactagactcagcgagatgatgtgaccctgacagagtctagttgcattattatgcctcgcatgatgcaggaccgaagactgggtttaagactcgcatataccaagatatatgcgaagatcatcaaggttttcctgtgagttagtagagatcgattctttactcagcgagctggtctggatggcctgatgcactcgatgacccgataaggactcgcacgtcctaagttatcgactttttacaagatatccacatacgtgacttaactaggatgcaaatatcttaaacatgtatgacttgtttagtcttgtatgcatcttaag

SEQ ID NO: 107054 - DNA, 556 bp, Cannabis sativa
tatcatcaaacaactgacttactttgaattttttccccaattccatagataaattaaagaaaatacaactccaagaactttcactattgtctctgaacataataaccgccaacttccagtctttagtgcattgtttagcacttaaatattctgtgaaatttttctggttgagccgctttgctgggaaattgtttttaaaccaaaatcctggcttgaaagatggtaaaaaatcccattcaccaagattgccatatttcatattcctctgttgcttctggtgtcgtccactctcatccctggctttgcttccatatttttgtggtgctacctctttatccaccgactgttttaccacattagcccatgaagctttattgtttgccacagggatatcttctattcgccccatgggctttcttctcaataagctgctaagacaatcttcgaactccctccagcctctcgcctcctattcttcaggtatgatcaccatctttaccatgttgtttctcagtacaaagatcttaagaactacacccttcgtattctggaagac

SEQ ID NO: 107055 - DNA, 540 bp, Cannabis sativa
  modified_base (229)..(233): a, c, t, g, unknown or other
cttgttcaggttctaattttgggtcccaattataggcctaggtttgggtttggttcttcgtttgggttctggtcctagtctgagtccaagatctagacaacgactattgttctattccaagccccgttacccgaatcccaagtcaagatctggatcactgtcacgggtctcggtctggatcttgttcaggtcacaggtcccatttctaagtttgggttcgggatcgagnnnnnggtgcggttctaggtcctgaccctggttctgtgtccctagtcttgttccatgttttggtctgagttcaagttctggttcgggtcccaagtctaggtttgggttgggatctgagtccggctccgaattcgggtttaggtcttatttggagtccgggtcctagtccagttacggttctggatgtaggtccaatttcagttatgattccatgtctaagtcccagttccagtcttggtcaactaccagtttttgtaccaatttcgggttagagggtacgggttttggtccacttttgggtttgggactggg

SEQ ID NO: 107056 - DNA, 914 bp, Cannabis sativa
ggtctattggatcatgttcatactgagtgtgtagcgcttttggaggagattgaggcaggaactcaccaatcttacagtacgatgataagatcaaaacaactggtttagataatatgttttctccggttcgcttttcaactactggaggacctatacataaattagtgactcaaatggctaaggatgctaccctaaagaaagctaggagtgcagtgctgggattaaccattaggcagcagaaaatcttaatatctggtaattgctggttttttaatctcatttagattgtaaaaataaattcataatgttttagtttttttttctaactcttgttttatttaatggaatactagatcaagagcaaggggcaacttacactcatagaactataagtaatgaagaagcttctttgctgaattagaaaccgataggttcaaataagagtgacagtactaatatttccttcatagagagtggtaatgcaggagagaaaacaagaagttcagagctatcgatggggaaaacaattgaagtggaggctaactctggatcgaaagtgaagactaaaaattccaaggcataaagactcattgacaaatgagataggattgctaaatatttcaataagtgtgttggttgtttctaagtaaaatagataactattattgggtggatttaaaatgttatgttgtgtgtttattttcaaaaacacaagtattggatgttttatgcttttaagtatatgttaaataaagtggaaacaagaatttaagtataattttttcttgtcatggtttttaaaacttaaattacctattttatttctcaaatatcaaaacttgctctgtatgtggttagagtgattgatacaatttttagttttgaagttaaatgagagaggaatgctacactta

SEQ ID NO: 107057 - DNA, 1067 bp, Cannabis sativa
aggcataaatgacccgaagcctttaggccttgaacttgatcgattaaggggatcaccattctcagcatacataaatgcattgcccttgcccaagttcaaaatgtcagtatgcaagatgtatactgggtgagaagacccactggctcacatgaaatactttgagatgcaacttgatctctacattgtcagagatagctcaacaatggtactttaaactcaccccaagaagattcaactcttgggttgagttctcacgagaattttacacacaattcttgtcctcgagacttgtaccatcgcagctagaagaccttgtccaagttaaacagcgacaaggggaacctttgaaggattacatccagaggtttatggctgaggctaccaaagtcaaaggccttacagaagaaggtcggtatatgaccatactgggggcatactcccattgagtgacttttggaaagatatccggaggatctccaccagccacatgaaggagttccttgatagagctgacagccttatcaaacttgaagaagccatacgacaagcccaggcggggcatgtcaacaacacacagtcatgaggcatccaacagcctcatgacccccagacacataagtagacacaagtaatgtttcccagacttttagtggcaaaaatactagaaacaagcgcagcaccaacaactctgggaggaacaatggcaaaaaggggaagttcaacacttctttcgtgccacataagaataaggaggagaagtacacttgcttcaccttcctaacagagaagcctgaggccatcttcatggccactcaaggaagagtcccataccaaaagccctttcctatcataaagaagatgggaaaaagggacatgtcaaagttttgcaaatatcacaacgacttcgagcacgacaccaatgactgtcaacatctgaaaagggagattgaatacctaatagggcgtaataattcccacttgtgtcactaggtgcaagacaaccagacccaggtgcaaggaggccaaaacggagatccaatgccaccgtttggggtaggacatctagg

SEQ ID NO: 107058 - DNA, 698 bp, Cannabis sativa
  modified_base (391)..(394): a, c, t, g, unknown or other
atttccaggccacaatgacctataggccaccttatacgactttggccaacatcaagcaagaacccggtgagtctttacaagactattttaaaaggtttaatgcaaaggtaacaaaagtcgagaaggctccccagtcttcgcttgtttgtatgttgataacaggtattttgccgaggaccgacttcttgaaggaattacaagctcggagaccagaatcgctagttgaattcttcgccatggccgaaccccataagagaatcgagaattctctggcagagttggagaagggtaagaataagcgcaaatcaccaataccgcgatcaagatctcgcagtcctcgagggaagaattccaggggccgaagcccaagaagacgcagcccacggagacnnnnaagtccaaagttggccaagtctcctcccaagaaggagtcctcgccgaagaggaagggaggaccacgttttgttaactataccgaactcgcagtgccccgagaccatatctatgcaatcgaagaaagaaatggagtcttcaagaagccgccccccatcaagggaaatcgcgacagaagagaccccaaaagattctgtaagtaccacaaatacattggtcataccaccttagaatgttgggttttgcaggatgaaatcgaggagctgattcggagaggaaaattcgataagtataagaagggcgag

SEQ ID NO: 107059 - DNA, 594 bp, Cannabis sativa
ctcttctccaataaattgatcataaacatatatatatttgagttttgtgaaattgtgaggtcttttttttcttttttcttttgagagagagagactcagttatattttgggtctcttatatatatatatatgtaggaacccaacaaagcccagttaggcagtggtcaccacttacttttcactattttccattaaaaacatttttgtctataaatggtttttttttattattatttatttaatattatcttcttctttttcttcttttttatactttttttgtcaatagtggacacagtttctcaaccaatcaacattgtttttccaataatgaataataaacaaatacaaactacaaagtagaatagaaagtattttgtatatttgtatatatatactaatctctcattttcctagtaaatggaaattcagtaaatgcataacagcaaaagggtactactacattttggggcccattatatagcaaaaaagaaaaaaaaaaaaaatactccatttcaacaaaaaaataaaaatagaaatatgggaaaagtttcattatatcaccttttgaaaaaaagagtattgttattaata

SEQ ID NO: 107060 - DNA, 523 bp, Cannabis sativa
  modified_base (359)..(366): a, c, t, g, unknown or other
ctgaatccaatcccaaattcagcatctcatttatgctgacaacttttgccggcgcaattggtcaactgcgccggcaaaagtggcttttcttgtagtgaagacaatatgcactacaaaaaagtattacttttagtgagaactttttagtcacaatataaagtttttgtgacttaatgtgacttttagtcacaacaaaaacttactagtgactaaaacatagtatttagttacaagttgccactaatttagtttagtcacaacaagtattgtgactaaaaacacatttagccacaacaaattatattttttgtgactaacacatttagctacggtcgatattttagtcacaacataagaannnnnnnntataattagttacaattttttttacttttaatcataaaagctgtgactaattgaagtaaaattttatgtagtgatgaaaacacaccaagtcaccaacatgaaaagaaaaaaaaaagaatttcgtacgaaaaaaagaaagaaacttacgatcagttaa

SEQ ID NO: 107061 - DNA, 642 bp, Cannabis sativa
  modified_base (26)..(37): a, c, t, g, unknown or other
tgttatttctgatctttattagtaannnnnnnnnnnntgaaatagattttatttagggcacaaaacccaacagtaaattcgttgcattaaatcattttatatcacgttcctctgattaatgtaaagaattctttcagattctaaaaggtaataaaataattcagtggactgataaatgcgaggaagctttccaagccctaaaaatgcatttggggcaacccccaatgctgtccaagccaatgcctagagaagttttgtcaatctacctagcagtatccgaatacgcgattagttcagtactaaccaacgaagaccaaggtagacaacacccagtatactacatgagcaagcaccttttggattctaaaacctagggatgtacataaatttttgtaaaccgcccaaaccaaatcgagataacccgacgaaaaatataaactaaaaaacgtgatgaaaatataacccgcccaatctttatattgggcgtgttgaaaataatactaacccgttcaattaacccgagctaaaccgatcaacctgattaagatggtttttttatgtatatttatatactatataatttatatgattatattaaaaatataaatttcaaactactatattttttttatggtggttgat

SEQ ID NO: 107062 - DNA, 1326 bp, Cannabis sativa
tagtggtttggatgatcttatggtatcttatttctacgagcttttttcctcttcccacaccgactggagagaagtcacaagcagcgtgcaaactcatgtatcatcctagtagaatgctgagctactgttactaatttcagatgaagaagttcgaaaagctttgttccaaatgcatccagataaattcccagggcctgatggaatgaccccgagtttttttcacaagtgttgacagattgttaaggatgatgtcatcaatatggtgaagcagttttttcttaatggttctcttcctacagaccttaacaacaccattttggtcttaattcctaaaaagaagcagcctatggatataggggatttaagacccattgcgttatgcaatgtgctggataaggttgtgtccaaagtggttgctaatagacttaagagtgttatgccgtgtatcatatctgatacttaaagtgtatttttgcaaggccgattgatctcggataacatcataatttcttacgagattatgcatcacttaaagaggaaacgaagagggaggaatggttatatggcactcaagctagatgttagcaaagcatatgataagcttgagtagggttatctccgggctatgatggtaaggatgggctttgatggtcgctggattaatttagttatgcaatgtgtttattctgtttcctataccatttcacatggtgggaaggagttggggcccattattgctcaaaaagggttgcgccaaggggatcctttatcaccgtatctgtttattctttgtgctgaaggtttctctagtttgttgcagagttatgaacaaagtggcttactcacgggatgtaaaattgctcgaggtgcgtcggtaatctctcatatgctctttgctgatgacagctacatttactgtaaggaaattgaggaagaagcatacaatgtgaaggagttgctgcatacttacgaggtggcttcggggcaaagaattaatttctctaagtcttctgtgtttttcagcaataatattggaattaaggtgcgggattccatttgtgctatgttggaaatttatgaggctgatgaaaatggctattacctgggtctgtcgtgttccgttgggagaaataataatgctatccttggttttcttaaggataagcttcggaagagaattcaagggtgggaagggcgtatcttatctcgtgcgggaaaggatgtcttattgaaatctattgctcaagtcttgccgagttatgctatgaatgttttcctcttgccatctgacacttgcaaggagttagagcggcttatggccaagtt

SEQ ID NO: 107063 - DNA, 753 bp, Cannabis sativa
  modified_base (576)..(578): a, c, t, g, unknown or other
  modified_base (697)..(712): a, c, t, g, unknown or other
tccaactcggcattatgccggtttgctccctccaatcgatgcctaagatggcaattttctaattccacgatcggtatgtatctagttgggtcgtaagcgccatcctcatcaacttaactggggagtgaccgatttttgctcttccaaggtccgtcaagccaagggccccaatactaggtcctcctggggcttgcattctgtacctgcgatgactcagcagatccccgaggactcaatgattcttttccgggacgatgattaattccttcttgaggactattaccggtggtgtcatccatcacttttatgtcaggaggcttttttctgagctttttcacaaaggctctcaatgaaagcaccaaactgttaacgcaaatttttgttaaccaaatttgagcctcacgaatatgattcaacgcagaaaagctatagaaaaagaaggaacaccgaatttttacgtaattttgcagttaaaattctgcatagtccacgagtcaatcttattcggatttctgagtctttttttttatcccctttcttgatcttatctgcaactatttataattgcatagtggnnnttaattacaaagctgaccaaaatacatttatggctattatccctaaatcatgggatttgattacaaatcaagccaaatagatgaggtttttgttggaattatatttatccaggatcttnnnnnnnnnnnnnnnnatgttgatttaacaacctaatattgaacttctaaaacgatg

SEQ ID NO: 107064 - DNA, 770 bp, Cannabis sativa
atttttgaaggtgggtgtgtgtggtgtgaatgtgtgtgactaggtactgggtgggtccaagttatattgttagattatattgtttataatcaacatacatgttactaaattaagatcctggtcaaataagttctaacagttcttccccaagacatccttgaaaatcttgttcaccaaaagttgatatgttactctgacattcttgagcccaaagggcatgacaacatagcagtacacccttttgtccgtgtggaaactggtatgttcttggtcagctacatgcatcttgatctaattgtagctggagtacgcgtccataaagcttagaagttcatacttgacgtggcatccatcatttgatcgatccaaggaagtgggaagcaatctttcgaacaagccttgtttatgtctatgaattcaatgcacattctccatgttccatttagttttcgagactagcactaggtttgctaaccaaatctgatataaagatttcttgaggaactctataaaggttagtttctcgatttttgttttcattgcctcaacctagaccatatgtaatggtcttctcttctgtcagaatgggtctacgtctttgtcaatgttaagagtgtagcagattttaaatagggactgatgttagtcatgtccgaatggctccacgtcagtacatcttgattcattttcactatggacacgatttgttctttgaccaccaaaggtaaattttgtcctactttgatgattttcataggatatgtcttatt

SEQ ID NO: 107065 - DNA, 637 bp, Cannabis sativa
ttcacaaacatctctatattagaatttttgaatgtctaaagatgacatttagttggaagtaataaaatagaatagaatggaaagaaaataatttttattttatttatttgtttggttacatttaaaattattggaatatcattctaatggaatgacctttcagctttttgatggagtgactattccattttaaaatggaaggaaagaccattctaattctaaaacaagatttgaaaatttttaataatttttttattttatgcattttaaattttattccatttcattcctatttcaattctcattctcattcttattcttatattttcatttatctaaaccaaataccacctaagatctcaatctttcacaagtctttaatagaatttctttctaaaagaaaccttggatgattcgaagataatatgaacataaagcatctctaaatcaaaagtacaaaaaaatatctaaatcatctctattttatttatctttcacattatttttagcattgttagaccatctctattacactaatttggtataaaatcttttacttttagtacaacaattccaataatttacactaaatatgtaacgccctactagattaaatacgttgtcgtgattttaatta

SEQ ID NO: 107066 - DNA, 1415 bp, Cannabis sativa
  modified_base (932)..(935): a, c, t, g, unknown or other
tctgacagtttgtgaacctatcttggagtgcttctgtcttcacactaccagaccggttgaaatatttgttaatcaatcggatcgaccctgagcgagcaacctgcgcagccttctcctcttctgttggccccgaggagaagtccaggcccgtaataagggcaaactcaagcactccgaatctgagctccttccgaccaatgtaaaaccgcatcttcaactcctcctgagcatcaaccttaattttgtgcaacatcagctagtgaaataacaccgaggagaatgtcaggggtacgacattccaaaattgccgaaacgactttccttcgccgtgttattcaagttgtactcctcaaactgagccttgatttttgcaaaagttccggtgcctctatatgtcacgtggccagtaaaatgctcgggtggtggaattatgagtctgggagccatttaaaaaaacaaataacaaatcaatattactgcaaaaaaatttaaaaaatggtcgacaaaatatcgacatcctgtcgatattctatcgacattatcaaacagccaacaaaattaaagacatgtcgacaaaatatcgacattctgtcagtattccgtcgacaatatcaaattaacaacaattacaaaacatgccgacaaaatatcgacatcctgtcgatattcagtcgaaaatatcaaacttaaagcaacaacataatattgtcgacaacatatcgacatactgtcgacaagctgtcgacaatttagggcaaaaaataaactcaatcaaatatcgacatcctatcgatacacatacgatatcctatcgacattcaataacaacacatacagacagacacccagaatatcgacatcctatcgatatcctatcgatatttcatcgataacactgtaaaaaatacaaacaccattgaaacatatccaannnntacaacctatcacaagaaagagcacaaaaatctacacaaattcaactaatctcaacaacatgcaataattagcatccaaatctatgaaaaaattaatttttttttcaaaaaaaaaaacttacctttgcctgagctttgtggttgcggcgacggttcgtggatgtggtggcgatggcctctgttcggtttcgacgagcacgggtactggtggtggcgactgttcgtggtggttcgtggtggtttcgacaagcacgggtcgaattcaagaccgaccgagagagagagagagagagcaagaggagaaaacaaaaatagatagagagagagggaaagatagagtgggaagaagaggtttgttgggttcgacgtatgcgtggtcatcgtcgggttgggtttcgttgttggattctttcgtttcgtgggcagggacgaaaagggaaagatggagggagaaatggaaagagatagagagagagagag

SEQ ID NO: 107067 - DNA, 517 bp, Cannabis sativa
tgtgaagtggttactaagatacttaaggggaacaatggatataggcctgatctatggtccaaacacaactactactcaaatagaatggtttgtggattcagattatgcaggagatttagactgaagaaagtcacaaaccggttttgtgttcagaatgtataacagtgcaatcagttggaaggctaacctacaaactgtagtagctctttcaacaaccgaagcagaatacattgcttgtactgaagctgtcaaagaagtactcaagctcaagggaatcatcagggaacttggtgttgagcaaagcactgttgtcatccactgtgacagtcagagtgcactccatctaagcaagaatcaggtcttccatgaaaggaccaaacacatagatgtgagataccatttcattcgagacacaataattgaaggaaatatcaagctccagaatatttcaacgcatgaaaacccctctgatatgcttaccaaaaccacttcccacaacaaaatttaaacattgttt

SEQ ID NO: 107068 - DNA, 598 bp, Cannabis sativa
aagatttggcatcgcacatctccagacatttgtaggagatccatttagatctcaaagtacttcaggtgtactagagggtcttctcttcccgtgtacatcttccaagccggcatcttgaatttgggcaagggcaaggcattgatgtatgccgagaatatggtgatccccttgcactatctggcttaagttctgagggtttcggactagctagacccttgagcatgtcacatatttggtccaattgttcttgcacagaaggatctattactgcaagggcctggttgattggcattctttgattaagttgtagcctcagattggacaaagcctagtcgaccataccttgggagagggtatactcaaggccagtcggccctgagtctggtgctcctacatggtcgggcagccccaagctgggtagggtctgaccgcccatttttctctgcctgactagtggattttgtgcgtcgacatggagtagatcacactgattgctggagtttggtgcatccaactgtctgaagtgattaacttcacttttcaaatggttgttttgggtgtttccacccactcccagtcctcgtcggttgaaaattga

SEQ ID NO: 107069 - DNA, 609 bp, Cannabis sativa
cacgtggtcggggtgatgctaccccgccacaggttgcccaagctgcccaagctgcttaggatgcccagaattggtaaaataggtttgcagaaatgcaaactagaatcaatgaacaagaggaagtgattcggcagttaagacagcagggtgctcctgcagtgcctgttccacaaatgccagtggcacctgcccctgctatgcaagccgaaccggtggttgcaatgagccggatggaacccctatatgaaaggttccgtaagcaggcacctccagttttcctgggaggtcccgatgttatgaaagctgagcaatggctaactgtgatcaccaggatcctaaattttatgggcgtcacgggtaatgatagagtggtttgtgccacttttcaatttcaagaagatgctttagtttggtgggatatggtgtccatgattcatgatgtgacaactatgacctaggagaagttccaggaactgtttaatgccaagtactataatgaggcagtcagaaagtgccaagagaaaacaattcacccatttgactcagaaagaaaatatgagtgttactgagtatacgacacagtttgatcgcttggcgaggttggcctcg

SEQ ID NO: 107070 - DNA, 614 bp, Cannabis sativa
ttacttgcatagaagagacaagtggaggtgagcaacctgacaaagctacagataagttctagtcaactgtacccaagagtaccttccaggtaaatcaaattttacaaggctaagtatctgcaaagtatcctctcaagtacatttacttagacaaatagtgagtcctaagttgtgcactcgactataatgtactcactaccaagtctcacacagatttcccaagggagaccacacatgagattacagttgtatatgcctccaaggctgccacgagaccctagccgaggtcaatagaggacaaaagactagttgcccgcttagaaccttggccttggccagccagagttcccaaaacttagagggtcggccaggtcccatgacccagcctatggtatcccccttggctggccagaccccatagtgaccaaccatggccgagcaagtattgaacaagactttcttggccggccaggaggtgtacaggatctgaacatgtgttttttgagaactcgaagacgttctttgtgttcttcgtgactcaaggagccaagaatcacaatgaaggtcagaattagatctttttcacctagaaatcacacattacatattctaag

SEQ ID NO: 107071 - DNA, 751 bp, Cannabis sativa
ttttttttgaattggatggatctagtctaatctaatacatattggacttaaaatattaaattgatccgatctgatccaaaaaatactaggcctaaaatattaggtaaatttaaattaaactaataaatatatataaaatacatccaatagatagaatcgatcaaatccaacatctaatgaatgttggatcgatcaattagatgactgaaattaattggatcaaatctaaataggtctaaaaatattggatatgatccaataaatacctttagaaataaatataaatatatatatatgtatattttttttttaatgtagaggagtaggaaaaaaagatcgtactttgggaacataatttaatgtatttgaagattattagcaaagtaaaaactaaaatccaatggtgcatcattataaaatgcatcccatgacttattagccaccaattaataatttatttatttttaccaattaattattgattaaggggaggtgtgaaaaaaaattctcagctgtaatctcattcatatgacatgtgagttttcccccgagaatgatatgatatattattcaattattctgtgtttgaaaatgttattggcgtgaattttttttagacacactacaaaaatgtcacttttaccagcaccaatcgttattgcgctggtaaaagttacttttaccagcgcaagttacttttaccagcgcattttacaaactacgttagtaaagaggtcaaagttttaccagc

SEQ ID NO: 107072 - DNA, 793 bp, Cannabis sativa
taaattaaagtatagtgtattgaacgaaatatgtctgtttgagttatggaaaaagttagaaaaactttatatgtcaaaattcctaacaaatagattatatttgaagaagcagttatatgaattaaaaatggttgaaggagaagatgttagggatcatatatatagacttaataagtgcataactcaattgttaagtgtagaggtcaaaattgataaagatgatcaagctattagtttgttggcgtttttaccaaaatcatatgagacactagtagctacacttttggttgaaaagactactttaactgtggatgaggtgtcaactgctcttttgaagataggtagtatcaagcaaccaagtggtatgtctcatactgatcaagctcttgtgacaaggtcagaatcaagtcgtggtaggagtacattaagaggaagatatgatgacaaaagagacagttgcgctcattcagactcttagagggaagttgagtgctactattatcacaaaaaggaacatgtgtaggcggaactgtgaagagttgaccaagcatcttgaaacaataaggaatcaagaatgcaaagacctatcaaattccacaaatattgttggtgaagtctttgaaaatgactctgatgttctctctgtcatagctgatgaaaactattatgacttttgtattttggattctggttgttagttccacatgtgcccgtataaggagtgttttaacacttataaggcatatgatggttgtactattttgatagataatgattctagctctaaagttgt

SEQ ID NO: 107073 - DNA, 741 bp, Cannabis sativa
cattgttttgtatttatgccactgattattattatgctcaaataatatagaataactcaaatcagttataattaaaaaaaaaaaagagggaatcggttctaacaacattgaagcataaattaaatagaattgattctacaaaaaataagtaaaaatatacaacaaacaactactcagaaactggttataattaaaatagaacttgttctataacatagtaaataaaaataaataacacataataacttaaatcggttatagctaaaaaacaaataggaaatcagttcttaaaacactgaaacataaataaaaaacaaaactagttccataacaaaatgagtaaaaatgaataacacgtaataccttataaaaccagttataattttttgagaaaaacatggggatcaattccaaaaataccgaggcataaatataaacagaactggttccataacaaaataaataataatacacaataactcaaaatataatataacaaacctggttatatttattaactatttaaaaatttaaataaaaaattggttccattaaacaacaaagataaaaaacgtacacacaaaaaatagttaaataaaaataaataaattaaaaattagtttcttgaattaacaaaatcaaaaatcggtttctgaaatgactaaattaaaaactagttcattgaattaattaaattaaaaaactagtatctctgaaatgacttaaataaaaaacaggttg

SEQ ID NO: 107074 - DNA, 536 bp, Cannabis sativa
acccagacctgaacccagtcccaaaccaaaaagtggacccgaacccctacccctgttacccaaaattagaaccaaattcagaagttgatcgagactagaactaggacttggactcggaatcataactgaaattggacatagatccagaaccgtaaccgaacaaggatcgaaactccaaatcagacctaaacccgaattgggagccgaacccggatcccaacccaaacatggactcgggacccgaactggaacctgaactcaaacccaaacatgggactagactagggacacagaactagggtcgagacctagaaccgaaccatagtctcgatcccgaaccaaaactctgaaatgggacctggcacttgtaccagaactagatcgagacccgtgacagtgatccagatcttgactcaagattctggtaagagggcctggaacagccattagtcggtgtgaagatctgggtcccagactaggaccagaaccaagacgaagaaccaaacccgaacccagacctagacctgggacccaaa

SEQ ID NO: 107075 - DNA, 617 bp, Cannabis sativa
tttgtgggagatatggtcctcagaagggtactcttgaacactaaagacagtacggcaggtgtgctgcccgtgaaagtagaaatccaattttctctcaccacatttgacggttacacttgattgcttttgatttctaatattcgcttttgggggaaccgaggcgtctgaggtttctaaaatgattaccccttttcgttgtgttacctataaatactaccgagcatttgtttacaaactcattttcaccaaccttcattgttaagcaagtttagagcaaaaagagagatttttagcttcaagcttgttggaaaacttacacaagaactatttgttcagctttgcgtaaactgaatccagacgccaatccttgagtaagttctcgatttcttttacttttacacatttactttctaaatgcgaccttaactttgttgtagaagatatatagaaaatcctaggtttagaaactttgcgattttcctttgtaacgattcatgcgacttcagcattgataatgctttctttttgaactacacaatgtctttctttcattttgcttatccaaagcttcatgaaatttttgccctaactcacgaaaatttcaaacttctgggttt

SEQ ID NO: 107076 - DNA, 534 bp, Cannabis sativa
aaaagtgcctatctaacggcaatttttggtttaacagaatatactttacaaataaaagaatattctgttaaatttaacgccaaaagaacagtccaccattttttttaaacgttctttaactatccccttcttcacacgattcttttcaaatggccctaaagctaagccataatctcactctcaatcccaatcccaaacaacttttacccattccacatcaattgatataccctttaaacactctctacaacagaaattccaatcgcaggtccgggtggtgttggtgttggtggtggtgcttgcttgcttttgccttctcagcccaacaacgatctcaccgacataaacgactcctcatcttcttcctctgatccccttctcaccaagctcgaagacggcatccaccatattatcgtgcgccgatccgctcccgattggctccccttcaggcctggatcatcgtactgggtccctcccccgcgatcttgtaagtgtgggctgacccagctagttgagaagcttgctaatcctttg

SEQ ID NO: 107077 - DNA, 564 bp, Cannabis sativa
  modified_base (259)..(259): a, c, t, g, unknown or other
tttttaaatgtatatacatatattcataggctccttatattaaatgtttttgttttgggaaatttacatggtatactaacttttgtcatttttttataaaaatattgtcaggcggtattttttacttttctactgtatttttttataagtttcatactgcaagatactatgttaagttttcactgttgttctaatggtattttttagttgttctactgttgctttgagttgttttgttttgtgttctactagtgttttntaaaaacacagtattttttaaaaaaaaatcgtgtgacagtatttttgtaaagttaacccaaattccagtatttttgtaaaacacaatgttttgtttatttatatgaatacgcgcattgtaaataggcacctcaaggtgctcaacaccatactgatgtggtgcgttgtgagtggttaacgatttgttatattatttattaaattaaaatgtataaaacatgatactaaattgcaccaataataatgtgtcacctcttttttggcaccttatgacaccccttattattttgctatgaatatatatat

SEQ ID NO: 107078 - DNA, 858 bp, Cannabis sativa
  modified_base (143)..(157): a, c, t, g, unknown or other
atttcgaataatttacaatatagaaaacaatgttcaaacagtctatttcacacgcgtataaaataaaatagtcacgcgtgcaacacactgttaaacgtagttttcggcgtgtcataaactttttcaaatttcttaaaattttnnnnnnnnnnnnnnntaactataacgtacatgaccatgataaaaaatttgactaaaaaattatttcgggtactaaaacagataaatgggcatcaatatatccattttaagagaatgcattgtagaatttccctatttaatattattctcaataatatatatactaggtgaaagacatatgaaagaagaatgaatatgaatgtacatgtatgcactaatcaaacccatatacaagaataaaaagtggtaggtgtgagtgagtgtttacttgttgtgaatggatgtctttttcagtgacaagatgcaactctttaaaataattttaccaatcttaaagctggtatggagaggtttgctgtcctaaatcaattacaaatgaaagataggttgttgaattgttcaatatatcattacagatgatagatgttttctttgtgatcaagaagatgagaatatttcccaacgattatttggctgtaattgctaaaatggtttttgttttaaaaagtgctgttaggatataaattgattgaagcaatacaactttttgatcttctaaaaaaaattaatttgagcaatataaaatcggttaaatttaactttttaattgagtatattttttctgttaaatccgtaataaattatagttaaatagagatttatataattagtaagatatataaaatctcaaagggcttaaagttcataaattaacat

SEQ ID NO: 107079 - DNA, 596 bp, Cannabis sativa
acttgttcttgtccttgctcttcatctgaactaggttctctgtgtgttgtaggtgtatccacctgatcagtaatttctgcattctcttggtctgtctgaagctcaacacttgcttctcgtgaatgttctctgtattggcaagtttcattgccatttcatgctccttaaacaccacatctctgctaatgatacacttcttgtgtccatcttctagacaccacaatttataacccttgacaccatcagggcaacccaagaataagcatttgatggctctaggctctaatttatcttgtttaatgtgagcaaaagcagtgcagccaaagacttttagatgatcatatctacgtacttcacctgtccaaaactcttgaggagttttaaatcttagtgttgttgaagggcatctattaatgagatagcatgcagtttgcagtgcctctccccaaaatttcttgtctaaaccagcaccctttagcatagatctcaccctctctagcaatgttctgttcattctctttgcaatcccattttgttgtggtgtcttcacaactgttttgtgtctagcaatgccattgtcttgacaaaactttgtg

SEQ ID NO: 107080 - DNA, 580 bp, Cannabis sativa
aaataagagttcatgtatactcagcatattgatctactaatgatcatcgttgtgatatgaataactctttcatggtaaacgacatgttgatgaaagatgttattacatatcgatccagtcatgtatagtcaaattatacacaaagtacctttactacatgtttatccacatatgtaatctgaatcaaaatcgcacgcattaaagtatagtgcatagtaaaccatacttggaaatttcatattaaagattccttactttaatacactattgacttggtttattcgtattgtattatcttaattcttttgtacgaccttacaagattataccatctctatatgaataaggaatttttagatattattaagtatacttctataattaatgtatatatttatcttataattatattcatatattctataatatattatccattaaatacttacttttaggacacaaaccctaacgacaactaccttgactgctggcgccaataaatctccttttgatcatgaataataaattatttcttctaaattaactggaactgctggtttgaaattaaatcattcttatt

SEQ ID NO: 107081 - DNA, 548 bp, Cannabis sativa
tggtaaaatatttccaacactataccatatacaacaatccttacgtaatagaaattaaaatcgagcccttaaacggaaaacgccattaaagctcaaacttaagctttgaaaagatctaaactcaatttgtaactcaaaatcacctcaaattcaacaagtaaacatcaaaactagtctcatagctactcaagaacaattccatgaagtcggaatctccataactgctgtaaatcaaaaagtcactatataaaactaattgtattaaacttaaaatgaaatcaatcattaccttaagctttccctcttcaatgatttactatcctactactactgtgcttgaattactaggtttcgagttgaaatcgaagaaaatagattaaggggaagagaattttatcgcaccgaaagagagggtttcgtttcgttcttttctgtaatgaatttttaaacttaataagtttaaaaaaaataaactttattaataataatatattaatattattaataataatattaataaaactttattaataataattatcttatta

SEQ ID NO: 107082 - DNA, 582 bp, Cannabis sativa
aaaaatgtaaatattttacaaaaactagtatcttatataattattcctattaaatattattattattaaaaattaaattttaatatttattcacaaattattatatattatgtatataatactagttggttgatttgttgtgttataatttggttaaagaatgaattattatgttgatgatgatgatgatactagtcttggaaaatatgtttctttttgactgctaattaagttgcaataatggaccccggctgtcattaattataattatatatataaatatctaaaaatatattaattaaaaagatcatgaaaaccagttcattattttttcaaacatatatatggttttaaccttaatcatttcgattgtgatgtaaaaagaattatatattatatatatatgtacctggtttttgtctccatgcataatttcaaaatgttttggatcaactgtgatttgaatcatgattcgatcgtatataatactaatcaatataatatatacatatatatatatatatatattttagagagagaatctaggtcaaaattctatgtatcttataacagctttaatac

SEQ ID NO: 107083 - DNA, 658 bp, Cannabis sativa
tactaattaataaaagattagaaaccattcaatgttgcatggttcacataatttatttcatgattatgtttaatgtgtaaattctattaagtttagaacgtatatatgtattggttcatgattatagtgtcgtcaacagagtagagtataatcatgattacatgttcaaaagtttaagtcccatgatttgtcagtaaacttgatttagactaacatgataattggcaataaggtatgcttacaccttaaataagtgttatgtcctttctagggtattggcgaagtttacaagtatcggatgtatagagtatacatttgattggaccaatattgatcttagataagatatcataaacttactgttatatctttatgttcttcaagtttttcatgaaagttaaccaattgttctggtagatacttaatcttgagaatatggtagttcaattgagtgggagcgctaataataaatatagagtctatagtttctataattatttagaagtgaaacgatgatttccttcgagcttgactgaatagaaattaatgattgagatcatattttagtaattatattagtttactgaaatatcatttataagtagctaagttttttaaggataaataacattgaagggtagaacggtaaatttgaccc

SEQ ID NO: 107084 - DNA, 781 bp, Cannabis sativa
tcacccccatgtggccttgctttttcaccattatacttctcatacttggcatctaatcgttgtcggaggtctgtggtggaccagctatcctcagaatgtcccacggttgtccttttgttctgattgacaaaattactgggatggttccttggccctttaggcataggtactcttgtatttttttccccttggcatggttttgcatctaagatcagaagggcatctaggctcgaaagtatcggtggcctcttgtgtcctcgagggttggccgactagattcgtatatttttgagtaggtttagggaaaaattttgtgggggctcacctacttttactttacctttatccttgcaagaatttgaggtttctacttccatctgtttatgagcacgctcttcagccatcacctccaccaaaggttccttgttggactccgccaagtcatcaaacatgttttgcaggcgttccatcattcttttcattttttgtggtgagattcctctatctttctaactccgtatgagtagcttttaactctttggtcactcgcagcaggtttagatcttggtcataataatgaccatatttgtagtacccatctttcacgtagtcattgccatcatattcttccttcctgccttcaaggttctagtcatcatgaaggtcgtcaaacactttctcggtgtcgtcccttcaattttcagcattggtcgtgtcttcctctcttatgctgcccgactgggggccagaggcaaatgagtctacctcctccataacagtg

SEQ ID NO: 107085 - DNA, 560 bp, Cannabis sativa
  modified_base (101)..(104): a, c, t, g, unknown or other
ttgcatcttgaactttgttaggatcttctcaatgtagttcttttgctttaaatgcatgactccatcacttttggaactatgaacttctagaccaagtatcnnnnttacttgtcccaattctttcatgtcaaattctgccttaagtttatctttaattcctttgattactgccttgtctttacccattattaacatatcatctacatagagtagaagatacacaactgttgactcttctagtgtttgaaatacaaatagtgatcaaacttggaccttgtgaaaccaatctcctgaacatagatgtcaaatcgtttgctccattgtcgtggtgattgttgaaggtcgtataaggacttttccaacttacaaaccatctctttcccatcttgttccaccagaaatccaggtggttgctttatgtatatctattcttctagataaccatttagaaacatagttttaacatcaagctgctccacttctaaaccttgttaagttaccatcgacaacataattctaatggtcttatacttcagtacaggtgagaacacctcggtgta

SEQ ID NO: 107086 - DNA, 732 bp, Cannabis sativa
cattttaaattaagaatcaataacagaagagatttacaacctcacttgtaattatataagattctattatagtaaccttgacatttgttgctcgtttcaattcattaatcaattccaaacagtaaactagagaagaaggtacatagattattataaaaaatttcctctaatagtggtaaacatatgcaagcttaagaagtctacctagattaaagcaaacatctcacagatgatattttcgttacgtcatctttttctttaggtttgaaaagagcattatgaaattaattatatactagaaggtcagtcagagtaatatttgttttatatataaacaatatgttatttacaagtgatgataaatgtttctaatatgaggtgaatgattcacatctcaaattattactttgagataaaaaaatatcaataacatatataattttaataattagaaagtagccacatcatatctgattaaataaaattatgtatattcatctcatgttatttttatttttaagtgtgataaattcaattcaaatcaaaatttgaaaataatctataatgagaataaattaagaatattcctttgtttctattttatagaagcttaatgtatgcctaagagtctgaataagactttgtattgcatttattttaagaatataaagtagtatcagaataatttaatttaagaccacttcatataaagtgatgaaatatctttcttga

SEQ ID NO: 107087 - DNA, 761 bp, Cannabis sativa
atattctattttcaaattctaatagacttattaaataaattagttgagtctacaagatgatattgttccaaaaaatataggcaccatgggcctatataaccaagctcctaataactagattcgaaatttactaagtaaatttcctaacttattaattctttctgactccactatagatttggaattgcactcatgattacatagaatgctctaaataccaaatacagacactatgaattatccattgtttcaatctaaataatcaaagatcctctatatattatttacatcaaataggtacaaattttctattctacccttcaatgtattttatccttaaaacccttagcttcttataaatattatttcattaaactaatatactgaaataagaggtcttccatttatatctgttaagccaagctttatgaaaatcattgtttcaattctaaacagttataaaagctatagattcgatatttgtgattagcgctcccactcaattgcataaccatgttctcaagatataagtattttgggcaatccatttattcagctttaacgaacaagtgaaaaaaaaatacatgtactacatttaagccagaacttaactattgaccttaaaatgtggccaaccgacagcaaggtcatacatattaatcaatctgattgatgtttgcaacgtacaattagaactagaaagtaaaagaacctaaggatttttatataggttcgaccctgttatccacgtttccagaatg

SEQ ID NO: 107088 - DNA, 1930 bp, Cannabis sativa
  modified_base (27)..(37): a, c, t, g, unknown or other
  modified_base (1871)..(1872): a, c, t, g, unknown or other
ttttaatattaaatatataatgacaannnnnnnnnnnaaaatatgtcttataaaataactaccatataatataatttaactcaaaagagcaatttagtccatttaagcatttcgattacatttactaataaagtaaacaagataaatcacaactattccattttttaaaaaaaaaaattagtaaacaacatattacaaaattgattctgattatttttcatttattccgttatatttctccattaatttattccgattctgattactgtatagtaaacgtgccataaatggaaaaataaaaattaaataaataatttaatatgtaaaagcccaaaaattattcacactttttatatagttctaatctatactttgtagtcttttttatataaacaaattatatgaaacttataattatagattagtaaaagaaataaaaaggtgtatttatatgcataatattgtatataaaaaatgaagctctctaaattatgatttttaattgagattaaatgatgtgaggatttaatagtaattaataaaaaaaaaaaataagaacaattttgtaatttattttaaaaagctcaaacccacattccccttttatatagttatagatatagattttcattttttttttatttatacttaattttatacgttaattataataattaaaagagagtataaaaaataataattcttaacttacccactctttttctccacgccacttcctagctaaagccactaaatgcaacttccaataatattaatgataattataattttattcctttttgaaacttataaaatatttttcttaattaaagaaatattttttatatatacaatcttttttaaacctcaaaaaaaaaaaaattgcatgcatacatacacaccatcatactattattacttaattttaattttattggccaaaaaaataaaaactattactaccggtaattatcttaatatataaaaatatgaattataattttcacatgtctaataaaaaaaagtgatagtgctagtataatttattggttagattgcgttactagatttctggtgggaatcgatgagcttatctctatcagtctatctatctatgtcactccatcggttgctccccaggattctcctttttcttcacaaccacaaatattatattgttattgggaaatatcttaacaatatatatcagtcatataacaatttcctctctctggctatcctttatttagtatatatcaaaccttttttcaggtaagaaaagagggaaaataaaacagagatcgacttcatatccttaatcaactactcttactgcttttaataatatatgggaatattttatattaaggggctactcttatccaaaatattttatatgactatacacattctaattattataagtacactttcggttttattttttcttttaaaaaataatctaattatttaatttactgcaacaaaatttcatcaattactttattacattcgtaaaaaaaaatgtgcacctaattattttttacagcttaaattattaaaataaattagtagaataatatactgaaatttttacattttaatttttttttttacaaaaattaatggacacttaaaataaattggattttaatattatatcgaataatatactgaaatttttacattttaattttttttttttttttacaaaaattaatggatacttaaatcgcaatcaaaatctacatagcaacttggggtccggcacagcttttgaaaaagctaaaagttactttttgaaaaaattgtgataaaaatgtgtttggtaagcagcgaaaaaaatagctttttaaaaattttttggagannctaaagctgttccaacccaacttttagaaaaacagttttgattaaaaggctataataa

SEQ ID NO: 107089 - DNA, 1400 bp, Cannabis sativa
  modified_base (292)..(301): a, c, t, g, unknown or other
tcaattacatgcaaactttctactctcgttataaatttaacatgcaacaggcattacacacagaagccgtataagctatctaaaccatacaggtactctcgtcctatatcaaaattcagttctattttgctatatcataattgacactcacttctcagatctcgcatcgaaatcataaaacagctaattgatggacaggcaactaaaagtaatttagcacgaatgaaatagaatacatataaattaggggggaaataaatcatattaaaaccataaagcaatgtcaaacaannnnnnnnnnaccctaatcaagtgtttagctacacatgttcatggaagaaaaatcacacatattaactttaagaaagagaagaagagagagaataaaatagatttaaaaaccctctgcagaatgcctccagtattgacttctgtctttgaaattcgtactccttttttccctttaaattgcttgactgaaatcagctccagttcaccgtctatattggttttcagggactaaaaagatataaaaatgcacatgttaaattcctattcgacttgggaaaccaccgaaacccacgtgagagaaaaagatgatttttgtgcagtttaggggggcgagccgcggcccgtgttggagtttcactacatggcttcgtttcgacattgatttttctgttgcattgattgatagtattttggtcataactctctcgacattgctcaaaatcagatggttcaagatgttctgaaaagataaaagatagatctagaacttttatgttttgagtttttccaaaatctaatcagaagatagttgaattcaggcatgaagtttcaactttattttcttgcacaattttctctattttatttatcatctttttgagagatttttttttatctttttttcattttattcctttgatattttctaatcttcttctattttaaatttgcaaaaataaaagttaaaaagagtagaattgctccaaacaagagtagaactaaattaaaaatatactgaacttaatctaaaactaatactaaaaataacctaacaagctctccgatatgttattttggacaaaaaagatttactgcaagtggttgtctatacagtatctgaagtgcatagctggaacccaaatcagcgttattattcacaagattcacagagatttctatggagactacacttccaaaccaagcctttcaaaacacattctttgtcaagggtacttctagacaatgatgaagaaagactacattgaatacgtctagaaatgtgaattgggggggtgaattggaaatttatactaatttcggtaaatcaaaacttttaacacaaaattaagcaattagccacttaatcaaataaaagcaagtaatatggc

SEQ ID NO: 107090 - DNA, 665 bp, Cannabis sativa
acgaaggtcaaaaatctgacagaaaaaggaaggtacacaataataatgagtggcatactacctttgagtgagttatggatggtcatccgccgacactcaactcaaaacatggctgatttccttgattaggcagaaggctttgtcaagcttgaagaagttgactgacagcccaaagtaggagacatgcaggtgctagacagaccttgagtggtggatagccctcagttctgcccagcacacctatcagcataggcggccagccccctaaaggccgaaataatgaaggcaagcgtgacaacgacaactctagccacttaaaaggcaaaaatgggaaatttaataattcccccacgccataagactcaaaggacaacgaaaggagctttacatgctttaccctcctaacaacaactcttgaaatagtttactcgactatagagtcaataatttcgcacagaaagcctcctcccataaggaaagaaatgagtaagagggacacctctaaattctgtccatttcactatgatttttgccatgataccaatgagtgcaagaacttaaagatagaaattgagttcttgatcaggaaaaacaatccccatctaggtcattatgtgaaagacgactaaacacaagcaagaggtgctcaaaacagagacccaata

SEQ ID NO: 107091 - DNA, 551 bp, Cannabis sativa
  modified_base (390)..(397): a, c, t, g, unknown or other
taaactcttagtgagatcttgtgattattttgttccgttaaatttgttttgtgtgagatatcattgtttgctgaaggaagctccattactcgacgactcctgttgaatgactcgaattatccatattacaaggtcagaatgagatcattcattaagtcacaagatgagaagacatggagggctatacttgtaggttggtctcgacctactgaaaatgatgatgaaggtaaaacctaaacttaactaattggatcactgaagataaaaaattgtctggttataataataaagctttacattctatttttaatggtgttggtgaaggctttattaaatgggattacataaaacaccattttttgtaaaagaaaaattatatttttacgtttnnnnnnnnttttttatatatatttttactgtttttcatagaaaaaccacgaaaacaatataaaagtaacatgaaaataacatctaaataacatcaaaaaataataaaaaataacatatagataacaaaaaattaacagcaaatcaataagagtacaacataa

SEQ ID NO: 107092 - DNA, 1401 bp, Cannabis sativa
atattttagcttatgttataacaagactgtataaggctcctattcaagctctaataaaaccccactacatgtagtgacacgatcaaagtctaaatttgagtaaaaaacaagttaaagagtgatatatgtttgtcaacgccacaacttatgatttggtacaaaaacttttgttttattaaatggctgttgaggggctttgtctgctgacagttcgaccaggagacctcccagtgtctccaagtttttgagtctatggggattcgaaccctgaaacagtgcaagtacccacatatttaaacatccacccgtaccattagaccaaccccttgagattacatgttggtgttaggcactaggattagtggggtgtgctagcatatagtaaataataagggtatatgagtctttgtttgggagggtagcattataggagagtaaggttagaaagagtgtatgcaatgtattgagtaaaactctttgcatcaaaggggcctaagggctcccatcaattgtaattgggtttctcatatattcaatataataccctactgttttgctactgttctactagtattcttgttgctgtgtttgttgtattggctactggtttgagcattggcagcagtttctcatcagttggggccctgccagttcagccagcagacctcttcagtggctccaagtttttgggattaaggggattcaaaccctggaacagtttgcatctgcctctactgtggcagtgcactccatggtctcaaacacatatttgatttattggaaaatttcatgactactttgctatataactctctcattatccagggcttccttaagctggtgcctggtcactgggggattctagtacagaatctaaggcgtaataccagcatggtaccaccaaacactctgcatatacttgatcacctcatctatgaactggaacagtttctaacccgttgacatcattatcaggttccatcttaatatcccagataccactaactctctctatcatcataggccaacgtatctcggatctaggtaaattctttccccaaatccttcctgctcttgccttgaccctaggcaagcttcaccagttcaattgaaataatactttgcgtattagaatctagctaaaagcactagaatggaaacaattgactcacagtgcggtagctggggcattttcaatcctcatatgcataatgttagggtctacacatgagcctatacaacgtaggctctaacacatttctattcactcttttgtcattaattaaagtcatttatattaatttaaaccttttttaaaatttagtaataattttttatataataaaaattaaatgacattgttaacttttttagttaatttaaataaaaaagattaaagca

SEQ ID NO: 107093 - DNA, 509 bp, Cannabis sativa
ggcacaaaacccaacatgtaatccatggttgcttgggttgttgggcggattgggctagttatgtccattaccctgcctcttcacatattgcttgaagtggcctcgcgcaatgacattttctatctcatctttcaactgatggccctcgtctattgtgtgcccaatgtctttatggtacttgcagtatctgatcgtatctcttttatgcctcgcgtgtctcatgggctcaggtttactaaaggcaaccttgtgctcatgggcgaggtaaatggtttcccaagtttcattaagcttggtataaatggtataaactggcacatacttgtcatatttcttttgttttttcttgtctttagatgaccccttagagtcgtctttcctctttgagccagaggcctctgagttatcagctttagtccagatagtacttgttgaaaaagtgctgggtttgcttctcgagccagtttttacaagttcatctcttttcgagcttcttcctttcaaacaaa

SEQ ID NO: 107094 - DNA, 1134 bp, Cannabis sativa
gtttggtttgggtaggttattcggtttgggcggttgacgattttttttttttgtaagtgataccaaataaaagtaggcttattgtaatgtatttcttttacaaaatggattgattgaaaattttgtctgtaagtctaacataacttattatatattttctgttcttaaaatttggggaaaacaacatatttacttcaattttcaaatcaatctaagacaagaaactaaaaaaccttaatgtcaggtcgaagatgattatgccatctctctctacactgtttgccaattcttccaggtagcatctgagcaatgtaggaccattttctcactccatgctcttcaaccaatccaattaaaatcctgcattttgtattacacacaccaaaaatagaaacttacaacaactacctacataaaccaaaatcacaacagcaaatttaaggatttaaatgtacctatcttcttctactgtccattggcccttgactggattgttaatgatcttcctgcgaccattaaagtatgtcattcttttcattaaggaacaagaagtagtagtactataattagtactcttgttcttgttatgcatggtaacttggtttttgtagtacccattttgatcagctgttatggttgagacttgattaggtaccacagaagagctcaaattaatagtccaattggaaccaaacatttctgtgggatttgatctacttgggaaaatattcaagtactctcctccattattactttgaaatgtggtatctgtaaagggcttattataactacaattgtaatactgatcatatagaattccaacattgttttcacaactcccatatgcagtagtagtgtagtcttcgaaattgggttgatcaaagattggagcttgggacccaaaattaggatttgatgaggacccattaaggggaaattgatgaccatgatcatgaacatgaaaatcttgaagataagttgtagtaccctttggtatgggaagctctaaattgttgtcttttgagtaaggtttcatgtggttgttctcatgtaaaaataatggataataagtgttgttttctctaagcttggtttctagctccatcatgagattgagagaaaacatatatataa

SEQ ID NO: 107095 - DNA, 615 bp, Cannabis sativa
tccgaattcaggtgtgccggtcaacttgagtggaacgaactacacggcggtttacaggctcctaaaccataacaatcacattactagataagtgatacgctaaatcacttcccggggacttaaaatagaaactaaaagttttctcatcgataaaaagcatggcaataccctaaacaacataaaaacgagaaaatctagggttcctaaaaatcccccaaacggcagaccagttctgcaaccgaaattccggttctgggaattcctgaaccccatccagaattccggttgcacatccggaattccggttcctcgcaggaatcattcaaaaattcataactccctcaaatcaaatccaatcaaaaccaaaccttcgagacctgttctatataccctaaagaacataaccaaagcaatagaaccaagcttcaagcatagaaaaacatttcacgattggaggttcaagattaagttcaaaaactcaaaacttgagtaaacctccaaacagccagtaaatcatgcataactcaacctatttcaacataatttaacaccagaaaacactactcaacaatagcagcaaccacagcaacgaaagtcatcaatttactttgaaaa

SEQ ID NO: 107096 - DNA, 721 bp, Cannabis sativa
atcacatgccacccttcccatatttcgatttcccgtaacccattgaagccgatcatctatcaaacctttgatggtattttttgctttcctattactcgccttcctatgaaaaaactttgtgttcttgtccccttctttcagccataaagctcgacttcgttgcttccaaaatttctcctctttgtcaagccaaacgttttattttctttctaagtcttgtagatgttgccaatccttagcgttagtacttcgggataacaaggagattttatcttcataatcctttaggtgccttgacatctcttgcctcttagtcttattccaatgttgcagagccatcccaatctgtcccaaccgtgtcttcagcccctgagtattcacattctgcttgtttctcaactaggccgattgcactatttgagtacactcttcgtcctctgcccaagcgctttcaaagtggaatctagttctccatcttgtcgtatgatgcatctttaaatggggatcatggtccattagtagtaaaggacaatgatccgaattcgtacgatccaaatgacgaacttgcatggacgggaacatgtcaaaccaatctgaattaccacacacctgatcgagtctttcaaagatgagatcatttttcctcccattacaccaagtataatcactcccctcatatcccacatctctcaaatgacatctatccaaagccttcctaaag

SEQ ID NO: 107097 - DNA, 838 bp, Cannabis sativa
agctctccaaagaagatttttgactttaggaggaatttttagttgccaaagtttcacccaaaatcctgaattgttattacaagttcgctcatctctttgatcttggagtaggcgatatgcactcttaacaaagaattgactagatctttcaccactccaagcccagaaatcagttgtcgcagaaaagctaagaggaatactcagaatagcatcaacatcaacttgattgaacaaatcacgaacaatgctaacatcccattgtctagagtcaatttggaggagagagctaactttttgattcacaagagcgggatgcgaagaggaaacatacggattattaggcaaaggaagtcaagggtggcgtaagatactagtttgctctccagtcccaattgttcttctaacatccaatttaagaagatcttgagcgatccagatacttcgccaaataaaactgggattatttcccaactcagcagtcagaaaatcacctcttggaaaataacgagctttgtaaagtctgttggcgaaaatcgcaaccttgcttagctaacatagcaagtttgaagtcaagaagtcgccgaaagccaagaccaccttgatttttgtgagtggccatatgatcctagttcatccagacaataccgcgacctttgctagaagtagtcttccaccaaaattgagccataagacgttcaattttagtacaagttttgatagggaacaagaagacttcaccactatcatagccatctgaatagtttgcttcttgctgcttgtcattttgctgtctgttttgatctgatctttctgaaaaccttccacctttcttgttctt

SEQ ID NO: 107098 - DNA, 829 bp, Cannabis sativa
  modified_base (50)..(56): a, c, t, g, unknown or other
ttttatacgcgtgtaaaatagacattttgaacattattttttatattgtnnnnnnntctgaatttctcaaaattttgtaggttctctagctataacgtatatatgaatatgaaaaaaaaattagactaaaaaatttttctagaagccgaaacaagtcaagggtgcatcagtacattgtaaaatcacccaataataagtataatcagaagaataaaccgtttcaaaataacttgaaattaataatgtgtaagctgtacaaaattattagaaatagagacattgaaagtaattttagtagaattattttgctggttgaattttttgaaattatgacaatcgaaactaacaactatgaatatttttcacatatataaaataatgatcacataccttttcatgattttgatcatatatattcttcgaaaatattcgcatgtcttaaattttcctaaaataatgtataccagaggcgatttggtcgaagtttgcagcaaagaatctgggttggtcggatcatacaatgaagcttcaattgtatctcatgaattgaggaaagatctgttcattgatattcgaaggggttgtaaagactcaaccttagtcgaaacaatcagactcgataactccgatcggagaatgatgagaaagagtatgcttgtaattgtttactttttttgagagaaattatttaaatattttttatgtttcctataattttcttaagtttaattaacattatttttttttccttttattaaaaatctaaatttattttttttcatacatatatattatattattataatgggtaaataacgacataagtatc

SEQ ID NO: 107099 - DNA, 846 bp, Cannabis sativa
  modified_base (694)..(697): a, c, t, g, unknown or other
gtacggggttcgcgacccaagccgcgtagaaagcttcaattatgaagttgttgttgcgcagcttttcaacttcttcctttagggctactgctcgttctttgtccgacagccttggtttttgctgaactggccaaaagttgggatcgatatttagaacatgtgaaatgatagaaggatcaattccaaccatatccgcatgtgaccaagcaaaaatgtctaggtttgctttcaaaaattttatcaattctgattttacttcgagcaacaaacctttttcgatctttagctttctagtcgggatatctggatcgatctcgatctcttttagctcttctattggtccaacattgctgcttggatccccaagtcgaggatccacatcttcatcccctccttgggaagttccctactggggaatgttttttcctttgtctgtgctgtggctggaggatacttccttcttagccttggccactgcaaggttgtaacattcctgagcagactgctggtttcctcctagatacccaaccccattctttgttggaaacttcaggcacgagtgaaatattgatgtgacagcttttaagtcatacaaagccggtcggcatagcattacgttaaaagttgaaggaacatccagtatcaggaactgtgccatgacagtcatgctcgtcggagcttgtccaacaatgannnntagacgaatttgtcctagaggtgcgactccttgaccggagaaacaatagacaggcttaaggcacgcggttagatccttgagttggagtcccatcttttaagcagttttgaacaagatattagaagaggctccattatcgatcatggttc

SEQ ID NO: 107100 - DNA, 537 bp, Cannabis sativa
cagaattgagaaatgataactctagtgcccatttcaaacaatggggcccacaaataattaaacttataaataattataaaaatgtcagaaattagttcttatttcctttaccaatatcgcacaagccgcagaggatacaattgaggtaccaatcgatccttctgatcataatgaagttttgaaaattggttctaaactatcctttcaacagcaagaaaagcttgtcacttttctcaaaccaaatttagatgtttttgcatggaaacactcagacatgatcggaatgtcaccgcaggtcatgtgtcattgattgaacattgacctcaaagtgcaaggtttcttacaaaagcgccgcaaaatggaccccgcgaggtaccaagcgcttaaagaggaagcggataaccttttcacatgttgcttcataagggagtcattctacccaaactggttagaaaatcgcgtactagtgcccaagccaaatggctcatggcgcacatgcatcaatttcattgatttaaacaaagcatgtcctaagga

SEQ ID NO: 107101 - DNA, 1487 bp, Cannabis sativa
tacaagaaaggcttaatggattagcatcgatagcgattgaaaatgaggttttggagacgataaaatatgaagagttggttgatgaatttgcttcataaagcgttcgaaaaaatggcctcttttaaatagaatgttgatattggcttgaagttgtattggaattaataacaagtttagtaaaaaaatttgaatttttaagtgtgtaattatgtaaaatatactttcgtaatatgataatatttaaaaatattatttgcaaattattttttttttttggttaggggcctattttttaaaattagaacaggacctccaaaatatttgagacggctctacacactttgcattttaaaatatagtgtaattactacccttgtaattatcctacctagtaattatacagttatttccaaacacacccttaatgtgttttaaagttagttattattgtaataaaattaattagttgtattattttaatttaattgttttattcataactcgtttaagcaaaattaaatatatatttatattgacagagtacatatacttacatgcatattctcatctcaagttcctatagtattctgatcacatgggcattacccttaatcagttacagacccaattatagtatatatacatatataaatatgaattacatatgtatatgtgtatatgtatgtgtcggaaggacatctgcagattcgtgaggttcattttcttcatcatgagaacatataattaattaattatcataataaaatgatatcgtggtataattggtttgccattattattattttcttggtttctaatatatataaataatttaattatatataaacagaacatttagttgagccatgtctctctctggggattaattaaattaattacatatatatataaagacagtgtaccgtgaaattttgttagctgtaaatatcttatatatgaggtgtttatacagttggatgaagtgcttaattaaataaatatctctagctaatatagctatatatatttattaatccattcacataatttattagctgtatatattctctcaaaatattctatctcgaccaaaaaccaagactcatgcatcccaccccattttctgcaattttatataataataataatctcatatatacatataaatatttgtacaacattctttggaaaaaaattacatttaattttcatgttatatatatatatattatataccaatgggataatattgttaaataaaattgatgggaagtaagtatatatatgtacgaccgaccgtattgtatctaattttctacatttttaacaattctattttctaattgtgatatatatttatataagtactcttggtcttccaaagcatatggaacttaagtatatatatacatatagtgtgtatatgatttaaaatacatatgtgtattatatgtataaatctacgtacttatatgcatgtatatgta

SEQ ID NO: 107102 - DNA, 525 bp, Cannabis sativa
  modified_base (217)..(218): a, c, t, g, unknown or other
taaattgcaacaaaaaatcgtaaagaaactcctattgcaactagcgctgcaaccactttcgaaacccaaaccgtaaatttgaaaaaaaaaaaagttaaaaaactattatatgagataatttcccaaaaacaataactttcttattttattttattattattattactcacctcaataaatttaattaaatcccttttaattgaaaattatattaatnnaactttcttattttctctaataaggatgcttactatataaaaataaataagtctaatacatgtaacaattttataatttttttgattttttttatataagccaatataaaatttatgtaaataatgtataaaatatatcaaaatactgaccatcttatatatgattatacttgtatataactaaaatacttaatttaaaaatttgttcttatgtataatattaatatatctattttaatttgtaatttgtacaacaattaagatgttaaaattagattttatattttttgttacaattatttataaa

SEQ ID NO: 107103 - DNA, 1375 bp, Cannabis sativa
gcaagctctcatattcttccttgactatattcaccttgagctctgcggcattaacctcaatttgtttcttcgtaagcttttcggcctatgccggcatttaggcatccaaaaggtcagctcgctcttgagcctccttgtgcttcccaatagtggaaataacttcagcttcaagttaaaggtttcatccctataggaagcggtggcctagttaacataagattcaagcttttgattagccttcctctcggcttctttggtagcttatctctttgatgtttccagattgactgccatctcctccatcttagaaaccaaattcatgttctccgccttgagttgagtcagttccactttcgcgacattagctgtttcaaatgtcctctcaataatcatagtcatttaacatagtaaaaaaagaaaggaagtgttagaagaaaataaggttacaaagaaaggatatttatcaagagtgtaaagaaaatcctactctggtagcctgttgattggcagtgtgtgccaaaaggatgagatcattgttggatgccacaacccacttctcaggggtatgctcacagatattgttggcggttaggtctatcatctctgcaaagaaaggtgtagtgtcatttctgaccctgggcataagatatatggccaatgtcgtaatatctatgatcggaccaaagctcgtgcccttggccttgcctacaatcctagccttccatctggcagagagaataaaagccttcttttgagcagtgatttgttcatggtctcaacgtttctgaatacaagcattaacctctttgacctttttccaaacctctgctgaaactaatgttggttgaataggccaggcaaaatcaaagggtgggagagaaggaagagtagttggaggctgctatgtttgagcttcgagtgattgaggctttaaactcacttttaaatccttagattgagtctctaagtgcctcaagtccctttcacttctaaaaggccactacttgtcagtttctttcctcaccttcctctcatccacgacatatttccttcgtcttaagtcttcactgctgggatcctgggcttgcttcgaactggggttatcctctcatcttaccttcttggccccccttttcaagttcaaagagggagcagactgtttcagtgtttggacaacatgttctgggaagaaaatttcttcccctttctcgtctattaggataggtgcctctacaccattaatggggctcagtgatgggacttgttgaagcgactaaatgattagagctcccctagaagtagaacctttttcgactggagcaaactctttcctctttgttggaagagctgggtggaagccagaagggccaaactt

SEQ ID NO: 107104 - DNA, 1071 bp, Cannabis sativa
aagacctgaccttggacccagaccgtgaactaggacccagaccaggacctaggatagtgtaactagactatgtttcgattttgattcagtggttgggtttgggtttgggtccgggtcttgtttggggtctgtgtcctggtctgagtttgggttcggctctgggtccaagtctagatcccagtttgggtctaggttcaggttaggtccgagtgcaggtccaggtctcggttagggtcagggctcggtctggatctaggtcccgagttttgatcccggtctaggtccaggggctaggttcgagttcggttctaggtctgggtctaggtccttgtcatggtcttagtctttttcaaggatcctcgtctggcggttcttgttcaggttcaaattttgggtcacgggtctaggtcagggtccaggtttgggtcctggcctgggttcgagtcctggtttgagtccttgatctagatccctgtcacgtgtcctgatattgttttggttcaggtctttgttcccaagtcaaagttttgtttcgggaccgagatgggtgcggttttaggtcccgacccaagttttgtgtcccgagtttggttcaatgtttgggtcagagttcgggtccaggtttgggtcctgagtccaggtttgggtggggagccggggctggttcccagttcgagtctaggtctgggttggagtcttggtcatggtccgactatggttccgggtcatggtccaagtctggttacggttccaagtccagatccaagtcctggttctagtcccattcccaggtcctagtctacttccagtttcggttcaaattttaggtcacagggtacgggtttgggtccaggttttggtatggtgctgggtttcggtccgcgtctgggttcgggtccgaggctggtcccagatctagacaccaactacgggttaggtccaagccccggttccagatcctgatcccgatctcaggtcccgacctgattccattttgggtgccgggtcacgagttgggtcctaggttcaagtcaaggtctagggtcgggtattgggtcccggtcctagttt

SEQ ID NO: 107105 - DNA, 560 bp, Cannabis sativa
  modified_base (265)..(268): a, c, t, g, unknown or other
cttctacaaacaactctctttcatccaaatacacatttaaatttactagtgaaagttatacgtgctgtgcacgtggagcaaaatatttatgaccatataaatgttgagaaaaaatactacttatactcaatattagtataagatattatatcactattattataattaattaaatattaattctcactcttatctatttgtaaggtgaagactatccccactcaaaaaaaaaaatatatatatataaatatagaaaaattaaaannnnactccaaaaaataattgtacaatatatatctatatcgtgttttcaacatataaatagttattattctattatttttataagacaatgcacactttagctatttagcttctaaaattactttaagagaataatttttcaaaagaatattaaaaatatatatatatatttactaacaatttttttactagtaacttactattatattagtttggatttaatagcaattaacaagaaaataaagtcatctttgtaatttaagaagcccaaaacaatatttcctcttttatatatt

SEQ ID NO: 107106 - DNA, 692 bp, Cannabis sativa
atttaaaattttgttcttactcttctacaataataaaatatgttttgtaatttataatttttaatttgtactacaattaaaatgtcaaatttagatttttattataattatttataaaattaaaattatgcaaataaaaataaaaataaaatgtaataagatgagttagacacttgcattgcacgtgctaaccttacttagtattgttaaaagtagaacttttactagactatctccaccttatggtatttaataatttgtgttaattttggccaaaatattataaactaatgcttatatatttagctcttttaattttttaaaaaattaaaaataaaaaatttaccccattgcacaagacaaaaaataagttcaaatagaattaacaagttgttacaagactggcccaaatattttgggggtcttcagcaaaaatttaaaaataaaatatttattaaaaaaaaaaaaacaaaattcgtgcacattaccaacgtttttaagatacgttctaaacctttttttttttttttctaaaaacatatttttaatttgtgtgcattacaattttttttaaaaaaattaaatgtgcattacaattttaaaaccaacttttttttaaagatccattttaagctttccgttataaataaaataaactttttatttatgtatgtatgatagaaataaaaata

SEQ ID NO: 107107 - DNA, 555 bp, Cannabis sativa
taaacaatatctatgagtcgacaatttcagtaagaaaaacacaaaatatataacataatactgacttgtatttaggcgcccatacacctatttacaagacttcagatgcatcaagaatgttcctagtagaattagaaccccctataccacctacactaagtacaagtcttgtactagtgttggtagggctgaactgtacctcgagtaccactgagtgttgtaccacatgcactacgtactcatcccataatagtgttggtaacactgtgtcgtaccctttaaacatcatatattgtaccaatatactcagtaccgtaattgtactagtgttggtagtatacaaaccacataatacaacatgtatataatacacatacacatatatgtatacatattttatactaatcttatctcgtttcctgattcaagtgtaccagtcaatctgaataaaaattcacgtgctgcacggaggccctatgtcacatttatgttaaattgataagtgtttactctaaggcactttttaaatacccgtataagtttttctaccaaaat

SEQ ID NO: 107108 - DNA, 910 bp, Cannabis sativa
  modified_base (275)..(288): a, c, t, g, unknown or other
tttttaatttttaaatatttttttacgtggaccaataaaatggtgccacgtgtatattgtgtccacgtggacaagccaacatgggacttaacagctaaatttggagggaaagggtaaattactaacagtttcctggttttggggatttacccgcagaaattcgggttttgggggtttaatgaaaccaaaacgaaaatattaggggttttgccgccatttaccctaaaattttttatataaaatatctaaataattttaattttaaatatatatannnnnnnnnnnnnnaaaattaataaagaatattctgttaagtaataggatattctgttcaagttaacatagaaactcaaaaatcatcgttaaactaagaattctgttacatagccacattatatatagaatgaatatacaaagataaaaagaaatttgtttgagaaaaaaaattaaaaaaaaaatgagagacgcaaagagaaataggaaaaaaaaaattaaaaaaaaatagagagaaaaaaaagacaaaaaaaaaaattaagctttaataagtaaaaaagaaaaaaaaaatgagtaagaaaagtatcaatgtaatgtttgaaaaaaaaaattagtatttggtgtaaaattttcaaatagaaagaaactctaaaatacaaatgtaaaataaactaaaaataaaaatgaaactaattaagctaaaaacaaaaacatgaaacatagatttggatattaattagctttacaaaatgtggcatattaaatatcataaaaaaatctaaaatgtgaaaaaataccataaagaagtgacaaactagtgctaaggagactctcttctctctttaatttgcactctctttatcgtttagtgacaaatgccattttttgagattactttatttctacttaataacta

SEQ ID NO: 107109 - DNA, 643 bp, Cannabis sativa
ttcaatttccagcttcaggttgttacactcattcgtgtcgtgtccatagtctccatgaaaatggcaaaatttagacatgtcccttttgcttatgtcctttttcatgggaacaggtttattgtatgggaccatagactgggttaccatgtagattgtctctaggtcgtcagttaggacagagaaggcagtgaatttggaggcattttctctagggtttgttcggctttgcttgcgaactttctcttcttcccattcccttgcatgtcgttgttattggatcttttatcactcaaagtcgagccactaggatattgcgggctttgagcgggtgctcatgctgaggggaccagtgttagcccagcctaggttcgacatttgctcgttgaatggcctctttgagcttgataaatccatcttcttagtctaagaactcagccatagatccatggccacttttctttatgtctttccatagttctccaagtatatcaatgcccccccagtatggtggccagcctcccctcttcagttaacgttgctattttcgtagtttatgtcatgaatctgcttatgtaggctctgagaggctctcctggtctttgtttcacttcgaccagatcttctaaatgtaatgggagttggc

SEQ ID NO: 107110 - DNA, 510 bp, Cannabis sativa
gaaatggaaccagaccgggacccaagatcgggatcctgatctggactcggggcttggaccgaacacgtagtcggtgtcaagatctggaacccagaccctaacccagaccaggacccgaacctagacccggacccgaacccagtcctagaccaaacctggacccgaaccctgtgacccaaaatttgaaataaaaccagtagtagaccgagacattggaataggaccggaaccaggacttggacctggacctgtacctagacctggaaccgtaactggactaggacctggactccaacccagacctagacccgaactgcgacccagacccagatcccaacccagacctcgactcggttctcaacctggacccgaactcagacctaaaaatggaaccacactcgggacctagaactagggttgggacctagaaccgcaccaaagtctcagtctcgaacccaaacttggacctaagacacgacccctgaacaagaacaagaccggggcatgtga

SEQ ID NO: 107111 - DNA, 598 bp, Cannabis sativa
tattagaagctttcttggacatgcggggttctatagaaggttcatcaaggattttttgaagatttcaaagcctctttgttcgttgttggaacaaaatcgcccatttgtgtaaagaccgcttagcttaaatttggaaattagcggattattagggtttaattatggaaattatttattaattttaaattattaatttatggtgatttatttgaattcgaatgcattttatatgtcatatatagaaatttcataattttgtttattcggtgcccgacaacattggaacgtggtgtttggctattagaataacatcttagtattttagtgtagcggggcagtttatttggtcattgggattggtcaggattctagaatttcccaaaatgcccttaagtggccttttatgttttatagtgttaaaggggcaaaatggtcattttgccaagtgtgttttgtcttttgtgggatgtattaaatcagatttttaattgatgtttaagctgaaattagttcgttaaaaccattattatctctatatttgacacaaaaaatagaaatttatcaaaaaggatcacattttctctcaactctctctctc

SEQ ID NO: 107112 - DNA, 706 bp, Cannabis sativa
tgaatgtgtgaaaaacaaaaataagtgatctcacccgcattaaaattatagaatcgcagctgccagggtagtcaacattcttgcgaatgttgaccacccaattcatgtgcgagttaaaaagcgaataagtcacgcatcctgggccgagcgatatacctccagaaacggttgggagaaacccagtgacttaaggggcatgcgttttcgagcatgaccctgaagttactgaggtactcccaccgttccgagaccacctatcagccaaggagtacgctcatttgagtatcatcgcatgttgcaaatggctgggtgtatctcagtatctcaaggggcatataatcgcatatatgaccattagaatacggagacacacccaccatttggaatagcgattgatactctcgcaattcaacccatagcatataaaaatcctaaaagatctagccaacaatcaaaagtaagtaaatcttgtcaatacacgagtattcgaattgttcatctgaatacccgcgagtattcgagttgttcatctgaatacccgcgagtattcaaggcgtgaaacagtgcctattcaagcatattgtatgcggttatgtcaacctacaggtcatattctatgaaattacccaggtttttacctaaaaaacatagcctcatgcatatcatctataaacattcatccttaaacaaccctcatgcacactaa

SEQ ID NO: 107113 - DNA, 501 bp, Cannabis sativa
acccaacagtatgttgtaagctgatggcaggtcgacaactaaaaattcttgcattattgtggtggataaaggcgcttcacccatggttaatggaagctcgattattccttgactggcaataatgtcgcctgtaaatccacacagatttaccatgcaaggttttaagttggctttttcaagtcccattttctttagtgtatccttataaaggatgttcactgaacttccgttgtccactagcaccttttttatccttttcttggcaagctagatggtgattaccagtgggtcaatgtgaggtacctcacgtgttttgcatcttcctccacgaacataatcggaggttcctcagtcttagcctttttagaaggttccacagcaaaagcagactgcccgttcttaatttcctttacatatctcttttgggcattgttactttccccagtaatttgtggccctcctgcgataaccataatctcatctccttcaagaggaggaggt

SEQ ID NO: 107114 - DNA, 528 bp, Cannabis sativa
taccaattaattaaaataaaaaaatagagaatatatattttttggtatatacgttgagtgtagtttttttaattaatgttttattttaatttttttttaaataaatgactacgttaattgtagtttttttaaattaatgttttattagaaaataaaaaaaatgaaaaaaaaataaaggaataatagatagatatatttggagtgattttttagttaatatctatattaaaatatattcattagagagattttaccggccatgtcacattttatattaattaatatttatgaaactaataaaacattaaagaaaagagagaattaaagaaaaaacaaataatactcattagaaagtgccatatatatcaccgcctcatacttctcttttatatatatagatatgtaaaatgcaaaaatataactatgtatcttaaaaaaaagagtaaacacgagacaccttggtacttggtagctatatgagactaataacttaacaacacaagtcatatgaaatgaataaaagaattg

SEQ ID NO: 107115 - DNA, 537 bp, Cannabis sativa
acaaaaatatgttttactgttttaatatcacttaactattttcatcattaatttaagcattaactaaataaattcatgaaaaatataaaaaaaaaagtgatcgaaaaccaaatctaactattctaacacaatttatattatgtactaagccacaaataatttactttaaattttctgagcaacttaagtatttttcataattaatttatgaaataaactaaataattccaaataaattcagaaaattatgaaacttcaccaaacaccttagaataaaataaggaagcaaatctacaaaaatatttgagaaaaacacctaagaactgcccataacgtggtccccggtattcatgtcggtttcgtcgctggcaaagtataactttgtctccgattgctcttgacgcgtctttttgattggggaagctctccacagtgctcaggacctcaaaatgatcaagatcaaccaaagaaaagaggcccaagttagcagatcgatcgaagtggtctccttcattggcggtgtaccgtctttaatgg

SEQ ID NO: 107116 - DNA, 805 bp, Cannabis sativa
taagagttagatcgagaagtaaattagaagaaaacaaatacaaaacttgtacaagcaaagaatcgagtttacctgatcaggagctatcatgacacctgtctatactacaagggtgactctataaaagatgtcatctacttattgctttatgtagatgacatgcttattataagtcaagaaaggtctagggttgatatggttaaggctctgctcaagacagaatttgaaatgaaggatcttggaaatgctaccaagatccttgggatttctatcctaagagacagggataaaggaaaactaatacttagacaggaagactacattgaaaagatcatagataagttttctatgtgggatgctaaggttgttaagcaacctattactagtcagtacacactttctaaagaacaaagccctaagacagaaaaggagattgaagctatgaaggatgtaccctactctaatgcagtagggtcagtgatgtacttaatggtaagcacaagacctgacctaggttatgctatgagtgtacttaggaaatacatggcaaatccaggaaaagttcactggttggccatgaaatggggatttaggtatttacttgggacaactaaagttggattaatctacaatagacagaaggctaacactataattgaaggttatagtgattcagattatgctggggatagggataataggagatctacatctgcctatttgtttctaattggtggcaattgtgctagctggaaagtgcaacttcaacctgttgtggcactatcaactacagaagctgagtatg

SEQ ID NO: 107117 - DNA, 535 bp, Cannabis sativa
ttttttcctacaggagtggatggttgagaggagattgggctccctgatctgaatcgtatgttcgataggcctgggcacggccagaagtttcttcttccttttgagcggagtcacctgctctttctcaacctcgtcttcctactcaagatgctcctgagcatactgcttggctccctcacctcccttcaacttagcttcacgcttgagttgaatgacttcattctcctgatgagctccctcagtccggccagtgctggatttaatcttcttctccttcacaggttggggaatgaaatccttcgggtagagcccgtactccgcaaagttgtcctctgaggtcaacaaaatgatattccgggcaacatccggcagctgagcgattctttgagctctatccctaagagcaagtgtgaagggtggacggtgatatatagggatatgctggaaccgagtgtacgtggtgcccatgccatccaccatgtaatactcgtcaacaaaattcccaattttgctaacggccttgtccccggtgccc

SEQ ID NO: 107118 - DNA, 542 bp, Cannabis sativa
ggagcaattgttaaaaggttttaagaagtagttctaatctgtaagagatcatcgaccagaagcatcttcattaactaatgttaaacaaaaaccaagagaatcccttaaggcgtacttaagccattttagtatggctgcagccaaagtcagaaatttgaatgactgtattgaattaacatccctttagggtggaattacaactgccttgtcaactgttgggggagacttataggatgatttggagggacgcccattaagaaatatcaacgagtttaatgagagagcatagatttttgtgtaaaaagaagaagcacagaatgaagtcaagctgttaaaatctagtttgggagataaacctttcaccagtacaacgacaacgagcaccatgactaaaatattgcaaaatatgaatggttcaaatatcaagaggaaggacgagtcaaaaaacttatccaagggtaagaagaagcaaaagaaacatgaaaaatatgttccaatttattcagtgtacactaaattaaatgaaactcgtgaaaaaacat

SEQ ID NO: 107119 - DNA, 642 bp, Cannabis sativa
  modified_base (207)..(209): a, c, t, g, unknown or other
cgtagatcggcggctgggcaacacagctgagtgggcagtgagaataaattcgcactccaaaaaagattttcgaaaaagaaccctaaactcaaatcctaatctctcttttttttttatgaaacctaatttcgaatcacaaagctctgataccatgtagaaaatagtgaatcgaattgtgtatatatttcatagaatagtatatatttnnntacaaagctaggagactaaatgggaaactaccaataacaaaataggaaactactaaatatcagttaccctaattcttttacaactaatatacaactaatattctaacaataaaattaaaaactggtttgtgttcaagaatgtgcaacaattctagtaagtttttcatttccctatgaagcaaattctcgaaaagtaaaggttccacccagaggattaaagctctccacaatgagtctcaactcttaccaattttctccatacctttctaagagacgccctccccttatatactttacggtgccctaaaataattaccacttcagcccctgaaacttatacaactcagccactaatacacaccaactattaattacaacaacgagagttaagaactaagactaaagtttggtttaatttggtggcttatcaaat

SEQ ID NO: 107120 - DNA, 563 bp, Cannabis sativa
ccgttaaaaggatttcatcctcaaaatctaacctgaatagctctgtatgttgagtcctcatatgagactacaactcccaagtggcttcctccaccttactgtttctccagagcactttaaccaaagcaatggtcttgttccgaagaaccttttcttttctgtcaagaatttgaacaggttgctcttcataggataagtctggttgcattttaagggtttcataactcaagatatgtgtaataccctaagatttaaataaatggattagaaaaccctaactagttaaatgtgtattattgaggaattatattattatatagtttaatatataagaatttatatgatttatgctatgttaagaccccgttggtgagccatgggcattttagtaattttgacccgagaagggtaaaacagtaaaattaatttatttacgtgcttatggaactatattaatatatagtttgcatgtgttgtctttttcaagtgtgttctaacaggttggcgtggtatagtcacaaccgggtatttcgggtcgaaccgggttcgggcctgaaatacaa

SEQ ID NO: 107121 - DNA, 512 bp, Cannabis sativa
  modified_base (274)..(276): a, c, t, g, unknown or other
ctacatcatgatcaagacgaactatgcgctgtagtaaatcttccattcgacgaacaagggcgtatgttcgccgaatggagagatagagagatggaggcattaagggctcaccatgcagagatcgaagatcgtagtcggcaagctaccgtgttgatacgaagagcctaccaaactgtaggtcggtaattgccgagtgtcattcccctaggagagacgaacgaggatccaacgatgaacacttccaagactataaatggtcagccgcccaatcccnnntcacgagttccactcgtgggcccagcggtaggtgagcagaccctgtctggtaattcatcaggaggagtcatacctgatggttccaaccagatcaatggtgtcgttccacccatcaaccaagcgaatcaaccgctaacacagccaagcgcttctgtgttcgaaaggttagggacaacccatgacctaaggaatgatctaaacagaaggaggggagcagacgatcagaattttacgat

SEQ ID NO: 107122 - DNA, 646 bp, Cannabis sativa
tttaagctacaacttacccaaagcaggtcctgccgtcgcgactcgaactccaaaaattgacaatcaattttagaagttaatttttactgttagattatcatctacggtcaaaataacctaaatgtatttttttcatattttttgaattattttattctcatttaataggacctccttcacctataaaaggagagctcctctagtttatttttaaaagtttagaaagtagccataaggtcaaagtactctctttagtttctctctagaaattaaagaatctagacttagccttatttctgcaatccatctcgtgagaataaaaattcaaagtagacgtagctccattactgtcgcgacaaaggtagtgaactactataaattgttgtgtctttctatttatacttaacatatatctcactcttaccaatctagcgagcgagtgtggcttaggagtctatgtctatatttttgagtcaacatttactatagccaaatgtggaaaaactccactttatcatgttgaaataagtttacagtgttattaataaataattattttgttaataattatttttcttttgattattaagttgacagactacatggttgggtgaatcaaattaaaggattgaatcctttttgtcct

SEQ ID NO: 107123 - DNA, 550 bp, Cannabis sativa
ttaccaatcaaaaaatttagagaaacttacaaaaatattgtaaaatgaaaaaaaaatataaaaatactaaaacacgaaaatttttatatttttattgtactaagtttacaaaaatactatgtttaagtttaaaaattataaaaatattgtgtttcagtaaaattaaaaaaaaataactcaaaaacaactaaaacagctaaaaaacaaccctataacaacttaacaaacaacataaaaataacgaaaagataactacaaagcaacagaaaaataacaaaacattgacctaattacaataaataaaataatattaactccttcatatatttttgtattacgattttttacttagttttgataacttgatttatctttttatatgtactattacattattttttcatggaatttgttgttatttttattctttcaattttttcctattttctatgttttgagttagtgatagttaaaatgataatttattttttaaaacttaaataaatagttatattaattaaatgggatatataatataataagtaatata

SEQ ID NO: 107124 - DNA, 537 bp, Cannabis sativa
ggttgttcaaacctgattattctcacaatttggtccttcattcaacaacggtctgcatttgcgggcagctgggtgcagtctctactggatgctgcgacatcatgggaggtaagcctgttgcaattccatgctacaaaacaccaccaaagatcatgttactcttttgcgatttcttctttgttttgattgatgaacactagatgcgagtaccttattaatatgtaataggagaaaggaatcaatgaggaaggtgacactaaggcagagaggagttcagtagtggtatagttatgatgccaagaagttaaagccttcacttgtcttatttcccattgggcatcccccttgttgcatgtatcaacgtttagattacgtttagattcgccccatgaggagcaggaatttcgtaaattgaagaaaattcaggtctgagattatatttttatagaataaaaacgttattaattactgctactagtatacgtatatgatattattcagaaggaaaatatatacgtatattgtattttctaacaa

SEQ ID NO: 107125 - DNA, 593 bp, Cannabis sativa
  modified_base (534)..(562): a, c, t, g, unknown or other
atttgccaagtcaaacttttgaaggagatccttgatgtacttagtttgacctatgaatatgccatccttttgttgcttgatttgaagtccaagaaaaaagttgagttccaccatcatgctcatctcaaactcactatgcatacacttagaaaattcttcacaaagagcatcattagtagcaccaaagataatatcatcaacataaatttgtactataataatgtctttggattttctttttataaaaagtgtattatccgctttacccattgaaaaaccatttgaaataagaaaagtgcttaatctttcataccaagctctaggagcttgctttaaaccatataaagcctttttcaatttgtaaaaccgggtggttgagagacataaacctcttccataatgtacccatttaagaatgcgctttttacatccatttggtacaagataaaattcttgtggcatgcaaaagctaacaacattctaatggactcaagtcttgcaactggggcaaaggttgttggaaattattttacnnnnnnnnnnnnnnnnnnnnnnnnnnnnnttattaacatcctaaataagaactttctaaa

SEQ ID NO: 107126 - DNA, 1273 bp, Cannabis sativa
ttaattaattaattaattgaatagaggacaaaacctaagaagaaattaaaacaaaaagagcccattaacgtaaaacttgggcttttgagcacaagtaaacgggccttgttgttaatgtaataattaaagagacagagagagttgggccccatcttaaagttcaacggcctgacgtatcacaatccacgtcagcatagggctcccaatccatgttaataaaattacattaatacccataaccacttgccaccactattgatgttttataaatagttaagggttttcacaataatttttagggaaatttgtgtcaaaaaaaaaagttcactttatattacacttaaatatttatgtaaattttttaggaacaaaaataattatataattcatttcgttacaattaaattgttgtataaatttttagtggcaaaaatttgtatagtcattttatttataatattagttcctttgttattatcaactaagaactaatgttatattaaatgtaataattgtgattttttgaagtcaaatataaattatataaggattttactaataaaatattttcataggaatttaagtaccagcaaaaaatttacataaccatttaaatgtaacaaagtaaattacacatgaatttttgttgcaaatatctctaatttttaaacgtatttttagccacaatatttattgggactaaaattacattagtgataacttgtatctaaataatatattttagttataggtaaattttttattgtaatgaaaaatcacatttaaatcacaaaaaatttatattgtaaaattaaaaaattgtcacaaaaaattatttttctttttgtagtggtgtgagaactataaattttgacatattttttaattgaaacaaatatattatttaaccaattaaaaaaaaaaagttatggtgtaacttactcctttattattatattgtaaattaggaaaaattagatatatttaatacttaatttagttaaatgggaagcaagtagtttaatattagatagggtaatagatagagtaggagaagaaattgtgacatgtttggtagtggacaacaccctctttgtcttttaaatcaattacaccttgccggtcttcgagggtaacaaagtcaattcaatcgaatcttcattgaatttttgggctcttttttatgtgacatatttctaaatatttatcttttttatatagattagacaagaggtgtatttgatagtgaaatttttaaaactatcatttttaa

SEQ ID NO: 107127 - DNA, 706 bp, Cannabis sativa
atttgagcttgaagagatttgggcttcttagatctggtattgatgaagaaaactcgaggagagagcgtcagaaagagagatcgatgagagagaaagttcggagaaaataaagaattaaaaattttatattatttattaataattttataaatttaaattattctttttaattttaaaataaattcaaaaaatattttttttataatttaaataatcatattaggtagaccaatataaatatgccacatgtacatgatggtatacgtaggcagaccatgtcagtagttaactgagataaatagataacaccttaaatttacaaacaatttagtagtttggagggttttaccatcaaaatttgagattgaaaagttaagtgcaagtaaaatgataattgagagaatttaaccgcaaattactctataattattggagtctctaatatttattggttactaacccattataaacaggggcggagccacatataccccaacaggggccgtggtcccccctgaatttctaaagcttatatatatttgacatgttagagatagatatataatcatacaaatacactcacggttagaaatcccctcaaaaaaatttataatcatatataaaaagccctcaacttaaactaaaatagagttggcataattgtatcgtaccatatatatacatataatttcatatataattttac

SEQ ID NO: 107128 - DNA, 606 bp, Cannabis sativa
gcatttgtcaccggaaaaattaccagaaattggtttctggtaatttttccggtaatttttctgacgacaatggcaattctgaagaaaccagtttttgccggcgccagaaaattcgtctcaattggcattgtcgctggaaaaatcaccaagaaaccagtttcttcttcaagaaacgggtttcgaagaaaccagtttcttcttcaagaaacgggtttcgaagaaaccggtttcttcttcaagaaacgggtttcgaagaaaccggtttcttcttcaagaaacaggtttcgaagaaaccagtttctaaggtgattttttcgttgacaatgctaattttgacgacttttctgacgctagcagctattccggcgacttttctggcaccgacagtaaacttcggaaaagtcatcagaattggcattgtcaccggaaaaattaccagaaattggtttctggtaatttttccggtaatttttctgacgacaatggcaattctgaagaattttctggtgttggtagcaaatctgacgactaatacaccggcagctactccagtgactttttcagtaccgatagtaaactgtgagaaattcgtcagaattggcattg

SEQ ID NO: 107129 - DNA, 615 bp, Cannabis sativa
  modified_base (207)..(214): a, c, t, g, unknown or other
  modified_base (492)..(499): a, c, t, g, unknown or other
ggttcccacggaactgcttgctttaccctgaaccaccagatgtcgaggtaaccttccttttctgatcagtggtggagtcacaaccatgcctaccataaacaggagtaggaaaagtgggggttccaccaacactcggagtcactcagggctcctgaaggaatttcacagcacccttggctctcaaagctttttcaaccatttcagcannnnnnnntgcttcattggtggtgatcactagatcatgcatgatcttttcacattcaaaccagccaaatacttctctttcttgctaaagtcgattggcccgattcccacagcgagcttggccagacagtcaaacttggtagcatactcagtaaccgacatcccctcggtttgtaccaactcagtgaactctttcctcttagcactgtggatgacttcattataatatttagagttaaacaactccttaaattcttcccaggtcataactgtgacgtcccgagtgannnnnnnnaactcccaccacacgagagcgtccttgtgaaactcaaaagtggcgcaggtcacccgatcattaccaaccactcccataaagttgagaatacgttcaatcactgtgagccactgctc

SEQ ID NO: 107130 - DNA, 1265 bp, Cannabis sativa
gaggctcattttgatatagataatcttttctactcctgttagagtagggagtacataatcatgtaggctcctttcaacattagggtgagcctaatctccttgcaaaactctaggaattatatcttcattgagcttcatcttctctgctttcttggcctcccttttgttctttctattctgcttacaagatttctcaatcacaggattcaaaggaacaaggctatctgcaccgcttttgttgcgcatacaaaaaaaattcacctcagatgggaaaaattgacaaccaagcaggttagaaacaaaagaaaataaaatcaaaatagaataaaaattagttaaatcgatattgataaattcaatctccgcaatgatgccaaaaacttgttcagtaaatttgatacggaagtatacataatcgaaacaaataatataatgatatataaactatctttccctcaaggattaattatcaattaccaattaattaattccttagttatatttgatgcataataattgttggataaaggataaataaaacacacaatatttaaaatttagagaagtaaataataaaaataacgattattatgatccccactttcctttattttatttcataatacaatttctcttctttctatttaattgataagttgaattaagaagtttattatcaggttaagacttatgaacccaatttatgtgaaaacttcctatatttttatggtacgtttaatcacaaaaatagcattaagcatatcaactaataaaatcatacaaacaacctaggtactttcgtcttaaattaatttgcatccatgacaatgagagcatattcaaatctctcctttcagaactttgatttgaattcataaataacaattatagatggctagtaaataattacaaaatcaaaaatagattgaatgaaattgaataaagagaagaagaagaagaagaaatcacatgaatccatataataaactcaaatggttcgcataataatcattaaaagaacttagctactaaaagacattctaaaacaaaagaaattcaatgaaaaacataaaagatggaaatggaagagaaaaaaaatactatttggagtcctccatcggcgccttctgctccttactctccttctacactctagattcctcttaatgtttgagtggtccaaaaagctaaccatcagccccctttttatagtgaaattttcaagttgccaaaaaatcaccaaggtcgtggccttacaaatgagt

SEQ ID NO: 107131 - DNA, 651 bp, Cannabis sativa
aatatcgagtaagttgtgcaatcccacatcacagcttacccgatttttctccttacggattacgggactactgattgtcacaatcaccccccttacaaggtctgacgtcctcgtcgaccacactttcagctgggtcaaggctttgatactatttgtaacgtccccgcttcaagcctctattggacccttatactcaaggaatgatgactcttatacacgagtacgtcactctgattacttcctagaatgacgactgaccctacaaaccaacaccagtatttctagcgtacttcatcctcactcgcacatttcttgagaaaacttctcagttcacccatatcctaaaattatctcaggttaagcacgcttaaccatggagttctttcgtgatgggctaccaaaaataagatgtaccttgttgatataggcagtaccaataaatctatttaagctctctttaactgtgtagtcagatacttacacgatcttagaattatcacacttgacattcctcaagcgatgtaaaattgcacagtttacctgatctttattcttacagatcacgagactatatactcactgtcacacaaaaggtcctaaggcatgctctactggtacattaaaatgtgatgtaaaattaatagataagct

SEQ ID NO: 107132 - DNA, 1714 bp, Cannabis sativa
  modified_base (306)..(313): a, c, t, g, unknown or other
aattaaaattttaaaaacaaaaaatagtccctttcaatattttattaaacagttttttttttcttaatcaatattttagacttcgaccagactcagacttaaatccccccacggccctggcgctgaacccgacctctgacccgaacccgaatctgaccctaggcctagacccgacttaaataaaataaaaaaatgaaaataaaatgacctttacagaatacacttttgttttctgtttttaaaattgaaaaataaaagtggttatagaacacatttttatttttcaaaaacaaaaattttactttnnnnnnnngattaaaaaattagaaaacaaaaagttaccaaacggcacctaagttcaaaataattataaaaattacactttacaatatcaaaattatttttattaaacgtaaaagaaaaattagtagaatagttactcatattattacaaaaaattttaaaatttaatataattttaagatataattatcactaaataaattacaaccgcacacaaaatgcgctttgtttcctaatttatacagtaccaaattaaataattatgttaaattacatttaaatcaaattattaggtattgaagctccctacaaaaaacaatctcggccagtattcttactacgacattttcacccaactaaaatcgcttgatgggtgcacccctttggaggactatggctacctcaggcctatcttaaaaacttaagtcatctccaatttctaaatcgttagcccattatttcgaaatcgctttctgcttgcgaggatgattgtgagaacatatcaagataagtgaaaactaatatatataagtgtgtagaggagatgatcacttctaatttaagtttagagattggaatcatatcaagagagaataatttcctattaccgtactcatacaaggccattaaaaatagtattacttctctggccattgagttcacagcggtcgacaacttccatggtaacaatggcattaaagaagactgtatcattaaagaattgtattatttgaaaatttatgaatttaagagtataatatagttagatacgaaacaaatatcttaacatctttaaatataatatatataagttattatggacaaatattttagcttttttatttaaattattaaattaaaaaatgttaagaaaaattatacaatgaatcaaaaatagatcgaaaggagaaaatagtaatatagattattttattttagattgaataaaaaaaataaaaaagagagagaattaaggagagaagagatagttatttgaagtattttagagcgccacgtcactgccttatgtggcgtgctaccccatggcacacccacaatgtggccattttgtaacatgagcattccttagtgcttgatcattagtcaagtcttggacgaagcacctcattgggggtagggagtcttttgttgtttagctttctttcttttgtatttccactcaaatatgtatagagagctataataatatatgttcctggaaatcccttaaaaccccaataagctctttagggggctgacctggtgacttatgaagcaccttgtcaccagcatgatagggcccagctgtgtaatcccttgccctatcaaggccatataataataaaatgatatttatccatgcttcttgtgtatgcttctatatggtctttgtgatgcatgtttgttgcct

SEQ ID NO: 107133 - DNA, 625 bp, Cannabis sativa
attgttaacttctatcgagactttgcttgttgttgccacggtactcgtgcggggtttacttcctgagccagttttcaacagcttcatttcatttcttgcttcctccttatgcacagatatgaatgctctttcatttaattcattaatgtttctcacagagggaccctggagatcaccccataatttaccttcagtcgtggacaagtcagttgtttcttgcttaaagtactctcaattgaatactatcatttaggtttctgacttttgtagaggctgtgctaaagcgacttaaataagccttaagtggctcgcctggttattgttttatattggttaaggatgatgcttctggtcgtcggtctcttgtagcttaaaattaaagtccctaacaatcccaggatgttatggaatgatgagtaaatttgtcgaatcagctgctcgcagctcctgttaaggaggttgggaataaaatgcaacgcaaattattcgagacattactggctcgcatgatagtgttaaagttgtttaagtgagcgactgggtctgtggtcccatcatactgcgaaacatgtgggttcctcatccatggggaaactcagagttaagatatcaggatggaatggct

SEQ ID NO: 107134 - DNA, 1671 bp, Cannabis sativa
tgcattatgtactttcataaatatttatattctccgcgttccactcacttgcccgcccgtgactcttgttttctttctttcttttttttttttgaagatgggtttataaataaaagtaaaattagacctcatggtcattacaaaagatattaataggtatagtagatatatctaccatgcccgtaatattattggcaaacgtctatttgaccacattatgggccgcatagttatagtttctagaaatacaagaaaaattacaattagccataaaaaaaaagagaggaacttgtaatatcgcacatagtttttaatcccccaaatagattcatccatttttaggttcttgataacaatctctaaatcactctccaccatcacaaaaggatgatgcaaaaagaccgtcgtctccatggctaaaagacaggccacaacttttccaatgagtaggtaagtgaagtgtaacttttttgccgccacccacaaaattgacttttgttttcttagttttatatacttgagaatatttttgtaattagtaagctttaaaaataatatttttataaatattaaatagtataaatatttttttttttaagaagtacataggtgtttattttagattctcttaacctaaagcagaaaaaatctctatttttattctctttttgaagtctatcatttttttttaacagttatcaattttgcctctgtcacttcaatatactctctgtgcgactcttttatgtaagtgtattttagatagagtacatgtaaaaaaaaactatatttcaattaattataaataaaaaaaaaacaggtgttttttaatttaacctaaatttatttagtatggtctcaaatagtttacggattattgaatcagaaattgccaatggcatgaagagacctaattaaagacaaccatatttttttgactttttcgaaaattcaattaatattttgtttctttagcatattacccgcatgcatttatttacaacggatatgaatttcttaagtatattagtcaaacggtgccttgtaaatacttagagatataatcttttcttttctatatataacactcttcatttttcaaatatatcactgagagaaagaccagctaaaaaaattaagttcataatggttcgttcatcacaactgagctctcttcttcttcttattcaatatttaactttcacatgggctgcaagtgcaaccccagcttcaacaactgaaagcttcatcaaatgcgtataaaaaaattccgaactttccgtaccagttaccacaaccctcttcacaccaaacaattcatcatatacttctgttttaggatccacagcaacaaatcttaggttcttggaaccatcagttccaaaaccagacttcatattcacaccattacacgattcccacgtccaagcatccattacttgtttgaaagagctcggattaaagctcagagtccgaagtggaggccacgattacgaaggagtttcctacgcatcaataagccaaactcctttcgctgttatagatctcatcaatcttcgacgtatcgaagttaacatcgaagataactcggcttgggttcaggccggtgccactaatggagaactctattacagaatctctcaaaaaagcagagtacatgctttcccagct

SEQ ID NO: 107135 - DNA, 677 bp, Cannabis sativa
ttagagtttcaatagagaaaaaaatagaagaaaattatattttttttctaatttttaaatttttaatatttaaaattatttttaataattaatattacgtgaaacactaaaaatttactacgtggacagtctattgtggtagactttcatacatgggtgtaataagcaaaacataagtgaggttcaaagaattttactaccaaaaattggatttgtggagctaagtgtaactaaatgtgtagtttgagtactatttgttagaattttttatcactcattaaatatgtaatatcatgatttaattctataaacaaatatattacatattattataagtatgaaaaacatagatctaaagaatatctttgttgattcaaaaagaagaagccaaatagcggaatcgtaccttaggtagtgatgatcttaatccattttgtaaagatgatctttgtggtgatttcgagtaatgatcttacatatattttctgataatgtgtaaccttataagcgcttaacttttgctatcataattataggtatttcaaaacaatctcgtccattaattatactaacataggatcgaagcggcttttgtaacatttagcgtagctaaacccatcaatggtcacgtaaatcaatataactaaatgacatagatcaatcatgaatgtgtagca

SEQ ID NO: 107136 - DNA, 575 bp, Cannabis sativa
ttataaatagtggcaagcaagatcaaaaaagggacgaaaaaactcatacaagagaggccctgaaaaataatcagaaatctgaataaaatttacttactcatggactatgcagaattttaactgcaaaaccacgtaaaaaccctgtgtgttcataccttttattttattgcttttgtttttctatgtgagattgtcacggttagactcaaatttggttaacaaaaatctgcgttaacaagtggcatacattctgattttcattttagcaaaaactagaataaaaagtcttaaaaagtgagataaaaagctttttcttgtagtagtgtattaaacctttatttaataataacatgttatcttattctgcatttaatgatataaattttattacatcattaaaatttaatcatactctatttgttaagacacttgtcaacttctaaagtgtagccgaatagttttgagtataatatttttttgtttaagttactaatttttttttattataattttaaaatgggttaaaataaccgcggaaaagcgactatatcacctaattataatatgtttgaaat

SEQ ID NO: 107137 - DNA, 1026 bp, Cannabis sativa
tcgatggaagagtcaggactcgacatccacctcgagtcctaaagatgcgttcaggaaatcctcaggtaaccaccacaactagatgacaaaatgagcgtcctaataataatcgtactcgtagggaatgtgtgaacaaacaaggaggtctcaatttgaattagcctacagataattctacgccaaatagggaaccagttgcatctgatcctagtcaagaaaatgtaggaagagaagagagaccgtaggaggaagaccctaaacggagaaacccacaaagtcgggcccaagtgcgagtagaggtaaatgaagttgaatctcattcttcttctactaatagtcgttctcctagtatttataccaggtcaaagtccgttgagactcaacaaggaggtaggtaccatgtacatagaggcgatcttcctaatcatctcaatgagatttttaaagtgcgatctcagacatcaaggaatcgcaatgacaacgagccccatgatacccaagtgggcgatcaaggcatgcagaatgtgagtaacccgactaatccagtcaacctgccaatctcacccgctgcagccatagaagtaatgatgcctaccaacatagtcgcagttagtgctgtaccagcagtaacatagaccaatcccatgttgccaaaaggtattgaccaggagagcctcttgcgagcattaatgtaatgcccctaatgctaaggcacgctatagtaattttttaattgcagtgctagctttgctaatcaaagaattttcttaaaaattgtgtcaaattaaaactttaatattaactatgaaactttataagctttacataattatttacaaaggtcgggatctaaactttttacaaaatattccaaaatacattagtcaagtcgcacagcgactacaaaatggaaaccctagatgtcccgaggctgaacactacaggtggcaccgcgatcacatgtacaacctcatcctagctcaagctcactcctgttcacctttcgtctttcctttacctacacat

SEQ ID NO: 107138 - DNA, 2057 bp, Cannabis sativa
  modified_base (1164)..(1165): a, c, t, g, unknown or other
agtgaggcatcaacctcgctatgtctaaaaaggtgttaacaaaacatggtgattgttaacttcagaggatgacacgtgtcaaccttggagaatacgaatcaacaaatataataacaaattatattaaagaatattaaaatagaataactcattaaatgctaaactggtagagtatatctataactcattgactgtaaagtcttgagtgagacacagatgtgcaaactattaattcacgtattgacgagaaaaccatttcgtatatatagatatgatcgcaaggacgacatcattaatacaaagtgaggcataacctcactacgtatgaagaaaagtaagcgagacatgttaactgttagaacacttagcgtataatgtacattatacaaacaaagcataacagttgaatgaacctggacaacgaatagtgaggcatccatattgctataagaaggcatgctctgcgtaccttcactaatcagcttcagacatctttcaataaaattcactgctccgtcgagtcagctctctcagataaaagttgatgtccaaatgatgttgaatgctaaagtttatcttgtcaccaagaactgcgattgtcagatggagtgttatgtcttcaagcgtagaaatgacaagatttacattatcaacctcagaaagacatgggaaaagctctagctcgctaccagggttattattgttatgttcccagcgagatgtcacagaacgatacgctttacaacgtattcaatacacgtattcattgacccggtaaaagcggaccaatcacagttgtgtgattttcaaataataaccgcatttagtttacgtcgaacgtaatcaaatcccacaattttaggggattattgttgtaagatatcagtccaatttataattaactgccctcctatgtaactataaataggagcaggatacactgaaaaaagggagggaaaatccttaagagaagaagctccagaattgtatcaaagatatctaataagatagactcgtggactatgcagaatttcaactgcagaaccacataaaaaagctttgtgtccttattttttctttactgccattattttctatgcaaatccatcacgatttaggctttaatatagttaacgaaaatctgtgttaacagtttggtgcttnnattgagagccttcgtgaaaaaagctcagaaaaagaaaccctcctgatatatatatatatataaaaaaaaaaattgtctatggctaagaacagataaaacgttgatactcctcatgaagaaaccactcatcgtcatcgaaaagagccaatgggctcacggaggcctcccaactcacgatcaaaatggaccactcgttctaggaagacccaacttgagggtggcccaagtacacggaccactcgttccaagaggacccaacctgagggtggcccaagtacacggaccacacaatcaagaggacccagaatccaggaacagggtatgaagaacctgaaatgaacgttggtggtgcccaacccaggacaactggtgagaatggtgcctacgatcctacaaggtacgtgccaaccgtcgagttggaagattgccaactcagatgccacttgaaggaagcaaaccgacgaaatgctgagttggaacgtgaggtagccacagctagggtagcacaggagaataatacacaaaattaacctaatcctggagtgagaagaccacgaggcagacctcgcgactcacgaaccaagaggcaggagacagctcaagagaactctcagaacgctgaggaagaataacctcgagaaactgagggcccccctgaaaatgaacagccagagccttctcacagaaatgagaatagaaggcgaccagaagccagggaacaggaaatccctcgtggaaacaagggaaatcctgggactcaacttgggatacgaaggtaaccaacgaggcattgtcaatgtccttctcaaactaacatggaacgggcatgtacaaaccctagcagggggcacacaacgaaccacacccaagggagaaactttcaagaagacat

SEQ ID NO: 107139 - DNA, 574 bp, Cannabis sativa
taagttttaattattaattatcgtatttattatattaacaaataatatatataaactaatataaatttttacttccttttacagttgagaaaaaaaagacctacaatccaaaaattgaattgttattattatagcgatagtggatagaacaattgctggcggtgattcacgaaggcttagacgattgatgttgaaatatataagaatttttcttccctaacttattttttaggttaacttgtaattagatttatttacttgttaacacttggactaattttataatatttgtgtaatataattgtaatttttttaattacttctataaaattaatttaagtatattggctaatcataaaattaatttaaataatatttaattaaaattaaaaaatatttattataaattaataaatatataatttaaataaattaaatttgtagatttttaataggtttttaaatgaaaaataaatacattattaagaattttgcgtcatattttaagcctttaacgtcgattatatgtgcatatagcatcggttatttgtatataaccgacgccatagtgcat

SEQ ID NO: 107140 - DNA, 750 bp, Cannabis sativa
  modified_base (631)..(662): a, c, t, g, unknown or other
  modified_base (709)..(723): a, c, t, g, unknown or other
gagccaaggcttggctctgattgtgtccttgggtagcggcgaactgtataccgctcattgggggagtagcctgaggtggggttcttgaaagctgaactccgggtacatatcttgcaactctggtcgggtagtatcctccgtaagccactatttgggcttcttctaagttgatctacttttggaccctcttctggaaatcttggagatacgcagctcccggttgttgtaactcgttctagaacggggttcctgtacggatcccagcttggagaagttcaagtttttttccgtcatcaactttcttagtcttcgaggcttcttccttgaacctttttatgaaatttttcaatgtgtctgtgggtagttgcttgatgttagtcagggtgctaacttcgagattaatctttctcgcagcgacaaactgtctccggaagctaacttgtaatttgttcctgcagtccacagatcctggttctaactttttgaacgattcctccgcgcaaccgcttaatgttagtgaaagcacaagcacttaacatcattactaactctcatggccgtcattactcggttaaaccaggacaaatgatcgctggggcccgagtcccctgttgggatttattttaccagnnnnnnnnnnnnnnnnnnnnnnnnnnnnnnnnaacaccctaaatatgaactttcttaaacgataaattaaacacatatnnnnnnnnnnnnnnnttacattgatgcagcggaattaatgtc

SEQ ID NO: 107141 - DNA, 938 bp, Cannabis sativa
attaaaatcattcagcgtattagtttgaataatttagtttctttactcattagttttgccttttgtgtaattcttaataatatttaactgctatgcaacaacataaaagatatatgctaatactttaattaacaatcaaagccaaatgcaaatttaactcatgcggtccttttgactttgaagtctctgttttatgaaagaatagaactgtacaagataacataatgcaaagtccaattttgattaaaattaataatgtagtgcaaagtaatgaaagttttatatcagaatatggacaataagaacaataactaatacaaaacttatcaggtaatttatctggttacaggtatacacctttaatatctttttctctgtaagcttattagcaccatcctcacccattggtaggccaagaatagtatagtgatctatatcaacatccatatctattctaatgctgaaaattagaaaatatgcatgaaattagaataagcaatgttcaatcaaaacataaacaaaaaaaattaagataaaagggtccttattattatcatattaagatgaattaagtgatgatttttcttcttctgacattgatgatattattttcatctcctctgtttaaaattatcccacctaagatgattaccaaaattaaaaacataattaatatgttattatacaaaattaaatatatataataataagaggtttttttatttttatatttaaagtaatttttttatatatttttacgaaaatctatataaaaattaacagagtaacttaaattgcaactaaaataccaagatccatttagctactaaattaaaaaaaaaaaataatatataaaataattttccaaataataatgcacattaattatagaaataatgaactcactaattatgagtcataaaattgaaattattctc

SEQ ID NO: 107142 - DNA, 1156 bp, Cannabis sativa
caaatgggcaagcagaagccgtcattaaattctaaaggtcaccctaaagaagaagttgctggcctacaaaaacaactggcctagggactaaggcatatcacacggacaaatataaacagatcaagtataaggaagttaaaaactaaatatattcaaacataatgtagattgtttgaacaagaaaaaccttaaaaagaaaaggcctggggacgggccataaaagtctccccttaagaaaaataaaaaattgtcttagaagtgaggggaaggacgggatatgtaaagacaaaacaaaaaaattgataataataataacgaaggagataagcaaatgacttaattggcccgataaggaagacgaggacccctccgctcctccaacgctgcatccagcctcttattcttctcccagaatcgagcaagaacctctttaggcttgggataaaagctgagattaagattctgaccgttggatggccagaccatgaagactccatcatcgaagcgcttcttgcagtgctgacaagtgactggggcgaggagagcatctctctttgccttggccgcctccttttgagcctgctccttaaactcacaaagccccttcacttcaatagttaggttggtgcagctcctctagagacttcaacgttgcggtcaattcctgcactgcctccttagaatcatgaaggtcccgcctcactgtggccacgaccgcatccttggccttcaatgccttgtccttagccttcagtgccttctggtggctccgctccataagggcctctttctgctaggcttcctctcggataactctcttctgcgccttcgaatcctgaagactcttcatggcctcctccatgcccccgaactcggacatggtatacccatggtcaattaatgtcttcgagaggtgaccggtctctgcaacaatctgttaaccaacaaaaaaaatatgatacgtaatatcaggcatcagaaagaaaagaagctcgaaaatatctctaacaaatgggaacttaccgcggtaagggctgcactcacgtcctagatctggtagatgggattagtaaaagcacaggccacatatatcttcattggaagctgagtcaggccggcagcgaagtggcttgttatttctgaggcaaagggagct

SEQ ID NO: 107143 - DNA, 1343 bp, Cannabis sativa
taaaagacccaacggatcccccaatgggtgtgtctaactacctcatagatagcatccacaagacactgaattcgcctagaaatggttgcatctttttgctatctcatgcccttcgggctgaaaaatacaggggccacatatcaaaggctggtaaacatgatgttcaaagatctcatcggccgcaacatggaggtgtatgtggatgacatgcttgccaagtccaaaaaggctaggggcacgtggaggacctaagtgaatgcttcaaaatccttcccagctacaacatgaagctcaaccccctcaaatgctcttttagtgtaggctcaagaaaattcattggcttcatagtcaacgctaggggaatagaagcaaacccagacaaaatccaagcccttttggacatgaagtcacccttaacagtcaaggaaatacagagcctaccaagacgcattgctggattaagcaaatttgtgtccaagtctatagataaatgtgtatccttcttcaacatcctcagaggaaacaaaaaatttgagtagacagaggaatgtgaaaatgcattccatgagctgaggaaacaattggcccaaccacctatgttgtctaaacccctagacaatgaagagctaggcgtgtacctagcagtcacaaagtatgttgtgagtgctgtcctcacaaaagaagaagatggtgtatagtaccatgtatattacatcaacaaaaggcttatcgatgccaaaaatcgatatccactcatggagaagctaacttacagtctgctcttagcttctagaaagctaatgccctacttccaagcacaccccataaaggtgtgcactgattgtaatgaacgcattttagaatatggattaggaaaggcaattagtgttaattattgatatttttataattattcatgaatttatttaattatgggtctaattattagagatgggcattagagttataatttctcaattccaaatatcttattaaactctagaggtattatttgtgttatatgtgaattatgtaaattttatgatttttgctcggagacgacgtaaatgcgatggatggtcgctagagtcacatgggtaagtctagaacttttttcttagtgggataaatatttgatatgaatagaatactgagtttaggccgggttatggtttttgaccattttaccccaaggattgttttagcttaagtttaagcatcaagggtattttggtcatttttgttagtgagatgtggtggcttatcccttgaatggtagctggccattattacttagggtttgaattatcccttttcattaactaagaaaattaaagaaaaat

SEQ ID NO: 107144 - DNA, 509 bp, Cannabis sativa
  modified_base (477)..(478): a, c, t, g, unknown or other
gctggactaaaactagcccaggaaatgaaggccgaacacattaaaatttgcagtgattcacagttggtggtaaatcatgtatccagtgaatacgaggctcagggagaaaagaagataggatatctgagaaaaatgcacgacgtgctcgcacaattcaaaagctacggtctcagacaaattccaagagaagaaattacaacttcagacgtgttagctcgattggcaagcagcaatgtaagtgacaaggcaaagttggtccctatccacttccttgaagagcctagcatcactagcacggaagaaatcgaaatgattgacacgtccccaaacttgattacgccaatagcagcctacctcgactcttggcaactcccagataaccgaaatgaagctcggaaaatgagaaggaaggcagcattgtatatcatagtagaagggatcatgtacagaaaaggattctcgatgccattactcagnntgtcacacaagacgaagctgcacgactccta

SEQ ID NO: 107145 - DNA, 561 bp, Cannabis sativa
aaattacgattatttactcacttatagcaaaatttaaatcttatactgaaatagattagtaagatcataatcccactaattacttgattaactcatagtataatacaaactctcattatttaccattaggcttatcgggatattacagatatgaatatctgagtgtatatatatgttaagtgcatatgcatgcttatatgttaattacactaccaacacttgtacggttatggtacaaagtgcatttgtatagtgaatattatttaagagtacagtacagtgataccagcataagtacgggaaagtacagggtgtttgtggtatgtcactcattggtactcggggtacgaaacaaaccctaccaacactcgtatagtgtggtacatagtgtatgtggtatagtggctgtaccctagtatggaacgtttttactcatctattaagccttgtaaataggtgtatcgacgcttagatacaagttagtattatatgatatgttatatgcttttcttaccaagtatgtcgactcacagttctgcttccatgtgtaggtaaaggaaa

SEQ ID NO: 107146 - DNA, 530 bp, Cannabis sativa
  modified_base (348)..(350): a, c, t, g, unknown or other
agtttatgatatcttatctaatgtgaaaatcggtcaagtccgatgtatactccatacatccaatactagtacactttactaatacactggaaaagacatatcacttatacaagtgtaagtaaactttatcactgattatcacattagtgtaaatccagtacactgataaatcacgggacttaaaaccttaaaacgtataatcatgattattttctactgtgtagacaacactataatcatgaataattatatgttcaggatttaatagaatttatgcattaaacatataatcatgaaagaaatcatgtgaatcatgcaacataaaatgatttctaatcttttattaannngtaaatctaattatattgaaatattatttagggcataaaatcccaacatatatgtgattagatgtattttgattcatactttgtctattatgccttgttttgattattttgtttttgttttgtttttttaagggttgagtagttaaaaaaactagctaacatatctgtttacagtaagaa

SEQ ID NO: 107147 - DNA, 995 bp, Cannabis sativa
cccaccattacgagaacttacagaatcttcccagagtgtaaatcacatatgcgtgatagataggctgccttaaaaaaattgctaggggtttcccagtgacctaatgggcatgcgttcttgagcatgaccatggagttattgggaaacacccaacattttgaaaaacctgaccaatcacaacatgcgactacattgtgcatatctgactagcggcgtatctctagaaacagctgaggagtctccagtgtccgaaggaacatgcatttctcgcataaccattgggtcaatggaaaatcctcacaatttcaagaaaagcaactagttaaaacatgcgattaagtaggttaagagaaaattggccatatgtcacaaagggctgggtgtatcgtagtaactcaaggaacatgcgatcacacgcatgaacattaagtaatggcgacacaccaaccatttgaatgtcctaaccagtatttccaataaaagcatacagaaaacataaggcaaaccctaagttctaaacacgggttgggatgactaaatccccaaatgccctaagtatacacacacgagtattcaagatgttcatctcaatactcgcgagtcttcaaaacagcaagcaaaaaagatgcaaatactcgaagtgttccttcaaaaactcacgattatgcaactttcaggcctgttttctcctaggaattacctagtttttaggagaaaaaaaaataaggctctatgtgtattccctacaatgacatagattctttactccttaaaattcaaaatgcagattgtttctcaaaatttgaagaaaaattcacaagtagtttcgaaaactaaccttggagattttttcgattcctcttttgatcgttttcgattgcctctaaaacttagaaagttcaagtttctggatagaggaagatagaaatatagaaatgggtttttgattctttaaaattacagagagaaatgggaagaggacaatggaaatgaga

SEQ ID NO: 107148 - DNA, 708 bp, Cannabis sativa
atgtttttttaaaaaaaaaatattaagaatgattttatttaaaaattatttaagtttatatatttttttaaataatggagtgtatatataattttatgcagtacaaataaaacttgggaaattttatttacactccaaaaatttctaaagacaccatatttatttaattttattttatataaattttatatcttaatagttatcttaatagtattaagttttgtattaagttttttttaagtttttttaacttttttcttccaattcatattctttaaaaaatattcttatcaaacaaaaataagttatattttaaatattatgacaaaaaaaattaaaataaaaattatatgaaatttttttagaagaaaatatatacatgagttgtaaaaattatgaaaataaaattaaaataagtattgaaattaaaaaaataatgtgtttaaaaaaaaaaaattattaagagtaatttttaaaaattatttaattttatatattttttgtttttaatgatgaggtgaatttataattgtaggggtgcaaaatgcaaatagaactgcccataaaacttgccttttaaattaatgaaattacattttgctccttttcacctgcgaactgtttagaggccagaaagcttaggagaaagaaaagacaatacccacaaacacaaacactaccaaattctctctccgtgggtgttttttt

SEQ ID NO: 107149 - DNA, 686 bp, Cannabis sativa
gcggatcttcattccgatcttatcttgagtgtccgaaatgcaagaaacaccattaaggtgaatgtcgggccaagacttgtttcaagtgttgcatggtcggccacttcatcagagattgtcctcaggccaagaaggaggagcctaagaagagtactactcagaacccaggacgactttttatcatgactcaggcgaacgcagttgctagtctgtcagtggtgacaagtcagttatctataaatggttgttcttattctgtattgtttgactctagagctactcattcctacgtgtcaagtagagtaattgaaagtttccataaaccatgtgatatatatacttcgaggtatggtaccctgttaccatcaggagaccttatagtatgcactaggtggattcgatccttgtatttctggattgacggtggtgaattaaccgccaatctaatagaattgcaattgtctgattttgatataatcctggcaatggattttctgtccaagtatggggcaacgatcgactgcaaatggaggatggttgtgtttgagccttatagtgctaacccagcagtgtttgtgggtaaagttcaggggatacatataccaagaataacacttttcaaagctaagcatctgatgaacagaggttgtctgggattcatagtcactgcagtggataccagccaa

SEQ ID NO: 107150 - DNA, 753 bp, Cannabis sativa
agattttgtagtcaattgaagacgcaatcttgtttcagatcaaactacgatgacaagagatacaacagaaaccagaactagtactcaaaatctaatgatcatggaaatcaaagaaaagactctgcagctgtggctgagagcagtggagatggacgtttagatgggaaattattttctatttcaaaaaataataacagtaaagagcggatccttgatttgggatgcagtaatcatatgtgtcttgtaaagaccgcttaatttttaatttagaaattagcagaaaaatagggtttaattatgaaacttgcatattagttatgaataatcagttcacagagatttatttgaattaagaaagtattttatatgtcatatatggaacctcataattttgcatgttttgtggctgacaatattagaacgtggtgtttggctattagaatcatagcttagtatttttagtattgcgggacaatatagttagacattgagaatgttaggaatagttaagattttagaaatgaccaaaataccactaagtaatttttaagacttttagtgtgggcaaggacattataatccttttgcctgagtgatttcttgtcgtttagtggactttaaatgagttcattattcagatatttaggctgaattaattagataaaaccaattcccatttttcatttttactaaaattaaaaaataaaagaagaacacactctctctctacatattctttctctctctctctct

SEQ ID NO: 107151 - DNA, 568 bp, Cannabis sativa
  modified_base (48)..(50): a, c, t, g, unknown or other
ccattaaaggggacaacctgacatgggataaccatcggtctgggaggnnncatgtgaaatctgctttggataaaggcttagtgaatggcgcttggctcaatttatttcagagggctgtcctcggctcttcccagacctgcaacttcgatcataggcctttatgcttaatgacgaatggtcaggtcgccaagtataaaagaagcttcaaatttgaggaagggtggacccgtgatgctagaagcaatctggtagtgaacaatgcctggaattctattagtcacatttgggcacctgctagaattttcaaaaaggttgccttttgaactggagcagaacccaattcggaaagcttgatgttgctataaaagagctcgagaataagcttaactctctgcagagcctgccggcggggtcccgagactgggatcaagaacgtgttatacgtcgcgagttgaatgagtcgttagaaagaaaggcgatctattggaaacaaagggccagaatttcttggctcaaagatggggataaatgctcaaagtttttcttcctttcggcgaccattaaggga

SEQ ID NO: 107152 - DNA, 592 bp, Cannabis sativa
tgagagaatctgatatacccaaatctattttgcttaagacttggcttcaggccaaatagccagtttgtatcatcggcagatggctgaccctatccttgagaggcataaaacacgaacaggacaaataagtacttaatgcccttaggtttgaatttggtcaaactaatgttataataattgactatctccttaaagtacgaatgtaatggtagcattgcaccctatttggcgtggggacccgaccacacacagttccctctccaaggtctgttgccagctacctgggagagggaaggaatcatcattcgaattgccccaggagaccattttcaaaaaggttagtcaatctcttgaaagttaggatggatggtggaaaaatccattgagctccctttggaccttttctacttaatggacaagcctcggtatacgtcttcctgaaatagtcccatctagcttctaagacttcaccgaatggaagcacccaagctacccccttttcctctttgagttgcaggatataccttgccctggtcctccatttcctgaacttcaatgtctctagtaatctctgttggaatatattttacca

SEQ ID NO: 107153 - DNA, 1160 bp, Cannabis sativa
taagcagacttgacagtacactccccagaactatcctgcccccaaataagctcatcctctccaaaatcacccagaagagggacactgaggatatcattaaccagagaagcagaaaagcagtttgaaagtttagaaatatcccaatccccattctcagaaataaagtaggataacaaaggggaaggaggcctatggttagaagaaaaaaacttgattctgttattaggaatccaatggtcttcaatcgtcctaatgtgactaccatttcccaccttccataaaagacccgactgcatcaagtccctaccccagagaatacttctccaagtaaaagaagggttgtgaccaggtttagcctcaagaaaagcattgcgagggaaatatctagccttaaggacagaagctaggagagaagaagggtttttaaaaattctccaggcttgtttagccaacatagcttggttaaaatgaataagagaccggaagcccaaaccacctaagaatttagatttacacaaagacttccaagatttccaatggattttatgggaagtccctgatgatccccaccagaatctggccatcacagcttcgatgcccttacagagtttgacaggtaagcgaaaacaagacatagcataagccggaatagcctgaataactgcctttagcaaaacctccttacctgccctagaaaaacacttagaagaccaactcctgagaacagaattaactcgatcttttaaaaaagcaaaagagtgatacttagaacgagttaagcactgaggaagacccagatatttacagataaaaggtctatcttcaaggttaaaagaggagaaaaaaacagtacgaatatcaggctgtgtattaggggaaaaaagaatagaagacttagagaaattaatgacctgtcccgaggccctagaatagatatcaaagacattttgaagagcagcacaggaagaacgactagtagtacagaaaagaagactatcatcagcaaagaacagatgcgataaggagggtgcattcctagaaacagtaatacccttaagtaagccagcagcttggcttgccctaagaagagcagaaaaaccttcagcacagagaataaacagatagggagaaagaggatcaccttgtctaagacccctaga

SEQ ID NO: 107154 - DNA, 543 bp, Cannabis sativa
  modified_base (327)..(327): a, c, t, g, unknown or other
ggtgtatctcgccgcggcgactggagcttcaaatgctggggcttttgccttcatgatctagccgcagccacactaatctagccgcgaccagaagtgcatcacgcctcaaattggtgtttttcttggctcagctcgtcttttactggacttttgcatcctgagacctctattattcctaagaacctgaaaacatagaaaacaagcataattccgtcctaaaacagtgaaaagcgaacataaaatcgatctgaaatataggctaaaaatagcctaacacccccgtaacctgtatgggttttacaagtttgtttttagcaacacattagntccggggtaagtaaatgttattttcgtatttgtgattatcatatacttatagaaatttttaatgacagttaaattgattacaattgaattagatatgtgcttgcaaaatttcgaaagtttaaagtggataggaggtgcatgtcatcgttgcgacccttgcgagaagttgagggatccgtaagtgttaaattggttactaaatatgtatcatttatt

SEQ ID NO: 107155 - DNA, 562 bp, Cannabis sativa
tttttttttttttttaaactaacacaaacattcttcttcttacaatatatatatatatgaagttttaattgttacatcaaatatataaccacggtggttacatttattttagttgtttgatcattattaaacggttgtgattaatttaaaaattagataaaaataattaataaattacctataacataatactaacttatttttatttatttcattatataaaaaaattataaacaatagttatgaaattttttatcatcccgagaaggccaatgtaggggtaggcgctctaagcaagaaaggtctcgggtaagtacttagcacgattatgatctcacctcagttggcagatgacatggtcaaatcaagtattgaatttgtagttggaaaacttagtaatttgacactacaatcggactttttagaaagaattagagctgctcagttggtggattcagaattggtacacgtttaggaagaagtcttagttggccaagctaaaaattttatagtgtcgggtaacgaaatgttactttataaaacccgaaattgtgttctgaat

SEQ ID NO: 107156 - DNA, 549 bp, Cannabis sativa
ttattattattattatcttttttgtaaactacggatttaattcattagaaaataaatatatatttttaaggaagaaggatttaaatttatttccttatcggaatgttaatattatataattcttttttaaaagagggatttaatttgggattaggattagaaaacaaagatgtattttttttaaaaaaaagagggatttaaatttttatttccttattagaataataatattatacatgataattattattatttttttttttcttttaacaattttttcttgttcgataattaaacaaattattattatttttaaatataatggatttttttatttacgagataccaatcctaattctaatagaatgatagttgtctatatttcacgtctaaaatttttagttgtaccaatatattctatctttaaattttcgttgattttttttattattatctatctttaattttttttcatttgcacgtgattaaatttattagcaaaaattaaaaaaatatattataagaattctatttttttttttaaaaaaa

SEQ ID NO: 107157 - DNA, 647 bp, Cannabis sativa
ttacatgtttaataatcaaattaatatcaccataattgtagtccattactaaattttcacataaaattgtacataatgttcaacgtaatctctttaagcaaaaaacaaaaaaaaaaaatattcaacataatctcaataagaaaaattatgtttgtatcctatttattgaaagaagtagatgaaattactaaataaaaatatatttaaataaaatacttttataagaagtagaatgaatttattaaataaaaaaattattttattgatttgaatatgtattttatgtcgtgctttcgtacgaagaaattcgtgtttttgtgtcgtacttttgtgctttccgtgtcgtgccgtgcttaaacttatattattcgtgttgtgtctgggcttatatttattcgtgtcgtgttgggtccaaaccaatattctttcgtatcgtgcaatactcacgttacttgtattcgtgttggtttcgtgttgtgccaaaaaacttagtccaaatgtacagctttagacggccacctgttgcttgtgtacttaatcatatttgtaaataattgaaattaccataaattgtaatattttttttttcaaagaaattgtgagatttctcttggcaaattaacttatattgaaaatttctttcacac

SEQ ID NO: 107158 - DNA, 794 bp, Cannabis sativa
gagaaatttgaatttctatgcttagtttaactacttaattaaaaaaaaaatatcaacaaatatctctttttatgttatatcaaaaatatgttcatataaaatatttaagtgaaactaacttttacttatttttttttactaaaaacttttttttttattttttttttcaaccgatgagaccatctcagcccatatgagataaaagtgagagatttttctaattatatagaaaaattaagcataaaaatttaattttttttttctaattttacactgggtaatactctttaaaagtgcacctatatatattgacgaaattgtgtacagagttcactatacacttttactttttctttctcactaccaaactccaataagcattaatccaatcaaaaaatttatctatcaaattcctctaataaaaatatataccacacagaaaaagagttaattattatttttttttttggcaaactattgtttttaactttttttacttctctatttttttttttctcctgcgttatcgtttatagtttgatgacatgatcaatttattgcacttatttttaatgatcaatttcaattttcttttgggtttcgccatattaaagtccattattaaaaaggcatatctcatgtattgatgaattataagtacaataatttatgattatggactatttttcttatggtatcttataaaattgataattagtactataaattttatatatttatttatagtagtttttttgttgtaaagtaacgctaagatatatatatatatatat

SEQ ID NO: 107159 - DNA, 518 bp, Cannabis sativa
  modified_base (476)..(480): a, c, t, g, unknown or other
tcccattgcatttgggagatttggtcgaagtaaagcaacgaccgggtgagccactgcaggcatacatcaacagattcatgacaaaagcgaccaaagtttcacgagtaaccgaggatggaaagttatccgcgatactggggggcattgaagtcctcggtgaactttggaaagatataaggaagaacgagccagtagactcaatgagtgagcaaaagccgggcaaaacgaaggctccttccactggaacatctgcccaacttcccaactattccaacaatcaagctcaagtggcaagcattcaagcaacaaccacaagcaaggaaacgggaagaaaggaaagttcactgataaatcgggacagactccccgtgatcatgccaaatacactacattcactatttcgactgaagatataaagagtatgtatggcaactcagtcgttaatcccgtacaagaagcccgggcccatgaagaannnnnccaacaaaagggacatgacgaagttttgtcggttccac

SEQ ID NO: 107160 - DNA, 508 bp, Cannabis sativa
  modified_base (166)..(167): a, c, t, g, unknown or other
  modified_base (481)..(482): a, c, t, g, unknown or other
tctctttcctaattttaataatgtaagtaaacaaatgtaagagaatgattaccttaccattgattcccattatttattagtaaacatgccacaaaattcgaaaaccccaaaccccaaaccacaaacaccaaacccctattctcattcccattccctggcccattcnnattcccattcctattcccattccaattcccattgccatccccattcccattcccattctttggcccattcccaatactatttcctttcctattcctattcccattcccattctcaatccccattcctattcccattccccaaaccccaaaatcccccaagcacaaaaattcgaagaaccccaaaccacaaacaccaaacccctattcccattccttggcccattcccattcccattcccattcctattcccattcctatttcctagcccattccaatttcttagcatggttactatgttgggttttatgccctnnataaaactctttacaatctgattagt

SEQ ID NO: 107161 - DNA, 542 bp, Cannabis sativa
tgggtgaaatattgtggctcttcatcaactcaagtatttcttaagcttccatgtggatcaacatgggaggtagggttggcaataagtagtgatgaaaaggtatggatagaaaagggttgggataaatttgcacaacactgttctttaagctgtggaaatctcctagtgtttggatatgaaggaaattctcagttcaatgttatggtgtttgacaagagtactgtggggaaagattatccttttactcctcctaaccattctgaggacaagtatgttgatattgattcttctaatgaaaattcagacttgtcatggttttctaaaaccagagacaaccctccattacctagctctgtgccccacaagaaaagaaaaactagtccttatccttatggtaaatctgaaggtattcatgatcatccttgtataattttcatgtgattattaacattcttttccttatatattttaactaatttgttgaatttgtaaatacgtggagaatcttatgtaccaaggcgggtggaacctcaaaatattat

SEQ ID NO: 107162 - DNA, 507 bp, Cannabis sativa
taagggcccaaaaaaaaaaattccttatggcccactttgtttcagggccggccctgatcttaagtgatgtttgatttggtgtaatataaatgtaatggtaataataggaatgttaattaattacaatgtttggtttgtggttggaatgagtattgtaattaaaattattgtatttggtttggtgtggaaatgtaatgaactaaaatgtatattgaccaaaatatccctattatttttattttttatagttataaaatatttaaataaaaggtgaaatagacttttgaattttatttattataatattatattaattgtgtaatagattgtaattgtaatgacgtattacaagggttttcattgtaatgaggattaccatatacaatgtaataactattattacaatgtaatggattacaaatttttttttaaaaaaaaaagtaaacaaaataataaacatattgattaccattacaattcctgttcctataaaccaaacatacccta

SEQ ID NO: 107163 - DNA, 748 bp, Cannabis sativa
atgtttaaaaatcacgtaatacacctatgctagttagggtgttacattatatttgtgagattctttatcatcctgggaaggccaacgtagtagctgatgccctgagtagtaaaggacagagttagatgaataccgtgaagcaaatttctaggcagttagtagatgagatgacctgagccaagattgagtttgttgtggggtagttggctaatattaccccgtaatctactcttttggagaaaattaaagaagcacaattgtaagatccagagtaagtgaaatctcgagatagggtttcgacaggaaagactagtaattttacaatggatgatacgagaatgatacagtttatgaatcgtgtttgtgtgtcgatggatgatgacattaaaagagagatcttaaatgagtctcatatgactccttactcatttcatccaggatcaacaaagatgtaccaagatttctaggccatgttctggtggccaagtatgatgaacgatatggctggatacggagcaaggtgtttgacttgtcagcaagtgaaggctgaacatcaaaggcctgcagggttgctacagccattgaatcttccggaatggaaatgggaaagcattgccatggacttcgtggtttgattgcctagaaccatgggacaatatgactctgtatgggtcatagttgtcaggtttactaagtcagtgcacttcttacctgttcggacgaacttctccattgatcggtatgctga

SEQ ID NO: 107164 - DNA, 596 bp, Cannabis sativa
aacgacgcttccttcagctctcaatgaaagtaccaaaatgttgaccaaggttttcggcaaccaattaatttatagaatgagaagatctatggaagctttaatgcaggtgatttttacgtggttcgggcattaatgagtcgtagccacgagtctttgttatttatgagagttcttgtacagagaatgttcttggtgaatctctctctctcttttctttactcccttcgattccttaattaatcgatcgaccccttttacgttctatttttggggtatttatagtgtttttttgggagaatcactagaaaaggatcatttgtctttaagtgtcagccccttagggataaaaattcctagcagatataaataggacatacatgacctatgtcgtaggtatctaagggattaggtaaaaataatcttttatccttccttgattgatgtgagtcttcataatggagtcgtcactagacatgttggttatcatgtaattgtcataaaagaggcttacgccatctgtcaaatcctcttatggaggttctgatacgtttcccccatgccacattaaatgcgaaatgactgctcaagggaagcct

SEQ ID NO: 107165 - DNA, 618 bp, Cannabis sativa
caagccaaaaaatcagaatacaaaagataggcaaatttaaatagcaaaataagagggcaagcccagtcaccacacctgagcctcatctgaatctaacactcgttttgttaaagaatgagcaacatggttctttgaccgactacaatgcgacatagatatgctactgaaagaattcttaatatgattaatatcattaagaacaataccaaactcattgaaacaaggggccctgctattgacagtaagaactacccgctgacaattagagtaagcagtaatcaccgtatacccctacacgcagcaagaaagcccatagagcaaagctttggcttcgacaacgtggggttccaacaaatccgcgcaaggagcttcactcgagaataggacatgccccaaacgattggagaccaaagcccccatccctatttttcggttctcaacacaaaccctagcatccacaaagagattgaactcaccaagaaccagatccgtctcagatgaggctagttgattacttgcattgttagaagccgaatccaaagaaactggctcggcattattagcatcttgatatttttataaataatctatggtccaagcactaaccatgttatcaga

SEQ ID NO: 107166 - DNA, 672 bp, Cannabis sativa
  modified_base (332)..(345): a, c, t, g, unknown or other
ttattttcctaatgtaattcttaacaatgtaccaagaaattataatgtgttaggtcataatttatctaagggataattgcggtaaaagtccccaaaaacttagagttgatacagattaatccccaacctcaaaaattggcggtaatagtcctcaagctgacattttttgttagtccgttggtcccctttttaactgatccgttaaactcaaataaaatgccacgtgtcaattttttattggtccaaacaataattttaattaaaaaattaaaaataaaattaaaaaattaaaaaatatattttaaaaacataaatttattttattttatttnnnnnnnnnnnnnnttttcttttctttttttctttttagcttcttcttcttctaaacctcctctgattgccagtgtacccagtcgaccccaaccacatccagagtaacagcattcacagccgaccccagccctagccacctccactctagccccgatgttgtcaatcggcttagtccccactgtcgattccttcatgtttacccagatctaacaaaacgaaaaatttaaaaaatagtgtttgggtagaaagaaaatgagaagagaaaatgggtatttgagaacaagctcaaaagaccccaacccagaaaaaaagaatttaagaaagttattttcagagaag

SEQ ID NO: 107167 - DNA, 748 bp, Cannabis sativa
gaatagggtagtcaaggatttccttgatatttgtgttattgtatttatcaacgacatccttgtgcactctcaattagaagaggagcatgagcaacatctgcggatggttttacagcagtttcatcaacataagtagtatgccaaattcaagaactgcaagttttggctatttcaggtgtcctttcttggacacattgtcagcgaagatggaatcaaagtggatccgggaaagataaaattcgtcagggattgggcgagaccgaaaaatgctacagaagttagaagtttcttgggtctggcttgttattatcgtcagtttgtaggagggttccctaaaatttcaacagccttaacaaaaattactaaaaataatcatcatttggtatggacggataagtgcgaagcaagttttcaggagctgaaatagaaattaatcacagctacagtgttagccataccttttgataaagagaagttcgtggtttattgtgatgcatctagacagggtctggggtgtgtactgatggaagtcgatcggcttattgcctatgcctcttgttagttgaatgaatatgaacagcgatacttgactcacgatctagaacttgccgtggtagtgtttgctttaaagatttggcggcattatctctatggggcgttgtttagagttggttaaggattacgattctgagatcctttaccatcctgggaaggccaatgtagtggctgatgccctgagtaggaaggg

SEQ ID NO: 107168 - DNA, 954 bp, Cannabis sativa
tgcctttcttaaaggcactcttccttctccacctgaaatagatcccctccacaaccattggactcgctgcaatcagatggtcatgtcgtggatcctccattccgtgacctctgtgattaaaagcagcataatgttcctcgacaccgctgctgaaatgtggactgagctccattcaagattcgatcaaggaaatggacctcgaattttcgaactctgagaaacgttgatcactttgcgccaaggcgaacattctgtaagtttttactttactaaactcaagtgtatgtgggatgagattcaagaactcagaccaagaattccttgtacttgtgctgtatttgtagataacttggcttttcttaaccaagaacaagtcttgatattccttactggtttgaatgaatcctttttccctgtccgtgctcaaattctgttaattgagccttttccctctctgtccaaagtgttttccatgattattcatgaagaaagacagaggaagcttaaaaaccctcacattcctctttttgcatctgtccaagaacctaatccatatgttgctcttgcccaaactccttcggcatcagcatctaacaacaacaataataataaatgcaataagaaaatgagaccctattgttcaaattgccataaaccagggcatttaaaggataaatgttacttccttattgggttccccctagctatggcaacaagaaaccatcaaataaggaacctgctgctcctaatgccactgcttccactgataaattgctggccaatctgactaaaaatgaagatattcaagcactcatttctctcctcactcaaaagctgcaacaaacaccaactgatgcaccagcttttgcctcaaacatctctggtaatgcctctaactctcgtttttgggtaatagacagcggtgcaacacatcacatttgttgcaacttgtct

SEQ ID NO: 107169 - DNA, 725 bp, Cannabis sativa
aatgataaacttaggaaagcaacattaccgtgtttggttgacattggaatggaatgtgacaactttttttttttttacaatggtaattattttttttaataaaatactaataattcaatatttttttctttctaagtgttcaaaataatttttatttattatttttcatataattttataaaaaattaacaataataaataattataaagagtaaatttatatacaaattgataatatattttataaaataaaatatatataaaaaaataaggaaaatacttcatattttaaatatttatatatatatattagtattcatatataaaaaaaacaattttaaaatgcaaaaatttatgtttgccaatagcattggaaagtgaaaaccacattttctttgggttttccttgccagccaaactaaagcccaccactttcacttagctaacattaaaatattaaaaacctaacaaaacatagaaaactttcaaatttccattcccacttctcccattaccgcataccaaatagcccctaaaagcttgataatttccaaagctatttccataagagttcttttagtacttagagatagggagaaataagcttccaaacaaaggtgataatacatttttcaagtcatgataatctacactcaaggttgtgagtcagtgtatatatatatatatcttcttcttcatattatattatatgggtgactattcaa

SEQ ID NO: 107170 - DNA, 516 bp, Cannabis sativa
gcgcacatccccttttcaggatttgtggcacgattattatgggcaggaatgtagcagtccaattcgcccaggtagccaccctggtcgagagtccccaagcgcgcctcaataaccttggatggaggactcacccacctagcacccaaggcaccttgccttctgtgaagaaccgcagcagtaagctcctcactgacgtagtccacgccctcatccaggacatttctgtcggcatcaattggctccccagcctcgttgtatccctcgtagtttgggggttcaacctcctgctcttcctccgcctcggagagacaaataggacgtacgtcgtcctcctcttcctcttcctggacggttggatcctattcggcgctgggcaaagtggcgtgccgagccacttgaggatcagacgcatcgaccatacgcgttgttttcttggtttgagtaatcattctatggctggataaaatatttgagggagaatgtccttcactcgaagaaggtgggctggaacagaga

SEQ ID NO: 107171 - DNA, 670 bp, Cannabis sativa
attcctcgtagaaataagggaaatatgggggcacaacctgaggtacgtgggtcatcgttaagggatcaccaacattctttccaagctcataggaaaggaactcgcacaaatctcaatagggggaacgagacgaatcgaacccaagggagaagagtaaggcgtgaagagacgagtgttaccacaaggcacacgataacccatggttgatcaatgcaaggaggagagaataccgatcgcaacaatgatcaagaaggcaaaatatggtctatgggtggaacaagatttgtcagctgtcatcgctaatcagacctacgagaaccctttgaactagaaaaaacttgatttttgccaacaacttagtccaaagcaaggggattcaatctatttctgaatagatgagttggagaataagttcaggaggcatcaagtcagggagccaggaaaacaatcgggatgtgattctgttgaagaattcgagttgaaagcttcagggtcaaagaggaaagacgactctaagaggttgtccaaagataagaaacaaaagaaacacgataaatatgtacccatttatactgtctataccgagattaatgaaacttgagagagtatctacctcgcacatgaacagaaggtcgctttcaataaactaaagcccatgaaacacgcgaga

SEQ ID NO: 107172 - DNA, 1022 bp, Cannabis sativa
tacaatatataaatgtaactatatatatttatttaaaaggatcggacacctattttcttcaatataattacttttatatatattaacaaaagaaaaaaaaaaaaaagaaagaaaaaaaagcgtaggcaagagcaccttcttgtttttcattgggttcgccactgattgatatcaagacttggaaggaagttcgagatttttttttttttttcattgaagcgtttatatataaataacaattaacaatttgagatacgatcctaagatccttcatgaccacttgaattaggttgaattggttgttgagaactttataattatgttgctaaccttagacattttttcaactagctagcttatgggttgtaatttttttaagaaatggcccataatattggtagatgggcattggagttgaacattatagtgttgagctttcttccatattgcttttctttgtaattaatctgttgtaatctcctagtttgcttctattaatataatcatatccaatatcttttctattttcttcctttgctttgctcatatatttaatatgtatatgcacatattattggcctttgcctagcattaaagggcagtgaccattggtgtaattggagagaaatagggaagtgaaaactaggtatatcagagccccatgcatgcaactatgtatgaaattatgtgaataaataataataacaaagttttatgttttcaatatatataattaataataatatatatttattggttatgatatattgttctgagaatttatatctctttgctcacgttttgaacaaaattcgcaggccattctttctgatcgataaaatttcaatttccctagaatcaaagaatgtagtcttatttcctaactacaaatatataaaaaaatatactcatatactatataaaaaatatatattatttatcatgaatattttttgccacttgtttttaccaatctgcatctgcacgtcatatgatgtatgcctatatatatatattatata

SEQ ID NO: 107173 - DNA, 663 bp, Cannabis sativa
gtttctaatatagtgattagttactattttttaatttttttaaatcttagttaacatttattttagaattttgttaattgaataatattatattattcgataactaattaactttcaaaataataaaaatgtatataaaataatcggtataaataaaaatagtaacttgttatattacatggcaactcattagtttcgatatttttttaaagttacctaaatgtattttaaattatatctgccgtaatataacttaaaaataactagttggttactaagatgtatacaaataagttttaagagagtaaccaaaatgtgtcacaaattatatgatataaaaataaaacttttatataacagtaactaattggtttcttatcaatactattagtaacgaaaaagttacttttgaaaataaaggaaaataaaaaaataaataaaaaataaaagttgaaaacatcgtaaatgttagatttggctgacgtggcacgttagtaatagtagtaatgttattattgtaaattagtaaacttccttaatttttaatatatatcatccagtacttaattagactccaggactgaccctagacacagtcagactaagcttgtgtctatcgtccacattttttgagggcccaaattaaaaaaaaataaaatattt

SEQ ID NO: 107174 - DNA, 574 bp, Cannabis sativa
tgtggataggtgtgtgggcgcctagacaagtcgattatttatattttgttgtatgcttttcttactgagtttattggctcacatattctacttttctgtgtaggtaaaggaaaggcggaagctgaataggagtgagttccaagctcgggtaatgattgtacatgtcaagacagagcaatctggagtgttcggtctcgggacttcttgggatatattttgtagtcgctatgcgacacgtttgtaaaaatattttcaaaatgtttatagaagttttagcacgggatcccggttatataatatatatatttgtatgttcataaagtttattaattttattcaagttttgatttgacacgattttcaaagaaaacccttgattagcaaggtagtcttttatttgggaaatcactgtagcgcgcctaagcatcagggcgttacaaatgtggagtcctcatttctcaatttttttgaaaccaaatgctaaatttaacacaaatccaagaaaaaaaaatagagtcggatctgatagagactcaacaagttacaggacgacaaatctagttgacctaactac

SEQ ID NO: 107175 - DNA, 647 bp, Cannabis sativa
tattgagatataactaatattgctatataatgaaaaggttgattggttgagtatcgataatgtgatgatattatgcatgtgatatatggcctcacctgattaggtgatgcgatttttctggcgacgtactgggcgtaagtacgggcatcagtgatatatgatgagtaccgagcgtaagtacgagcttacctgattaggtgatgcgatttttctggcgacgtattgggcgtaagtacgagcgtcagtgatatatgatgagtaccaaacgtaggtacgagctcacttgattaggtgatgcaatgatatgatatatgggtgcaggtttttggcacgactcacctgattatgtgatttagttatgcgatatatgggtgccaggctatggcacgggcttgcctaattaggcaatacaggatttttagaataaagcatcgacttgtctgattaggcaatgtaatgtaatgaagatggttactttatgaggtaacatacatatataaattatatttttaaatgaatatgattcctattattggtataatagttttgtacaaatatttgtatattgatgcttattcatggcagatgccagtaatgatttagatttcatcttatgaacaatgcgtaatggtttgattctgattgtg

SEQ ID NO: 107176 - DNA, 630 bp, Cannabis sativa
actttcaaataacattaaaaaaactaacataaaatttagtatacgtgtctcgcacgtaactttttactagtatatatatatatagtttaatcatttatggttattgattatgaacatgtttattaattttttaaatatgtatatttaaaattttattaagtgactataataaattttaatgatggttattttatgattttaaaaaatatataaaaaaaatataagattaaaatacacaatttattaataacagtttattttttgccaacaaaaaattagtcgagagttaaaaaaaaatacaatacaattgcacacatatatttaatatgtaataatttaagtgagtttgacttaagaaaaaaaaggcaggcctttcaaaatactatatttcttgaatcttcttgattccgtctatataaattatattttttcttttgggcaatttacataaattactttaatatttaatatatatgataataaattaattaatttttttttcttctaatcacacttttgtttttctaagttaacattgagttaaattattctattttagtaaatacgatacttattattattatgaaaattattttatttaatttaatattttaagtatttgtgtcacaa

SEQ ID NO: 107177 - DNA, 582 bp, Cannabis sativa
aggtttattttcttgtacaattttctctattttatatatcatctttttgtaagatttgaccaatttatacattccaagtgtcaaaacctgaaatttacgaaaataagcctaatttaattccaaaaaatgataataaagaagaaaattaactctaaaaataacataaatactaggctaaaaatatcctaacaaatttccctaaactaaatccttactcgcccttgagtaagactaacaactaaaaataacacaacctaaatgaaacaaatcaatcaaccgaaacatgagcaattttcaagtaagataaatacaatagttatgaacaaaaattctaccaataataatatagaatttcagttttatatataacacaattattaaatgaataaccccgttacaattatctgtataatttgaatttcaccaaaatttgatcaaaacatacacagttttatatataaccttttttttgacgtgtacagttttataattttttttttttaaaaataaaagtcatcatttattaaatgaataaccccgttaccaaactcggtataacagctcaaccggaacagtgtccaa

SEQ ID NO: 107178 - DNA, 913 bp, Cannabis sativa
aggatcaggaaaagactactttcacatgtccttatggtactttttcttttaggagaatgccatttggattatgtgacgctcctgctacatttcaaaggtgtatgatggctatcttttcggacttaatagaatcatgcattgagatctttatggatgatttctcagtcattggttcctcattcgatcattgcctagagaatttggagaaggtgttaatcagatgcgaaaagtcaaacttggtcctaaactgggagaagtgtcactttatggtaacagaagggatagttttgggacacaagatctcaaaagcaggtattgaggtggacaaagctaaggtgtcaacaatagagaatttgcctcctccagtttctgtgaaaggagtaaggagtttcttgggtcatgttggtttctaccgaagatttattaacgacttctcaaagatctctaaaccattgtccaatttacttgtttatggcattccctttgagtttggagaagaatgtttgaaggcattccaagttcttaaggagaaattgatttcagcaccaatagtcacgtcaccaaattgggagttgcccttcgagttgatgtgtgatgcaagtgactacgcaatcagagcgatcttgggtcaaagggttgacaggttgtttcatacaatctactatgctaataaaaccctgaatgatgctcaactcaattatgccacgacggagaaagagatgctggcaattgtgtttgcttgtgataagtttcacccctagctaattggaaataaggtgatagtctacacgaaccattcagcaattaaatatcttatgaccaagaaggatgcaaagccaagattgattcggtgggtacttctactccaggagtttgacatagagataaaggataagaagggaactgaaaatct

SEQ ID NO: 107179 - DNA, 595 bp, Cannabis sativa
ggattgtattccctgttttggcataacgggaccaaatcctgtccctatattcatattgtactatacatattctcactagctatatacattttaaataataatatcattaaatatataatttaaaaaaaactaaaatatttatctatatatacaccacattatttaattctaattatttttttcaaaacaaaaaaaaaaatctaaaataaatgataatgaatataaactaaattaattatattatattaaataattaaattatttacatatatattttcgtactatatattctcactaactagatacatttcaaataataatataatttaaaaaaactaaaatatctatctatatatacaccatattatttaaacttaattattttttatcattcacttttctatctttcttctcactttcctctatcgattattttatattgttcttatactgtcctttgtgctaataatgtattggttttatatttacaatatagattttttaagcatggcatatataatttttatatgcaagtatatttttatttttgtcatcgatgcaagttatgatttgtaaatataatttttttaatact

SEQ ID NO: 107180 - DNA, 600 bp, Cannabis sativa
tgaagtgaagaaatatccaatgttgttgaagaccgacatgacacggaccgacaacatcgttaacaccgatccaaggctggaaacaaaagttatattgccccagaatgtaatcggtgaccatgttgtcgtacttgatgacactcggatcatgtttcgccttgataaaatcagcatacactccttttatagttgcatcaaaatatgtgcatgtcgtcgtgactctcttattaacactgacatcatataagatgctcttcctaagataatagagtgccacattcagatgctgcacaccataaataaaaataataactagttaaaaattgaaaaagcaaagaaactaaaacaaaataaaaacagacagaagaaaaaataaccagttacgtaccagatcgaacaattctttaccacaagtctgtaaaatcacaaaccaagacttgtcatcgatctgagctatgctaaaatcaaagggaggattaatatcgccagctattttttcattgttcctgaaatcacaaagaaaaaaatatccaaaatggaaaaaaaaacccagttaaaaaacaaatctcagcaactattaaaaacaaaaataacaacata

SEQ ID NO: 107181 - DNA, 751 bp, Cannabis sativa
  modified_base (523)..(525): a, c, t, g, unknown or other
agccaaaaactgcaccaccagcaccgcgaacacccctaaatacgagcacacttattacaaaattatgaatatttatagctattcataatcaaaatctcagtgtttcattaagctcctactcatgcatcactataagcacttacctccagtgcttcataaagcactctaattcacacattaccataatcccctaatctcagtaccacataatctcagttcttcaaaaagcactctaatcatacatcattataaacacgtattcctacatcctgtaagtcattgagactgtaagaaaagtgactaatattataagcagtatacaattcgtttactcacactatacaaaacacatttgattacaactcatcacataacaacatgcttaatcaatttgcacaacattgtaatcacatatccggtacttcataaagtacccttacccctcgttaatcgcgagctatgtatgtcaccattgttgccagatacagcgaacgataagtaagaaatctatccgcggtttcannntaattactcataacggtaatgaccttatctttttctcgatcataatcgagtcccaaacgataataatcattccatatcattatctcaatcataatcgagtcacagataataatcgtttctcaacattatctcgatcataatcgagtcacaaacgataacaattttttctcaataatatctcaatcataatcgagtcacaacaaatacatatcgggatcttgatcat

SEQ ID NO: 107182 - DNA, 658 bp, Cannabis sativa
  modified_base (293)..(294): a, c, t, g, unknown or other
cgagatgactgttcagaggaagcctgacaccaccaggagatgctttgatgccatcttgctctccgggagcatatcaaactgtggatgccttctccgggaggcatatccaaaataatcctttgctttataaagacttagctatttaattcaaatgctaaaccctttccatccacgtgtcattgtccggttggtccacgtatattgggcaaaatcataggcaatatttaccccccaagccttgtttaatttggagtgaacaaggcttgcttagatgcctccggttggctcctcgnnttcctggcacgtgctttgggcgcgtgatggtgtatttaatgatcaccattactgcagcgattcactttttgcaggcgtcaattcgtttcttatccattaattgatacggcgcattaatgggtgtcagacagacactcaagcgtttccaccgtcttgatgacgatccaatccaaccgttggatcctgggaattcgaattgtgtgccttcccagccattcgatggtagctgatcatagctgtttcacatgtgtttttgactataaaagccacccttctcacttcatttggttactttcagaatttcaccaaattttctcaagttttccagagagaaacagagacctttaaccaccatagatttctt

SEQ ID NO: 107183 - DNA, 1003 bp, Cannabis sativa
tttcattttttttttcctatttttctctctttctccctttttctatctatttttctctgcaacactaattttttttttttaattttaatatatataatattaatagtaaatgcacttttttatatctttttttaaatgctctcacaaaattttattttattatttttttaaaaaaaatacaaacatttattctatttttttttctcttttttacattttcttactaatcacacttaaactacttcatactatttttctttaattaatcacattttatagaaagaaaatcttaattaatttattttaaccattactaaaataaaattcttttactttcacattttttctcatatttttcttaacacactttctctctttttacaaaaaagaaaaaaaaaaattaagagcattcttcttgtatctttctcacttatatatgattaataaaagtaatttttttttttttttttatgttttgtagtttatttagaattaattgatgaatgatttgcatatttcaacaatattgatatctttagaggtttgtataaatcgatccaatccaatgacaaccgaccgatccaattacaaccgaccgccaaacattggatatccaattgtgatcggatcgaatgggatgttatttttgaatatctaatttgatcaaatcgaatgttagatggagtatctaaaaatccaatacatccaacatccaatcgaattaattaatattttcatttagtttgaacgagtaattagattttatgttgttataagtaagaaactacatgtatatataaaaattaacattaaaattttgtttttttttaaattggatggatccaattcaattcgatagataccgattgaatctgaaatattggataaatctgatctgattcaataaatactaggtttaaaatattagataaactagaattaaaccaatagatatacatgaatacatctaatggatagaacagatccaaaccaacatccatta

SEQ ID NO: 107184 - DNA, 1716 bp, Cannabis sativa
taaaccaagaattcagttatataagcacactttatatagaatatatatatatatgatctcctaaatttacaagttgttattaattgttagttaaggtaacgtttggtaatactttttaattaattttctctttttaaaattaaaaaaataaaaatatttttcaaaaaacatgttctataaaactgttttcacttttcaatatttttttaaacaatttttattttcttaatcaatattttggacttcgactatacctggacccaaatcctctcacaatcctggcgctaaacccaacctctgactcgaactcaaattcaaccccgaactttacaaaataaaaataaaaaataaactttacaaaacacacttttgttttctgtttttaaaattaaaaataaaaatggttacagaatgtatttttgtttttcaaattataaaataaaagtgttatcaaacggtacctaagcaagttttaattttcccatattttttttcttttgtgcagcacgaatatcttgaagtttaaatattcaaaagattcctgtctatttacaaccttaaagaaatttgtttaaagtaataattgatttattattattattatttttttcaaaaactaataataaagtaacatttcactactatatatttgtttagttttattttatgaaattcatatcaatttaaaattttttaatataatttttctttaaataatataatgatgttgcaacaaaatttttatcattcacggtttgagttgcttttacttccgtagtttttatgtgatttgttatatgaatttagattgcgatttaggttgctttattatgtaggttgttatgtaaatttctataaaaataaaaaaaatatatgttttaaaatataaaataatttttttttaaaaaaagtaacatattttaaatttaatttttgatattaaatatactaaagctataagaatgtctctatatatattggacaattcttttataagggttgaggaaattagctgggtactcactttaagttaattattttaatttttacccttttttaacattttatttttctacccacttttataattaatgttcatataatactctttcttcaacccaaaacagtaagatttaattttcagcctttaatgttaatgtgagggtatattagacaattttcttataaaatattgacatgtcacttaactaaatgttgattgacacaaaaaaaaggtattcttcaagttatcactagaaaaagacccatagttaagtgtgtgtcaaaccttatacaatattgacatgtcacaactaaatgttattttacttgtgtaagatacaataaattatgggatataaatgataaataagaaaaacttcaagaacaaacatatacaaaatcttaaaatcaaaaccactccgtacgtataaaaacaaaactagagctagatcaaacaaaattcacaatcatcaaatccaaaaaaaaaaaaaaaaatcattagcaactatgatttttaaaactttaacattcaaattttaaaatcacacaaataataattataacatatttgttgagaatcatggtattccatttcaaaaccaattggaaaaaccaattggcaatgggtggagtagcccatgttcttatatatggctcaatacttttacatttaatacatgtgggacaatgttctccaatatccccctcaagatg

SEQ ID NO: 107185 - DNA, 650 bp, Cannabis sativa
gcggtcggagcggagtgcgacgggacttgtccactcatccctgaaggattccgaaaatgagaagatggaggggccaaggcctgaccctggctatatcctggggtagcggaaaattatatgccgctcatcggtggagcagctgtttgtaaagttcccgggagctgagctccgggtacatatcccgctatcccagtagggtagtatcccccatagaccactatttgggcctcttctaggttgatgtatttttggactcttttctagaaatcttgaaggttggaggctccttcttactgtaactcgttccagaacggagtccctgtacggatccctgcttgaagaagagcaagctgttgtccgtcatcaactttcttggtctttgaggcttcttccttaaacctctttatgaagttcttcaatgtttctgtaggcagatgcttgatgttagtcaaggcgctgacctccagattaactttccttgcagcgacaaactatctccggaagctggtttgcagcttattccagcaatccacggatccttgctccagtctcttgaaccattcttccgcggacccgctcaatgttagcgggaagcataagcacttggcgtcattgctgactctcatgaccgtcattactaggttgaaccg

SEQ ID NO: 107186 - DNA, 685 bp, Cannabis sativa
  modified_base (462)..(464): a, c, t, g, unknown or other
cccaaaggagatgttccgagccgagcaccgtgtatacctgtacagatgaggtcctcccagccgagcggtggacaattcgaacatcatatcaacacttagcaacttcagcatttgcatcatgaagcacaaaaagcaatccctattaatctgggatcgtatcacagagatatggcaagctatccaaatccctcaatcagtgtactctatatatgtaatgtgtaatcttaccaattaaagacattgtaaacaaaagggaaaccttccctcaagcacatagccttataaatagttatctattctcactgggtaaaagttcaaaagaattatctaagagagtatactcagatatttcattgtaagagctctaagagaagaatcactatattctttgttctaaagtcaatacaaatcaaggggagtaggctattactgaacttctcggggccgaacctctttaaaaannntatgttctttatttatcttttcatattacatctaaattatttcacttatcgcttacaattaagactcattgtcgttggctaaaagcgaggtcaacaaatattttggtgatttattgcaacacgctcctcaagtgtagaaagaagatccacaacaactagccatcaaactaggggcacacgagccactgaaattggttatgtgactacatcggcacctcagg

SEQ ID NO: 107187 - DNA, 560 bp, Cannabis sativa
gttccaaatgcaccctgacaagtccgcggggcctgatggcatgagtgcgggattctatcaaaaatctggggatgttgtgcgacatgatgtggttcagttggttagagatttttttcagaatggaacttttccaaatcaattgcctgacactaatattgtccttatgcccaagaagaaacagcctacttcgatgactgaaatccggcccatctctttgtataatgtactttataaaatcttttctaaggtgcttgccaatagaattaagtcggttcttaatcaggttatttctgaaacttaaagtgcgttcatacctaaccgtttgattaccgataacattatggttgcttttgagataatgcattacatgaagagaaatttttttaggaagaaatggtgttatggtcctcaaacttgatatgaacaaagcatacgatagagtggaatggcgctatttgcaggctgttctcatcaaaatggggtttgataatcataccacttctctccttatgaaatgtgtcacttcagctaaataacagattgctcatgctggccgttta

SEQ ID NO: 107188 - DNA, 717 bp, Cannabis sativa
  modified_base (484)..(486): a, c, t, g, unknown or other
accttaggcgaggcacccctatctaccactgttatgcaagacttcttagttgtcgacctgccatcggcttataacatattgttggtcattcagcactgatcgaattaggggcagttagttcgatcaagcacctatccttgaatttctaaacaccagatggcgtgggagtggtgtgtggcgaccagatgctggctcgtgattgctatcgtataaagctgcagcataggaaagtcggtcatcagttgattgtgatcttgacctccgagttcaagatgagagaaacctattaaaaccaatcgaggaattggaagaggttattctcgatccaggaaaccccacaaagtgtatatacattgggaagaacctagacgagcaactcaaatagcagctaataagctttttgaaggcgaaccaggatcagttcacctggagccatggagatatgatagggatcgaccgtaatattatctgccatcatttaaannntgatccaagctacccagcgaagagacagaaaaagagacccttggattccgagaggcaaggggcactaaaataggaagtggacaagttgttaattaacgactttatacgcgaggtgttttattccttctggatagctaatcttgttcttgtcccgaagcctaacggaacagggagaacttgtattgacttctctgatctaaataaggcgtgtccaaaagattattttccact

SEQ ID NO: 107189 - DNA, 918 bp, Cannabis sativa
  modified_base (732)..(741): a, c, t, g, unknown or other
attatacttaaggtggaaggaagactattgagaatgaattgaacccattgttgtcttgataaagcaattccaaataattttgctttctggaacttcagactcatcacaatcataagtgacttaatgctcttactaggagacattttcacatgatagagttcgtttgcaaaggcatgtagaaggtgaggttcggggtgtgggttatccattttgacactacaaatataaataaatagaaataaatcatttggttcattcatacacaagttaagataataacaagttagtaaacatgtttgtaaaaatactaagataaaacatattcaattattttctaaggttttcaacaagctgatacaatgctttgttttagttgatagtaaaagacatcatccattgaatagagttgtcaactcatctaaaatagaaggtcattcttattttatgagcttctaccgttgtttcataccttgtaagtcctagtcttaacagccactattcgaatggttgttactaagaataaaactcttacaaaaatacttatctttcgagattctacggcgttaaattgctaatcaacgtccatctattatggatgaatctcactaaaactagaactttgtagaaccaacaacgaagatcgaatatctttatgattaaagctcattatgtaaaatgtatttttatctaatcacttattttaatctgtatattttaataatgaaaattacnnnnnnnnnnttgatccaaaattaattaaaattacttttcatgtaacttaattttcaaaaatacattatgaataattataaaatttcaaaaatttattaaaatataataaaataaatacttgaaaatatcttatttaagttgttctaaaataactaaatttttaacttaaataattttccaaaattt

SEQ ID NO: 107190 - DNA, 545 bp, Cannabis sativa
tttttcaagacataagatggttgtgcaaacacgaaggggaaatcaaactaatacaacaaatgcaatggtgatggatccgagcatgtgcagacaccttcaaacctaagagatccacccaggatggcccccactcaaattaattcttagccaccaacaagtccacaaattgtaggtcaaggggtgactacccctctggctgggctcactccaggcatgtaagaaactggaaatactagtactgcaactgagtagagtactgctggaacttggatcccatccaccacaaattcccaaaggccagtcggagatacactgaactacagaatttgcgagatgcattggggctagtgcaaggccataataacactcttcactataactagcaagatatccaagcagctataaatcttgcttttgatgagcaaagttgccagtttgaagagtggagggatcaagagatggaaataatgagagcccaacaagcagcaatagataaccgtgttaggttttatgccctaaataaaactctttacaatctgattagt

SEQ ID NO: 107191 - DNA, 630 bp, Cannabis sativa
tttcagataaacatctgtgactgacaatgctattcgggagtacatcttcaaattgacaacaagctatctggaaaacgttacaattacgaaagacaagctttacggaagacccatccgaattggccacagttttactggcaaagttttcggttgactaccaagctttctgtaacttctttctggagtaaaacaacttccagatgacaaaacttgtaaccataattaacaaaactatgttctatgcattattttgtccctaattcttctaattcgttaaaaataatcctgaactatttacagttttgtgaagtagtcctcctatcaaattttatcacacatgacaaacaaaaaaaaaaggatgtagttgtttagacaattatcataactgtgtataatttaaaatttataattttttttaaaaatttattaaactaaaattcaattaataattaaaaaaattacctaaaactaaattaacaaatgatagcttttttcaaattaattatatatgtggagctgtacgatacttaagtgacaatagtctaaagagccacattatcattttatttattacgtgtgacaaaacttgtcaggataactaattaatttataaagctgtgaatagtttgg

SEQ ID NO: 107192 - DNA, 612 bp, Cannabis sativa
gagagagagagagagagtagtgaaggcaagggcgacaaggagaaggcagggggtttcgatttcaaggctttgggggcttcgagtcaccataggccatagatggttggaaaaagttcatcgggctagaagaaggaggaggctataggttgaagatgaagaagcaagaaaacgaaaaagatagagagagagagtaaaaggaaaaaaaacgtttttttttttatttcttaaaatttaaaattaatttttaaatttttaaatgattatttaaaataaaaaaaataaaaataaatccacttggaccaatcacaacatgccatgtaggtactgatctgacacttaacgtccaggtaccaacggaagttccaagaccctaacaaaaggtatttttaccgccaaaaaaataagttaagtatttatctgcaactaagagataaacttaggtatttacgccgcaaattactctatataatatcaaagttaaatttgtacagcatatcaacgtatatgaaccaaataaatataccaaacttcaataaaataatacgtggcattaacagaagaagccacgataaaacacaatgaagctaaatataaatcaaattacaatcttat

SEQ ID NO: 107193 - DNA, 565 bp, Cannabis sativa
caatcatgaagaatttggcgcagaattgagagaccatatcgtcccaactccttacacttcttgaaggcaagcttgcataccaagagtaagcgcgatcagtgacagattttgaagactctctgatccttagttcaaaatcatgggcgtagactcccaaatcatcaatgaattggatgatatgttctttagcattgtcgaatttcccattgtactttctaaatacgggactcatataacctcgtgggtaaggcttcattgcaacttccaaggggtaaggtggatgaaaatcgatagaagttaccgatgatgatgacttccctctttcagctttaagaagaccgatcaattcatcttttgtgacaaattcagaggaagatcgggcttcttcaccgaccctttgagcaatcttagaagttctgatccctcgaacattatcaagtgttgcctgatttctttgttcaacagtatgtacttgccttatttgagattcattcatcacacgctcttcaggtaaatcgcttctatcaatagatgcttcttggtgtgactgtggcagaagtgagct

SEQ ID NO: 107194 - DNA, 578 bp, Cannabis sativa
  modified_base (540)..(542): a, c, t, g, unknown or other
gtaaaataatttccaacaatgtacatatcggccgtggggtcttggcttctgggaagcaggatcgccggcaaaagtttgccggtgagttacacatacttttgccggcgagcttaagcgccggcaaaagtagcttttcttgtagtgtggaggtagtaactcttggttattgtcattcctctgaccctgatcggtcgttacataattctgcaagtttgggttgtttttccttattaggaattcaatttcccgcttcaggttgttacattcattagtgtcatggccatagtctccgtggaatcgacaaaactttgtcatgtccctcttgctgacatcttttttcatgggcccgggcttcttatatggggccagcgactgagttgccatataaatactttttacgtctttagtcaagatagagaatgcagtgtactttgcttgattctctcggggagcttgttctgatttgccggcaaattttccattcttcccattcctttgcttgtggttgttgttggaacgtttaccacttgagcttgaatnnnttgggtaatggggaagttgggcggatgttccagtag

SEQ ID NO: 107195 - DNA, 601 bp, Cannabis sativa
  modified_base (85)..(110): a, c, t, g, unknown or other
  modified_base (196)..(201): a, c, t, g, unknown or other
  modified_base (433)..(433): a, c, t, g, unknown or other
  modified_base (569)..(576): a, c, t, g, unknown or other
tcaaagatcatttaattgaacttcaaattgaatcccaattgactggccctagaactccacagcaaaaatggagttgcagaaagannnnnnnnnnnnnnnnnnnnnnnnnntaggtccatgcttagctactcaactctaccaacgtccttctatggatatgttattcagatggaaactgacattttaaatgttgttnnnnnnaaatcagtccctaagacacctttacaattatgtaattgtcgtatacctagtttacgcaattacagaatgatggggtgccctgctcatgtcttaagaaagaaagatggcaaactagaaaagcgaactgaggtttgcatgtttgttggaaattctaaggagactaggggtggattattttatagtcacaaggatgataaagtgttcgtttccacaaatgccactttccttgaanatgactatattaagaatttcaagtcgcaaagcaaagtagtagtggaggaaatgctttcagatttaacccctcctaatgttccatcctcttctactcaagtagaggataatcccgttgggctttgtgccctaaatannnnnnnntttcaatgtaatctttatcatttaa

SEQ ID NO: 107196 - DNA, 696 bp, Cannabis sativa
  modified_base (134)..(134): a, c, t, g, unknown or other
tgacgactacttagagatctatctagatttactccatccacaaatcgaccgtgacgaatatgtcttggttcagatttgaattcaaaatttatgtagtttactattttccaagcttgggaatctataggatgtcngagctttccatctttcactctcttggtctcgtgccaaatcaaatttatagaatgttctacactacaatatgatcgtttaagtcatgaaatcaaaggaatgtaccacatcactttttgggggataagtttcctattcttcttactcttatttattttatggcgtaataaactacaagttaggaaattgtccatgtttgcatattccttacaatataaaatacagtcgtttgtacatgcatggaccttttcatacttcaatcctatagaatttaaagttttcttcactttatatgtagatcacaggacgtaattgtcaaatagaaagatattttttaaagtagctaaaaattgagtaaaatatatatcgctcactcaattttctgctttgatgttgtaaagttttaccattgctggtaattttagtttcttacaacaatcgaacaagggtttatctgcacttagaaaattatcaaatttttcacgatcattaaaaaattcctcatgtgcttttgtcaagtaactccattggatgatcattgaaatcattaccctcaatatcatc

SEQ ID NO: 107197 - DNA, 997 bp, Cannabis sativa
tccaccttaacttgccctcaccaggtggaacatatcgtggtggtggcaggtatcaagcctgcgacctccgggacctaccaccggccgtccgaggacgcggagacgcccaaccactactacgggggcttcagagcctggagccaaacgcacttgatggtcggggccatgcttccccttcaagattactttattaatcttcttgtatttgtcggccttctgccataccaactcattcctcaagcttaccgcctgcttttaggcttgtttattttttactctgcccagagttggggctctcccaatctggcaatgattttgtatttttccgaactagtttccatccccataaagggggataagtttaaggacagtttttacggtctctgggcccatcctttgaatgagggccctgtcccttttaattatcagaagcatgtgaaggaataccgtcaccgcttcttcttctcctccagggtccaggctgtggagcatccggagcttctcatggagtgggttagaattccttcttatgcgcggattgaacctactcagcttttcccccaacgggccaagatcttcgccacatatgacaagaaggcccttgacgtcggggagttggtcacgacagagcactgtcggaaggccaagctaatattggggcatcagtcggtggacgactccaacctttctaaagtcgtctgtcgtaatgtgagggctccggccgcagagaaggtattccgggatgacatcatggccacggcagaggataagtaccagaagtaccacttcaagagggaacaggagcgggcttataataaggcccaggtgaccgccggaagggcccttcgcattagggccccagtggagcagaggacccccagaccaaagcccttggtctcggtaccgaatacgggggctcctgatgccagcacttcgggttctggtaagtctcctttaatgatacattatgtccctttcgtccgcgagtatgctagcc

SEQ ID NO: 107198 - DNA, 590 bp, Cannabis sativa
catctcagaggcaaagggggcgagagtaggaccgacgaagcagttgaactaatccgtcaagggatccatgttcaggtcccagggatttctgaaggcatcctcgcgcaaggtgttctgttgctcctcccgcaagatcttctttagggcttccacctcagtatgtccccgactgaactcgtccagggcgtagttgtgtttggcaattcgcagtagttgcctctcttcgtctgcgggaaccggggtgagaacaatgccatccggcacggtgtactcctccgcttccgaaggaatccctgagttggtgctaacagccggagtgtccctcctcctggacctcttggaagactcggcctcgaccatcttccccttccgcttacggtcaagggaagtcgcaatcttgcactcctcctcctcgacttctccttcctcgtctattaagatgattgtgcctaagggggcactagaagacgacctcccgggggtcaccagttgggatggagccagaggtagagatgagtctgggctgtagccctcggcgaaagtcaccaggagatcttccattggcttggctgctacaacaaagaaataaa

SEQ ID NO: 107199 - DNA, 546 bp, Cannabis sativa
aatatatttaattttaaaaaaaatgattttacttttaattttataaatatatttttaaagtttatacataaaataattaattcttcattaaaaatatataaatataaataacaacatataaaacttcatgttaatataattcacatatatctccacatgtatattatttgaggaaattatattgtatactcattttactttatttattttaatttttacctttattttcattttctttaagatatacacacttttataaataatatccccattaaaccccttacgttaatataaattatatgctagacttgagtagagagtgatggtatattcgataactcactcaaaaaattaggtatatttcaataaaatataatataagggtatttttgattaatgaatacacaaaaaaaaataagtattttttaaacttatcactatgtatttacatgtaacttacgcttagcattaatataaaattagttaaaattagtacacaaataaataaataaaatatcattatttaagagtaaagattttatgttt

SEQ ID NO: 107200 - DNA, 842 bp, Cannabis sativa
tgaaaagattttttattcattattcgggctcaagattttcatgttcttgcttttggcctatagacactttattttcaaacaccactattatttagccttaaagccttttatcatggacatatgatcgtcctagctatcttcttatggccttgacatgtaagtatatcaaaatttacttttctttatgtcaagccaaagtatgtctgcacttgacttaggggcaagtttagtagcttattctaagcgttgaattttctttgcataagttgtacgtgtttatttcatcatattaggaaattcatatttacattgttagattatagaattaataatcaaacatatgtgttagtaaatttagatcctagtaaaataatttccaacactcatctgcatttggttgtgttatatactcccatgcttctggtcgtagtacatactcccgatgcatctagtcataggtcatactcccatgtttttgttcatagtatataatctcatgcatctagttgtagtatatactcccatgcatcttgacgtaatacatactctcatgcttttggtcatagcacatactcctatgcctctggtcatagtacatactcttaatccattgtagtacctactccacaatgcatcaatcatgagaaacacataagattaaagcttcattgctcaacgatttttgcccgagcataaacgtgagaatctgtaagtttttgtcacaaatggcttagaataagtaacacccaaatcgtgttataaaaagagttgtttggagaggtaacaaaaagaatgagaagacaatgtatagtacgtcaactttgttcaaacctcaaaaaact

SEQ ID NO: 107201 - DNA, 623 bp, Cannabis sativa
  modified_base (133)..(137): a, c, t, g, unknown or other
aggctaaaaatgacacgtcgtttttcggatgtttcctaaggttgaaaaacgacacgtcgtttttcttcgtccctttcgcccagaaaatggccgtgggtctgaaactcgggtcacgcgacccagttcgtgaccnnnnngtgacccgaccatatctcccacattcggccaccaaattcgacgctgtttgaggcgttttgtcccatttttaatattctatcattttctaatacccatttgctcaaaaaacatagaataatacatcaaaaaggatgaatccaaaatgggtttctccattgttaaagctcatatatatctcaatagaaaatgtaaaagattgtttccaagacatatataaacacatttaaagggataatactcatattcacataacctttaacacatcaatccgaaaaaattactacaaattttagatttgaaaaaattttgagtcctaaaatcaataactttggctcttgataccaattgttaaaataactattacacataatcattgaagccaagctcagtatttatttagagcatcaaagacaataaaatacatacctcccatactatccatgagagtgcttatccttcaatgtcttcaaagacatcaccaccaa

SEQ ID NO: 107202 - DNA, 796 bp, Cannabis sativa
atagtcatggccggaaaaagctaccggaaaacagagcaagactagaaacagagtagctacaacagcttttttctccatattaaagaactgaactttttcagttataaatgaagaaaaattacaatgctggtttggtttatcagttatgtatataatttttctgataaacccaccaaaaaagagagagactttgaaaaagtgagagagagagacaaagagtgagtattgaagagaacagctcaaggctctatatattgaggagaagagagtaaagaaaataaaaaaatgggctgtgaaatattattaaaaataaaaataaatttaaaaaatatatataaatgtatttaattgttttctattttggagggcttgaaacggttgagaaaagaacagggtcatgtgggtgttctctggctctatacaggaagggtcggtttggaattaatgaaatttaaccttcaacaataattaaattactaattttgtaaatatttaagttataatttcttacatactaaatagaaagaaaagttcaatttactatatacatacctaatttaatttatatttttaaataatacttaaatttaatttttaacgatactaatatttaagtgataattttaaaaattttataactatttagctattaaatataaataaattattgataatttttaattaatttaaattgttaaattgtattttttaaaaaaaaataaataaatatttatactataaattgattattttttcactaaatctaacgagtgtcaaaatagtttcagaccaaatt

SEQ ID NO: 107203 - DNA, 666 bp, Cannabis sativa
gaaaatcagagaatggaatcaagcagccatggggaagtacatatgggcaatagcacaaaaacaggatagcctttggttgaaatggatcagcagtgtctatctaaaggatcaagaatggtggagttacaaggcccctgcccagggaagctggtattggaggagtcttgtgaacttaaaggatcatttcaaggaattggccgggctatagacatgtacacaacagcagcattacaaggttaaaactggatacttactactctgtccagtccaaaccaaagtattttggtcacagcaggtctgggggcgcttaaataccccaaaacattgtttcatttcttggttagcaatacaggggagacttagaaccaaggatagattaaggagaatgggaatgaacattgatgaacattgtgaactatgttcaacacagaatgagaatgcagaccatttatttttttgcttgtagtacatctgctacttgcttacagggaataaaaaattggctgtcatggcatgttgcagccgataacatgcttactctaaccaggtggattgggagatcaaatattagcaagttcaagaagaatatctttgttgctgctcttgtgtgtttgatatacaatctgtggaaagcccgaaacatcagcttgtgggaaaagactaaac

SEQ ID NO: 107204 - DNA, 1018 bp, Cannabis sativa
  modified_base (500)..(500): a, c, t, g, unknown or other
  modified_base (550)..(553): a, c, t, g, unknown or other
  modified_base (580)..(583): a, c, t, g, unknown or other
  modified_base (610)..(613): a, c, t, g, unknown or other
  modified_base (639)..(642): a, c, t, g, unknown or other
  modified_base (668)..(671): a, c, t, g, unknown or other
agatatacactcgtgaatatatgttaagcacctccttagaagagatgtactgatacatcattgatttgtttcggtatctagaaaatttttttagtctaattttttttttatattcatgtacgttataactatataaaataacttacaaaattttgaaaaatttagaataatttataatatagaaaacaatgttcaaacagtctattttgcacgtgtatcaaataaaatagtcacgcatgcaacacactgtttgaacgtatttttcggcgtgttaaatttttctaaatttcttaaaattttgcaagatgtcttaattaactataacgtacatgatcatgagaaaaaatttgactaaaaaattatttcgggtgctaaaacagataaagacgcatcaatgtatcctttaagggggtgcattgtagaattttccattaggtttttcttttttgatttatcattataagaatatataattaaaggaaattctataatgcaccccnttaaaagggatacaccgatacatctctatctgttttagtacccgaaatannnntatctgttttagtacccgaaataattnnnntgttttagtacccgaaataattttttnnnnttttagtacccgaaataattttttannnnttagtacccgaaataattttttagtnnnnttttttctcatggtcatgtaaattgtagttatttaagacattctgcaaaattttaagaaatttgaaaaattttaacacaccaaaaattgcattcaagcagtgcattgcacgcgtgactattttattttatacccgtgtaaaataaactgtttgaacattattttctatatcgtaaattattccgaatttctcaaaattttgtaggatatcttaaatagttatgtatatgtgaatatataaaaaaaaaataactaattttttctggatgctgaaacaagtagagggtaaataaatagatgacgggactactaattgtcacctcagtgccacatatcactacaataaca

SEQ ID NO: 107205 - DNA, 663 bp, Cannabis sativa
agattgtaagattttaattttggatttaccttaatattttattaaaaaattggtatccgtttatgcggttttaacacatatagagcgtactcacataaaaaacgaatgtattttaattagttacaacatatataataaaagataatatttatagaaataatgttagtttggtttttaatggttaagttagattgtatacaagataaaagtcaaggttatcctactaagaatatattttttttttctttttaagtttacaaaaaaaaaaattacactaatcttaggtccgccactagttagtgatctatatagttaataggtttagcatctatgtgaagtttatagttgaaacatagtatggacttaagcttgacacaaaaactcaatccaactaggttatttgttgttaggttccctttctaattttgtaaatacatattattctatggcaattgtatgttgtgatgagataatctacttctattttagagatctcaaagaagacttagttaatattgcactaccaattgtctctattatttctcaattatctcaatagattaattatgtttctagattattgaattaatatagtattctagattatatgcaacatattatatagtattctagtgtttaatctaacacatattttaaaaaata

SEQ ID NO: 107206 - DNA, 518 bp, Cannabis sativa
gaattcaagaccaccacgccttattattctaatctcagagaattacaccggtcgtgtcacttggcgtggtggaagttattattatccaaagattaagacataatttgacgagttccaattatgggatattgtgaaggaatccccattcaaacaattctttaagaggaatttgataaatttttctgggacattgatccatcagttattcatgcacaagatcaaatctgagaagtcagacgaggtacactttttttttggaaagaagagatgcacattcagttgggtcgagtttgcattggtgacgggattgaacttgttacccgggcctatggaacaagaaaatgaagagaaaggaaattcagaacggttgattgttaagtacttcaacggtgattcatccatcagctttggccaactgcacaaagttttcgagagttgaacaaaaactgatgatgtgtacaagttggggatggccttgtttgttatgggcgtcctcactagtaaggaggagaagactg

SEQ ID NO: 107207 - DNA, 572 bp, Cannabis sativa
cattaaattgttaatgaatgaacacctattagggatgaatctcattcaaacaagaactatgtagaaccaacaatggagatcaaatatctttatactaaagctcattatttcaagggagttgtattttcatttgatatatattttaatctttttttttaaatattgatatatatttatttaattaaaattattaatttagataactctaaatataaattttaatttaatatttataaaataatatacatacctagatggatctgaaaataaaaatttattttccatctttagtattaatttccaataaattaaattacttaatttaagttagttcaaaattaatttacaactcaaatttaataaatatatataactaaattcgaaattcaatgtgttcaaaaattaaaatttcaaaatttacttaaaataaaataaaataaatctcgaaaaattattctaatttatattgatctagaattagtttttaacacaaatataattttctatttaattaaatctcttaagaaaaaatatccaatatttaagtgtcttgaataaaatcaacttaaata

SEQ ID NO: 107208 - DNA, 968 bp, Cannabis sativa
  modified_base (149)..(153): a, c, t, g, unknown or other
cttgaacctatcttaaaactgactattttgaaccacgacttttttcgatttaaaccgcccaaaccgaactttttttaaaaaaagattatttgatacaatttattctatgaacacattattctacattttacaactacaaatatataaannnnntgttcaaaaactaattatcttattcttttaactttaatgttaataaaataataatatattattagtaactacaatatataaagcaaaaaaaacttaataaattaatatctatgtatatcagtcggtttaaattttttcggtcagtttgttccccaaaaaaattaaccgttcaatggcgattttaacggttagcagtttttttagttttcagttccgtcaatttcagttctaacagtgttcggtaggttagttttgaacggcttttttggttttttgaattttatgctcagccttatccggaggtaatcaatgtggttggtcacccatagtgcttagatctgagcgaaccactttagtgtcctttcgggatagccgttataatttctacacctggaatcccctcctcattgatcgcattgcacatgggtttgatagttggtaccctgaattctacgtccaaattagttgtattgactcgtattatgggatagctgagcgatatgggaccatgctggatagggcaggtcatatagatgcgagctgggatttagaaccaattaattcctatgatatattcaggatcataagatgtagatattttagtggatattatagtccttcctcttcgtcttcttacgattatggtaaatcccataggtgggagataaccttccaatttccccttttacttgtttttaaaaaagtgttagcacattgttttgtctcgtagaaatgaatctcggtgacctccttcaatattcaggtaaaaagggaaagaaaaggttgactgtcttggagacttcatcagatgtcaa

SEQ ID NO: 107209 - DNA, 580 bp, Cannabis sativa
atcacaaagccacccacccaattccgctattaagtgatggacattgcccttagcatttatgttggcaagtggaatttggctgtatgttttagtggttagatcaaatgcgacaataatagaagattcagtggtgtcaagttcagtttctaccaactaatggatagaactgcctacaagaatgtctttcccacaatggccacccaagtaagaaaaatcaccaaccctcatgagaatgttggtgtttaggctatacacataaacctcataacgcaatgataaatcctcatggttatgtatgatcatgcttacaaattagtttcaactattcttaatttgctctttttctattctgtgctacgtgtagattgtcactcgagtttccctaactcagatgcaaaaacatcaatagtgaattttcttaactcagcattgatggagaaagggaaggagagaatgagtatattattactagttgtgactcgattgttttttaaaaatctccgacgacaacgaccgagagagaattcgatgtacgaagtagtttcagtgatcatacgatacagaacacaacgatgtcatt

SEQ ID NO: 107210 - DNA, 547 bp, Cannabis sativa
cataatggtccttaataaaaataagagctaaagggcaccactggtgcctagcaccctcttacatgtcaatatcgctattggtgtaagtatcgggtcccatatagtttaatataataatttttataaagtatcgctagccaattgcaagtcgacacatttagaaggtgctatacaccactgatgccgaatagcaatgctcaataaataacttttagagatatgactaattaattatgggatgctaatcatcttttaacatttctcttatattaagaataatgatgacggagaatgaataggtaggggatgcgtaagggatttaaaaatattagttggaaagtttaatgagtacttactcttattatagattggggtttgccctagatagcaaaaagattattgggttgtgtgccttaattaattaagggattggatacatcctatgtgctcttaatttgataaaaactttggttaagaaactaacaaatgtactacatgtacaaataataataataaaaaaaaaacaggcgtacttatgtacctccta

SEQ ID NO: 107211 - DNA, 863 bp, Cannabis sativa
catacggttgctagcaacaggttgttctgctgtcactgttggagctacaacgacctgagcttgttatggaggcacggcaggaggaccctactgccttaatctcaaaatttcttcttcttgttggcagatttgatcttgcatctccataaacctctgctcttaatcaagaggagtttctggtggatttacaagatgatcaccttgaattctgccacggcctcaaccgcgaccacggggattccagggaatttgatttccctgatcgcctccggtctcaaccatattacccagccttcttgtatttcattgggcgtctatttaataggacttatcctgcgaacccataagctaggcaggttagatagcgatcatattactcaataccgctcctatagattttaaggcaacacatttaaaataaataaccataatttaatatgcttcctaacatgctttaataatcacatataatactaaacaagtacgagcttactgaaccgtgagccgagctttctctgatgaagattgtacatgtttgggcaagcttcagtagacaaacttggcagctctgataccaaaattgtaacaccttaatactaaggcacgctacactgattttttaattacagtactatctttgctaatcaaagaacttactcgaaaatcgtgtgaaattaaaacttttacattaaatattaaactttataactttataaaattatttacaagtaccgggatcccgtttttaaacgtttatacaaaatacacaaaatacataactaggttgtacaaaaactacaaaataataactcgagttgtctcgagaccgaacactccaggtcgcgctgccatgacatgtacaa

SEQ ID NO: 107212 - DNA, 1293 bp, Cannabis sativa
gatcaaacccagaaggtgattgaagatggagaagaggttactcagacaattaagaattaggattttcagtttggggctatggagacttgcccagaaaagtctccaaactcctcatgaagatcctagcttggaactgtcccgggctcgggaatgccgcgacagttcgacaattgacagaggtgctccgtcgatccaatctcgatatggtacttttatctgaaacaaggttagtgaaagagaagtttgagaagttaatgcaaaagcttcattttattcatttcaattatatccctcctactggtttatcggggggctttggcatcagttggaaaacaggggtgttgtgcaaaattcacgaagcagacaaaaatgtgatctatggatcaattgaatctgaccccccaggggtgttgtgaaattttttgggcatttatggccctcctactcttacgggcaaggaaatgttctggactcgaataggagatgtaatctctaattgtaattcccctattgttatttttggtgatctgaatggaacactggcggaccatgaatgtattaattatgtcaacaggaaaaattccaccaaatactcattcgatcttagaagaatggttaatagaacgggtctcattgaccttggatgctagaaagaatgattcacttggttccaaaaggcgtcaagacttcatggaagttccacaatgaaacgtgcccgtctcgatagggctcttgcctcgactgattggagagtcttgttccccaatgcaattgtggagctactatcagtttgtacatcggatcataaaccaatcattcttaatacgattgggggagcgagatgcctaagaccccagtttaagtatgagttgatgtggggaagacacccgagatttttttgggtagtccgtaatgcttggagggaggagctccacgccaacccaatgaccaatctctaccgaaatctaaagaagacgaaggatcatttgctgaagtggaataaggctcagcttcggaaggtaagacagcaagttgaagaagcaaagtcggctttgggtaagattgaggcaaatgatctcatacaagaggaagttctgggggaggctcctattagagaggagatcttctgaaaacaaaaatctcgcgtggcttggctcaaacacgcggatagttgtacaaaatttttcatggcttcaacagcgatacggcgttgaaaaaattacatccaaacagtgaaaactgagagtggggactgtgttacggatatgaagacaattgtggagttatttatct

SEQ ID NO: 107213 - DNA, 531 bp, Cannabis sativa
  modified_base (182)..(187): a, c, t, g, unknown or other
ctcttcatattagcacggtggcctatcttattcggtcgtcaatggctgcttgttgagccctcaacgtttccacctctttatccgtccattcaacgaacagaagccattgatcctaaaatgctaggttcactggaacacagagctccttctggtcatgatgcaaggtattagtatgaccttgnnnnnntccaagagcagcacagaggttttggatgtcggtgtcatctcccacggttgtttttgttgctggcagaactccagtattgggaataccctaattggctgctgaacttgtatttccagtctcttgcacagcaggtgcgatttcactcaaaggagtcgtcacaccctgacctacggttggtggttgtttaggatttgtggctggtggaacccctgcatctcttggattctatagagtaggatccactgccggtggattttatgccctaaattaacccatttcaatataatttgatttgttatcaatagaagattagaagtcatttatgtttatatgtagttttcatg

SEQ ID NO: 107214 - DNA, 550 bp, Cannabis sativa
atgaaaaataattatattttaaaaataataaaataaattattataatttttaattgtttaatataagtaataatattatatatttaattaaaattaatagtataaaataaaaaaatttaaaaaagatgtatttttttattaatgattatagattttaattattttatatacgtaataatattatatatcttcaatagaaattaataatttaaaataaaaataaaaatctaaaaaataaattttttatttattaaaatactttaaagattttatttaaattttaaatatttgacaaagattaaaaaaaaacaaaaatatgtgtagggaaataatatcaatcacccacatattttgatcactgattagagaagattatgcttatcaatcacccacatataaaataaataatattatttttaaataaacaatagtaaaatatatattatataagtttaacattcacaatactctcttatcagtaaaagtatatgtgaaaaatatatagttaaagagtcttattattcttaattctattttttcttttcttttt

SEQ ID NO: 107215 - DNA, 2265 bp, Cannabis sativa
aagaaacggcccccactgtcaaaaataaaacatcactacaacattataaaagttcaagttgttcgtaaagttttgttatatgacatagtagaaataatattggttcttcagcggccagtaagtggtacatttaaaacagagataatatatctccttggtcaccttactttcctataagaaactagtttatttttcaaaaggaaacctaaactttgtattaataatgaaattagtacaaacaattataggcgagagcctaataataataataaaacatcaaaacaaatactgatttacaaaaatactgtcattctccacataaagcggagaaaaggcaaatttaaattctataactccttcacaatataatagccaaatggccacccaatgcctaactttttcccatagacactctgctccttcagataatcttttatttctttcataccatatagcctacaaactaactaccacccttgttctccatagcactttgttgctttattccctggagcacaatggatgagaagaccaatccactgaaaaccaaattcatttaagaatttataccatactctcattgtgaaagaacaatgcataaagagatgactaacatctttcccatttttcttgcacatcatgcaccagcctggtgaaagcgagtcgttaggtttcctccattgcaacatctcatgcacaaccaagcaaaaaagtgaaccttagaaggcaagggacttttccaaaccttttgcgttcaaggatacaaactataagagacatatccttaaaacatactgaatgctgatttccaaacacacttttgatgagtcaccaagctagatacttcatcctccaccgcgtgacccaatatctggttctgcagcctataaataactgaatacactcagttacctctctatcattaaaatttctgatcaaatgaagattccaataaccttaccagccctctgtagagatgcaaaaaatgtaactattcttcttctctgacaaactaaccgaatttagaaaaacatctttgagagctatcaccacaccaagcaccttcccaaactaatatatgctttccattacctactttaaagttaaccagctgccaaaactcctacaaataggtgcttcctttccaaggacatttagttgacaatctatctcccaagttgacaatttatgcttgcttttttaaaaccttaagacacaaagctttccttactagacttcatccagctttaaaaatacgggcttgaggtatggggaaggagagtgattgcattgcagcttgctatttataggtcagagataaggagcttaaatttctatcaaaactttgggaaaagtgaatacaatttcaaaatattattcagcaagttatacagtttaataaaaatgatttaattatgtaatttaatgtatgactaaatttcagcaaactaaacaactttcctgagttcactctacaaaatacacacctgtaatggcaccagagtgataataaccagctgagatccgaacaatttcctttggaagtccagaaacctctaatggctcctgcaacagaacattaccaagatacgagaccattataattttcataagaaacataactggtttgaaaaatgacaaacacaattttttgtacacaacatgtcaacaccaaataactaaattacaataagaagctacaaattacaaacccataaatttcaaccacggattgattattacaaaatatttatggatgctttggaatatttatatttaactaaagacgtgtatgtctttttccttttcttttttacaatgtactgagtaaactatatactttgttggatgttctagaaattcatgaaatttctcaaacaatttaaatttctggcataaggtaaaatatctagagtaattgtctaagaattcgacgatatactcatatccatccctggattgcacatccatatgctgtatgcattaattaaacatgattttagggattttagaaattagcatttccttctgttttgtttcctaccagtccattaatttgtacattctttcttaatctaatagattgaaaagattattcagcattatccaaaaaaaaaaaaagattattcagcatatattttatttactgcttgtagatagagattttttgttgtcgctgaatggttcttcccttcagccttcatatttgttagatattagtttgtatattagctgtaaaagaattagatatttagtagatattta

SEQ ID NO: 107216 - DNA, 9809 bp, Cannabis sativa
agtaaattgatagttgagggggttttgccgcaaattactctaataaatatgaataaagattaaacgctccataaatgcaaaagcttttttcctagccgatgaatagttatatttacaatgtgagagaggcctaacgatacaaaaaccgataggcgactctcagctagtagcaatatgtatcagttgtgctaaaagaaagtacaagccgctacaaaaccgtttaggcttagctattaacaaagaaacaactatgtaccttcttccctaaatacctacaagaaatattactctgcttatgctactgccatcctttgaatattaaggaccaaaatgaaactcagttgtttcctaacaagtcaacaccaccacctagaaggatctacctctgttattacataaccactgtgaaaaacctaaaacaaaatcaattagccttgttcattcaattataaccacataaccatggccaaaaaagaaaagttgaacgcaccagaagcacagtgaacagccagtcagattttgctccaaatactatcatcaaactgtgcatagattgctttgaggagtcatcaattaaccaagaccttccggttggtaattcctatcagcatagtattagttatatatgtttcggcagaaaagcttacatctcaatgccggagaccatccaccactaccccaagagaactggaaataacctcattggatttgcaattactgtcaacagaggctgcacaagaagggtcacaattagagtccactggcaaaggtattctatccttaatatcgtcttgtgcttcttggcttaaaattgggtgaactgcatcagcagagaccttgttagtattttgggaaacagagcaggcattagatgtcatatgtttgtcatctactgttacagatgtttgctgagcagctgcacagtcatttacatgacatttaagtattttttcttcaggatgatgacagctatctatatcatcactggatatctttactccagtcctagagtccgagtcgtggcaaccattttcaacagaaacttccaactcagacaaaacaatcttttcatcaagttcagaagcactgattccagcagagcagtgcgtagaaaccttatcataagaatcaagattgtttgcaacagtgtgatcctcaacttttgcctcacaatgaacacattcggtatcatccctggaggcacagagagaagatcccccagttttagttgcatcaacttcagtgcaaagtaaaacagacgattcaattttctctcccgaaatattccactggctaaattgccttcccaactcctttactttttgatcaagaactgaagtctctgggccacaaaaatccttttgacagtcactggtctctttggtctgttcaggcaaaccatgtgaatcttcaaagcttatgattttaccttccatattatcatgagccacagaaagcttgatcaaacatttgttctcagtattatttaaacagacatcaagacgctgcaaaccggatacactagcagtttcatttatattcacaccaggatttgcttcactagaaatgttagaaacacaccctttgatgcctgtttcatcagttttacacaacacttcctccttggtatggtgcccaggttcactggaccttggacctgcagtaagtatcattatgatataaaacatgtcttgaaggctgacaaacgtgaaatacaaaaataaaataactaccttcagcaataattgaacttttttctgcattgtcaatgttcaacagtggtttctgtaacatctgtacgcctgggaaaaccaacaggttcatatttttcattttcttcttgtgtgatatctcaaggggcctaaaaccaaatacggaagtccatgtttctgtaagttgggagatagcaggcagaaccaacttctcaacatttagagagcaaaggacctgataaagaagaacaaaaataaatcagtagaaaataacgtgacaatggttaataaaattagtgaaaatcacaaaccgatacgtggaagaaacactaagacatcactccaggcatttacaatttcaaatagcatattatcaaacaaaaagaaaaattacagtccaacattataaaattcagcattattttcttttctaaaaagaattgagaccgtaatcaatcagtaaactgaaactgaatgtagcagtacagtgaattcgcaaaatctacattatagaaacttaaaggagaactatcaaaattttcatatgtattttgacataaagcaaagatgtttactgttagaacataccgattcaattgcacataaaagccgtcggcacattccttggcgtctatacatatagcgggtcccaatgaatggcatttctgctaattcagttccgtggatcctgttacatagagggagaagagggatgattcaattcagctatttgtccaaacaattctatctcatcatgcaaaagctaacccagacattaaccaacaactaactgttgaagaataacaatctcattagcataatgccatcacataccgaactgaagctacgcagacaatctcatcacctctctctagaattacagttaaaaaaccactataattcaggcggttaaagttagacctgtacaggagacaaaattaattagtattattaagcacacacacacacacacatttctgaagaaatgttgagataaactaaaagcaaaaagtatgcctacccaaaattataaacaatgttatgaatcagattgatcccacttctgttgtcaaccataggcaaaaagcattcgtccattatagacaatgcaacagctatcttgccattgcattcaattttttgtgcttcattgcattcttgaaatctatcacatacagaagtacttgagccaacactagaccgacgaacaagagtccaagaaaatccttcttccatcttgtgtttcaccccaataagggtcttcagtttctcaaatagctggcagaacaaaaacaggaataaatctgtgcgatcaggtataaatgcaaattagatcgacaaagtgttcaattgggaatacagagttcaaaagagagaaacgtaacacttcctcttaatgacaatcaaatcaaagtcttaactcttaactaaggcatatttcacaatatgaagaaattcaccattacgcagtatgcacgtaaaacaatttttccaacaaaaactaagggaatatagatcactgagaggcagctatgtttgcaatgattaataaatttatattcctatttcctgcttacatatttatatatttatatatataaatatgtatgtataaataaacttaatcttgaaaagcaatcaaactcatgtatacaaaattcacttgtgcgctcaccataatttaacatattaaattaaaggggccaacaataggaaacaatgcccctaatcactatcttgcaaattcaagctgcataatattctaccaatgcaaatcatacctgttgacacttgctcccacagaatggtgaagcgctggaaaaattataccccgcatcactttccctactacaagaatgatgaactacaacaagaaaagaaaaaactgtaaaacataaatttattctaaacaatattgataaaaatattatcaaatatgcacgaaagctagagctttacatttttcctcacacaaatggcatgtaaaaaactctgaagcacccaaatcatcatcatcattctcttgaaattctcttccaccagccatcccacaaaatttgcatgagcaatatacacaatgccaatcaccagaagggaaattctgcagtaaaagaaaaaacagtgttctcgtttaatacaatgtcaataatcaaaacgaaccaactgcaaaaaaacaaaaatgaaaaaggtcaacaattaaacatgttctgtttctggaatattcaataaacgtcttgttatcataatataattaaacagtaaaattctactttccaaacatttgttgccgaacacaatgtagtatgtacatatctttactgtgcaggcaacaaagcaacaaacccataagcaaaaacatgcaattacagcattgagctttttatatacatataaaattgtagcattggttttggtcttagcatggtaacaaaacatcaaattgttgtcaaccctccccactacctgtaatccatttttgtctttcagttcaataagtaaactcatgcagtttgaaaaataaaaaatatgacacaccaattagggtcacacacatcacatgagttactttagtttcacactgtatgctcaaaagtaaacccttgacattattataagtagccaaggaaattagtgacatggcaacttcactgttgcatgcaatggaagcgatatttaaagatgatatacacatttcaaaaagtgcataagaggtcagatgtacatacttgaatatctaaacaactttggtggaatgttgatgggcaaccatcgcaacagatcaaatctccaccatctccgcagataccacaagtgtcatcatttgggtcttcaccattgacgtctacgtcaagaaatcccttacactcagattgaagttgcttattccaagagtctaacaggcattccaagagggaaggtccagactctagaaatatgttgttatatggttcgcagagattacttcctgcatgactttcaaattctgaaattgtcaaggttttacgacagcagtcacagagaatgccatttcttgtaatttgaccctcaagcagcacatgtgtctttcttcggttcaaacagtgcaccttcccgtttaatgaaacagttcccatgtcaatcatccaggcaagcacagttctactcccagaatacaagatatagccatcagaatctgaatctgcatcctccaaggagctgcgaaccaacaaagtacgctgttttccattttgagttttcttctgcttatgacctcgaaccaaaattggtattcgcttgtgttgagtaccagctgaattttctcggttacaatgcaaagatttctttctggacctccctctctgtaattttgcaaccaattttcttgtacgctctgtcttgccagattcctttcctgcttttcgtttcaatttattttctcctcttttattgatagctacccttttaagcataccaaattcctcatcgggtataggaataaatttgaaaccagctttataaacctcatcttcaccatcaccattttcgtagtgttttctaagcctcttataagctagggtgactgaccagtgagtcttcccatctggactaacatacacagcgtcaaggtaatccttggaagccctaggcctacgttgaattgtccagcctgcactcagaagcaattctataattttctctctcacagactgttttaccacacttctaggaggttcctcttctccatccttctttttagttttccctttcacaacactacgcttcgcatattcgaggctctgttcatgaactgccttggatctcttccgtgttgtggcttcagcttccttgatcatcgaatccaccacaattttgttcttgttaggtgatgataatatatccacgttcaattcatttccattctgctctgtttcctggcataacaagcaagctggcaggtttggattcacattgtcctgctcattaggttgcaggacagaatgtactggctgccctatatcatccacatctatttctctttccttcatatcaacatcccccttcaggggcatcccacatgtatgtcttaacttctttaattgaccatcagatatcaacttgttattctcttgattttcaacattgtgcagtctccctagattgcgttttaaagatttatttctctcacgtgtttttgagggtctccgaagcttaagtttcgacactccaggcccctcttgcacttttcgaggccttccacgagtctctcgcattttgaggggtcttcgacgcttatccctcaactttttcttcaacccactgcccgatgctaattgaacatgcacttcattttccactttccgtggcctcccacgtctctctaccttcttcagttcactggcaccactctctaccttcttcttcaacccactacccaatgctaattgaccatgcacttcattttccactttgcgtggcctcccacgtctctctaccttcaattcagtggcatcaccctcaaccttcttcaattcagtggcatcactatctaccttcatcaattcagtggcatcactctctaccttcttcaactcgctacctgatgctaattgaccaagcacctcatttttcactttgcgtggcctcccacgtctctctaccttcttcaatttaccgacatcactctctaccttcttcttcaacccactacccgatgctaattgaccgtgcacttcattttccactttgcgtggtctcccacgtctctctaccttcttcaatttaccggcatcactctctaccttcttcttcaacccactacccgatgctaattgaccatgcacttcattttccacttttcgtggcctcccacgtctttctaccttcttcaattcacaagcatcactctctaccttcttcaattcacaggcatcaccttctaccttcttcaattcactagcatcactcactaccttcctaagttcactagcatcactctctaccttcttcagttcactggcatcactctctaccttcttcttcaacccactacccaatgctaattgaccatgcacttcattttccactttgcgtggcctcccacgtctttctaccttctttagttcacaggcaccactctctaccttcttcaattcacaggcatcactctctaccttcttcaattcactagcatcacacgctaccttcgtcaattcactagcaacactctctaccttcttcagttcactgccatcactctctaacttcttcaattcactggaatcattctctaaaggtggtctcttgcgcttatgtcctgagatcttatcaagaccaccatccaattgatctctattaaccttattctgttcggccaatttcttttcagacttatcaccttccttcgtctttaaatcaaaaatatcttcagacaccttcactttgtcaccttcaccagccaacacagaacttgaccgcagaaccctacgaacaactggcacttcattactcagctgttccgccttaaccttaaccttctttttctcagcaccaacaccatcactgtcaatgaatgcagcaccatccaccctcttcctcttcctcccattatcagctacctcatcaacctttacaaaactaccctcatcaccacaaagtccagcactttcttcaagcacctcattcacaccaagtccagcactttcttcaagcacctcattcacaccaagtccagcactttcttcaagcacctcattcacaccaagtccaccactttcttcaagcccctcattcaccaatgactctctctcaagctcaggaccacaaaagattgaatttttaaccttttcatcccctgattcagaactcacatgattctcctcatgtcctatactctcaacaacagcccggttcagagaatccttaccactctcagtcttagcataacgcttaccagatcttagacagtctttcatctctcctaaatccacacgaaaccctaatcgtaaaaccacccagtttcagttcaaaacaacctcaccaaacgaaatcaaaacaaagagaaacagttgctccctcgtcattccattcactttaccaaaaacaaaaaccccagttcgagaaatagaagggaaaaaaaatgcttcccggaacaaattaacccgaccctgaaaccgaacaaaaaattgaataaacacgaaaccagaaaataaaaatacgaaaaagaaaaagaaacccagatcaaagaacaagagtgttaataaaagcttacacaatgcagcaaagtctgggaaatcgcgtgatcctaaactcttttgaaaatcttctgaagtccggtgactcaatctccgaaatccgagacacataatgggtgggtttagatagaaaaagaaagaaagaaaaggggaaataataatatagagagtgagaaagagaagagtcgttgccgctgaaacttgagaatgggttgaagaatttagaaagttttttgagtaagcgttttttttttttcaattatttaattaaaatgttttatataattatatatttaaatattttgattggaaaaagagtagaggagtacatcgtagccttcgtaggtaggaagagagagaagtgagggtggccaagccaaggatgggcgggatcgtcaatttgccattccaatacggcctccgatttccgatttccctccataaatgtaaaataaataataaaatatggtatttttttttataattttttctattttgagacccaaaacacaatttcgttggtcaccgcgtcacaacaacaacaacacccaatttgaaagaagtaaaagaaaagaaaacagaaacacatatacacacacccaaaagaaaatttcactatctatttgagaaatttaattatatatgcatgtattaggggaaaattaattcttgtactaatattaggggaataggtcaacttttcccttaatttaaaaatgtccttcctattttgaaaccctctactcatctctcttcccgcttttctctctcgctcttttctccttctttcctaaactgaaacgcaccaaatttcaagcccgaacgaagcagcccaaccacctcgcgccaccaacaaagttttccaaccatcgagtgccacccacgaagtttctccaaccatcgacaaccaccctcggaatgagaatgtggaaggttggttttattttttaaaatattatccatttaaaccctgaattatccattcaaacaatatgtagtttcttcgtattttttgtttattatttagtaaaaaattgagttttggtgaaatctgtatttttttgtgattttttttgtatatggtacgatggggtacgatagtaattgtaagtgtcgttattttgtgacagattattttaatagaatgtctagtcatgtctggatttttagtctgttatatctgcacacttgcgcactgttaagttggtgtgagtctgttatgacttatcgttaggagttagccagtgccaagtggactgttctgttgggtataaatagtcagtcggttttattctgtaaacagattatccattaaatcgatattattagttagttcagttttatcgtgggtgttagtgttgtatcttgccgttcttgttgttgtttctacaggtctgattgtatagcttgaagatggtcatcgatggcagaacgatcagagcctgacgtagctgagttcagactgaaggaagttcagtgtcaacttcgtcatcagatctgaagggatttcagattgaagaagtgtcgaagacaaactcagttgatgcacaagggattgtgtacttgcaatcaagattattgattgctgttggtaattcattactaattgttgtaaagtttgtattaaattccttagagagaattggaaattgtaatacgaaactcttgagaattagtagatgagattaccctggttcggggaacccaagcactagtcggctgagatgtgttctcagtgcagatgaagcttgtaactctttgtgtgttttattgctttattctcaattcaagtctgaaactcatatgttgaaataaatctactcaaagataatcaactaggtaatctgaatcattaaaatcaacaagt

SEQ ID NO: 107217 - DNA, 5811 bp, Cannabis sativa
ttttaagttttttatttttttctccagattttaaattttttcattaaatgtccatatttttcaaaatgcatttaagaaattccatatttataaaaaaagcccaagcagatattgatcccttcagtgcagcttaaaaaaagatgaaaaaagaaggcagtgtgaccattgaagttttactcaattatgaaatattggtatagcacaggaaaaacaataagaagagactcactggagaacatgtgaagccatgaatagttcaggctcccctccccatacatgtggcttcctgatttgtgagacatatgtatcaaaatcaccttctacaaacctgtgacatggtaattgtatgagatatactagcaataaaatcaaactatgaacacacaggagtgttgtaatgaagatataagttcctcttgtctatgatacaagtgaaaaatccttatgattttattgatggaaactttaaggctcaatagtaagaaagtaggtgattatgaagcttacagaacagtcaaaaaaagaaactcaccattctgtctcttctcttcttttgataaactcatcagcaacctgaatatataatgagacaatcaaataaggcactctttgaaatatggatagtaagttacaaactgaaatatcatgacaaatgttaatgaaacttactctggcccttaaatcatcagctaattctctttgcaaattctcatttggagctggtttcccagctcgtaaacaagctccatgagcaacggagcgaaacatgcatcgcccatctcctggtattcctgcgcagtatggagcagttatctacagtttgacaccaaaaaggaaatcaaatcaatatacgaaaacagaagagaattgttgcaattgtacaagcactggaagaccagaaacaaattcttaatcttagtgatcataaagtacagtgtgaaaaagacaggcaatctaaactcaccgatcacagaatagtcagtgtatactttcttcccatgtgacaatttaacgtgtggtgaatcacagtcatctttcttataattgcctccttgtgctgattcagcattcaagggttcagaactcgaatagcaaaccaataacccacaaattaatccggcagaggcacagcccgatggccaagaaattggtccaacattacaactgactttgggaagcattgtttgtttgattcctttgggcactacaattctcatgttcaaagcatgatttgcgattgaaattttaaggtttcttccccgggtcccctcagcactaaccaaatctttagctgttaaagaccacaatttgcctgtttctttggagaagcaagagctgacaaagtttctctgagatgttcgactaacactagacagatgattcttggagacaaacaaatgtgtatactttgtgtttgaattcccaggattgaaacagaaacagcgtgaactagatggccttcgggacatcatagaagacatcttgctgcccatctgtgtttggatatacccactcaggcacacagcacctttcgcagatgagcttattgaagggcaaacaatcatattttcacagcctaaagcaaaagcaggcagtgtcaattggcagcttaattaatggcatttgtataatttataagttacatcacaacattattaagttttctcacattggacatttttttcatccctaacagaataacctatctaaaaattagagtgcaaatctccacagagaagctaaatttcttaccaaatcacttctctatactaaccattaaccaatatagctaagtaccaacaatattctgttggaagtatatataaattgtagtcagctcttatatataaaataaatgagggttcattttgttcatgcttatatactaacagttttagatagaagcaatataaagcaagaatagtgggcatataatagtataagcactactcattgcatggtataagcacattggatagtgttccacatatcctgtcaaataaactcaaattaataaccaggtttctgttaagacaaagccagctctgtatttgaagatttgaagcttttagtttcaggttcacatgatactcaaaacactagttctttcaggtgtctactcagcacctggaaagatacatcaaaaagagccctaaatcccaaaaaggagatatattgtgaaaataatgataatgccatattaccttgatattctatattcatcttcattctatttcacatcaacataggtcctccctaacaattaatacatgttgcagagaaacccattaaagaactttatgaacatttaaggcagaattcaagctagtaagaaattactgaaacacatgaatgcaaatcaaacaaaatatagattattgactatttccaggcctcttcttaaatcataatttcttaagttaatacagtcaactttatcacaaaaaacaaataattctacatgttatggacacaatgggactaactaaaaactaccagaattaattacactaaaagtacattaaataattagtttatacaataacataaaccagaagggtttttaaacaaggaaagaacttgggggaatccacagattttcaagggtccacaaataagaattaagaggaaatctcaaatgccaaatcaatcccatgaatgtttcccctatattctaatgctccattacacttcaaatagaccaatgaattaagacttagtaaatttgcaacagcaaatatattattatctaaaaattcaccacaacgattcagcatttgaataaacccacatcaaaattggaacatactcaaatgtaaaagaaaagggtaaagaaagcaaacctcaggagtgtaagaaaaatgtagatgagagtacaccacgtagagggtgttatagaaaactgcaaagagaaccctgaaaagacatgattaagttacttgagaagaaagcttatacatattctagagcaaaacagagaacagagaagggtttgagaagtaaagaataccctcaagccaaaactcgtctgttcatttcagacaaatcccaaaccaaaaaagagaaaataaatatttacagttgaagattgtctttttttttttttttttggctctttatgaataaatgaagaagatacgagaagtaactcgttggtatcaattatcaactacgttgaaaatcttgtcgtttcgacatgttccagtcccacgtgtgagagtcgcacgtaccaccatcattaattttttttttttctctttaatttagttggactacaaaagattatagcaaaatttacatcaaaaatataaaatgacattttaattcaaaaatatagattgaataatatttttatttttattattattttatttatctaaacatcttttacacacgttttgcatccattgatgacgtcatgtgtttagattaacactcaataaattttccctctcttttgttatcattttcttttttattttcgatttcaatttcatttttttatttttcgtttgctcaaaatgttcatccttaagatcaaaacttcactttcgttccaaaagaactgcttccctccatcatctctaacttccattttagcaattgcccatgttttttttccttttttttttctatccacttaatatagatggttgtgactcggtcttcatctttcccttctccattattgaaaaaatctaaaaaaaatggatcttaaatttctggccaataaagctaaaggaaaataccccttaatgaagaaggtgattctgatttttctccacttgtaacgaaacgtgatcgttgccctcttcagaagaaatcaaaaagtaatgatgctaaaaatagttctttccctgagactaagaagttgaagaaacaataagataaaattccttaggttttattttagtttcattttcgttttgccctaacttagaaatattatatttgttctaggttttgttttttcattaaatttttttttaggctttatatttttttgttgttttaatttttgattagatatattgttactgtttgaaatatttgttagatttaggttattttttgatttttttctttataaactgttatttatttctattcgtatttgtcctttttttttgtaataaatctttatttatgtatttttctgcttatcgttattttttggctgatttttaacatatattgtggtttgatatttgttgtttatttagtttgatgctagttgtattccagttgttctctctattttttacaatttgctttgttcattatacatttttggtttgatttcatgaatgggaatgcaaattcccttcatttgttctttataaatctaaagttgtatcaacttgtagttatagagttattgagaatcttaatgtcagtcttttggtaaatatcaaggcaatgtaccatcctacccaattcggtgaatatttagacattaattgtgaaagaatttttagcaaacagttcttgtcgttgtgcttgtttaagtgttgaagagttcttttttatttccagtttcgattgtatggggtattgcagcaaaattgattttttctcaggatttaaaccagattattgacacttattttctcggtgttaaacagattacccaaaaatctgtagaagatattgtgtcaggttttgtatgtggtaatgatgatgccttaggtttgaaggttgtcgtgttttattttgattcattgttttcttattggtaacacgaaagaaaaagagattagtagggctaaaattgacatcattgacaatgtgagatgggatgagtattgttggggtggagaatcattcaagttgacattacactcttttaagggtaatgttgctcatgctattaagaagaaaatgaacatgtacgagaaaaactgttatcaaggttggtatagagttttgggttgtccgtgagtttctcaagtgtggttttatgaatgttgtgtgaataagataggggttttggtaaacgtgtagattctcgtatttcaagaattttgaatttgcgcagtggtgattatcctagctctagtacgctgcctttgcacgatctcacagtgaagtttttttatttaccactaaaaatggtaagtatttagtttgattatagtggtattataatttcttaaagcattatttattgttaattttatgctttcattgatatatttttgctgttcttttttataggtacaggtgaagaacatgaggcctacttttgaagaatttaagcagctgcctctacatggttttttataggatctttcaattgaccgtgcctcggtgaagcctacttttgatgttggttcttcttcaagagagaaggtttctcctgacattgaacctttgaaagagaaggtttttgatatcatttgtaatcaaaagaagatgtttgatgattttgctcttttgagaggttttgttgaggttaattttaggaaagtattgtttgcaattaatgattttaagagaaaagtcactgatttttgtgacagggctcatgttcaggtttgtttcatatttgattttaagtcggtcttatgttaagtagatctaggcaatctttgtgactagtttagttgtatttaaggtgtattacaattgtgcaacaagacaatattattaggattttatactctaaattaaatctattttaatataatcttatttgctatcaatagaagattagaggtcatttaagtttacatgtatttttcatgtttatggaatgagagcattctatgaatacttacgaagaccttatttgctatcaattttatttgg

SEQ ID NO: 107218 - DNA, 6952 bp, Cannabis sativa
aaagtattggaatgacattccaatagaatgctctttctaccattttggtggaatggctattctattttaaagaggaaggaaagattattccaatgtgacaaaagaagaaatttaatgaattattatcaatttttttttttttattatcaatttttttttttttttcaattttttttttttttatgtattttaaattttattccattcctattactattactattctcattctcaatgttatattttcattcctcccaaccaaacaccaccttagtttcatattccctctaattctactccttccaactctactctctagtcttcaactcaaactcacataacaaacatcccattaaggcattaagtgttgtttggttggaaggaatgaaaacatagctagaataagaattatattccaatactttaaaatgaaaccaaccaaaaaaataaaataaaaattatttctttttctattccattctattttattatctcaaactaaatgccacaaaagaatagttactttcctctccatccttcatactatctatcctttctattatttctttccatttttcttaccaaacatagccttagaaaagaggagagaggagctttttcatcccaagacccaagttttccccaatttaaatccagcttgagacgacgacgttttacactctttagctggaatatcaaaatgccacgtgtacatataatagtagaggatattttttattttgttttttgtttttttcttatctttttatattttggtgatttattgtagaaagaaaaaaaaaagaaaagaaaaagagaagagagaagggatgtcaaactcaaatgcagtggctaatggagtagctggagctggaggtggtattattgctcaaatcattacttatcctcttcaaacggtaccccaatactctttgttcttccctattcaaattctactttactttactttactttacttcgattctattctaatatatatagttgtatttaggtcaatacacgccaacaaaccgagagaagagccaaaaggattttgacctctgcttctacatctcccactcctactcccactgctcttgttcaaatactccaagtattctattctattctattctattcatttatttttaatccagataaccaattatatatatatatatgttattaataatttgttagcacaggttataaagaatgaagggtggggtggactttacagtggtctcaaaccttccttgtttggaacagctgcttcacaggtttatatatatttaacactttggagaattttaattacaactttctattataacttttagttaattatcgcgccccgaaatcatatcttggattatgtttttcaaatctattttcgacacggtacattactcgaaatttttcaaaaatttatactttgaaaatattttaacacgtgatttttcagacataaaagttgacggtaactatgtcttgataattattgtttacataaataatgttagtgtattgacatgtgaccaaattatgtatcacactgctacatgcaccagggaatatattattacttttaccaggttttcaagaacaaggcagagtctattgcaaattctcgtaaaaacaaaggccgtggggatggaagtgtgggcatgttttcatggcttattgttgcagctcttgctgggtataactataactataactataacaaccctttatgttatgactatattgtatatatgattttgaaaactagtacttgaataatatagaagacatgactcatgagtgattgtttattgaaataattgagaaataaaagaaatttgtagtacaactaatttactaaggtagcatttggttggaaacaatgaaaatatagaaaaagagaatgagaatgagaatgggaatgggaataggaatagattggaatcaaatttaaaacgtataaaaagaaattgataaaaaaagttattaaattttttcttatcttgcattggaatggtctttccttttacttcaaaatgaaaaagtcattccactagaattacattctaacactttaaaatgcaaccaatcaaaagaacagaataaaacttatttcttttttattctattccatttcatacctccaaccaaacaccacttaagtcttccaatctatatctcttaaatagaagcacatcatctaatcaacaaaagcaattgtgatgagacaatatagttagggatgataactactaccaacaaaattctagttggactaaaatttcagtaaatattcacacttttactgtaactagacattacaattaactatagagcagtaactatatagatgaaaatggtaaaaaactattcatccatattttaataaaagcaattaaaatgttaatgtaagcctaaaatagaagtcatacaatatgatcatatctctacttatatatgtgttttgctttaattgcagttccttgaacgtattgttcactaatcctatatgggttctcgtcactcgtatgcaggtgtactgtctcttgtctaacttctttcttatgataaatccatctttttgtttgttaactaactaccaaataaggtactttgaagtagcaaattgataaaattatatatgatccatacttggggttttgtttattttatttagacacatactcaagcagaacgaaaaattagggaggaaagaaaagaatcgatggcgagggaagtagcgaattctgatcaaagcagcattactctgttgcatgacaacatggcaaagcttgattctttaaaaccgactccttatggaaccatccatgcggttagctagcattttcaatcatattttttgtttatatttagaatatatatgtatatatcattattgtattaattgtgttcttgttcaggctcaagaagtgtatagagaagcaggaattcgtggtttctggaaaggcattatcccaacactaatcatggtcatttcacttcttcttcttcttgttatttattagtgcaaaagagagaaatagaagtaaaacagaaaataaccatgattaaatcttattgtatgacttcaggtgtgcaatccatcaatccaattcatgatttatgagacctctttaaaccgtctaaaggcgagacgtaataaagctagtaagccgggatcaaacacttctgcaactgctttcgaggtaatacaactttttaattgttactttcctgattcattcagtatttgaaagagaaatattaggctcatttgtgtttcttcatagactttcttactaggagccttggccaaacttggagcaactgtgtctacataccccttgttagttgtcaaggtaatacaaaccttaacaatttctttagatgaaaaaaaaatatcatcacttttaacaatttctttgcatatgcagtcaaggctgcaggcgaagcaggagattggagggaatagctccttaagatactcaggttaatttggcttctaaacctaatgatcaatcgtttatttatcaaagaaaaacttatactttgaataattcggtcataattacttataggcaccattgatgcaataatgaagatgattagatatgaagggttgagtagcttttacaaaggcatgagtacaaagattgtgcaaagtgtttttgcagcttcactactttttatgatcaaggaggaacttgtcaaggcttacgtcttaatggcccataagtcccatttatttttatccaatttgagaaaaataagataattatgtgtacagagctagctaaattgaaaaataccttaccaatttgattcatatgaaaagtttcaaatgatatattttcgtgttgaagtggttagttcttcccaactagctgtgaagaagttagttaaagttgtttaacggtttctacagttcactaatcctagccatttggattctgttagcgagctgttaaaacccctcttcaataaactcttcagggaccatgaatgtaactcaatttcatgctaataaggtcatctcttatagaactttaaaatatgaaatttgtaatgatttagcactaaattcattccaacccaattctaaaacctatcttatatatagcattgtttatagtttcccattaaatttggtggagcactatagatcatactaaaacttactttttatttattaatcactataacttttaaatttatatattctttaccattaataataataatataataacactatttaattaaaaaattatttttgtgtaacttttagagttgttggttgaagtggaaaaataatatgatacttaaactacattattttcgtgttaaactaacataattatagtgtttatgattgaagagagtagtaatcaattatatatatttatatatatggagctgtacatgttaaatttttatatatataagctcggtacaatacattatttttgtatcgtgtttaaatttgtatcatatttgtagtcgtgtcgtgctttattttggcatttttttttcttacaggccaactcgttttttgtacagatttaaattcgaactctactttcttataatttcttttacaattaatgagttagtaattaaattgagttttttttttattctaattttcaattgttttatataccttttcaacaatagttttttttaagagtaacaaaggtaactagggtatgcaaaaagtagaagattttcttccagttaaatatcttaagagtatgcagatataccacgaaaaaaataaatgaaacttttaatataaaaaaaaaaaagaaaacatctaacttgttataaaagtaattataactattccaataagattatttaataataataaagagtaatgatatgtacacacataatcaggattttaaaaaattacaaaaatattgtacggaatttttatgggttttttgattttatttacataaaatatggtcttttatgtacttttatgttgtactcttattatttttttgttcattttttgtaaattatatattatttttttatgttgttttcttgttactcttatgtggttttcttgtgtttttatagaatgctgtaaaaatgtaaaaaaaaaaaaattaaacgtaaaaacataaagtttttacaaaaaatattttatgtaattatatccacatgattcacacacaaatttaacatacacttatatgacaagtagcttcaacaaattatctttatttaaaatgggtcccacaaataatcaaatcaaatttttatctcacaaattttaaaataaattaaggtataattacatattttaataattgtaattatatagttgtatatatactttgatgtatttgagttatatgaccattttaatttatataaataattatagttgtattattttttcaaagatatttatattattattattatcattaaattatttaactttttaacatattgtgttttcgagctagattttgtatttatgttagaagtgcacattgggtgggttttgccaagtttggattttttgagttcgggtttcggctgtgtatattttgtagccagaacccgcccatttttgtggcagtgttttcgtggttttgggttttgagtttgggttgggtcgagtctaggtggattttgaccggggtttgggttgggctactctttacttccacatcaaggggctttgctcctcactcaaggaggtcttgctcctcccttaaggagcctttactcccacattaaggtggttttgctcctcactcaaggaggtctcgctcctccctcaaggagcctttacttctacatcaaggtggtcttgctcctcctcaaggagcctttacttccatatcaaggtggctttgctcctccctcaaggatctttaacttccacatcaatgtgtctttgctcctccctcaaagagcctttactcccacatcaaggtgattttgctcctaactcaagggggccttgctcctccctcaaggatcctttactgccacattaaggtggctttgctccttgctcaaggaggccttacctcctccatgaacaattcctaatgccaccaatggcttagacaccttgagaatagtcaacgcctctaggcttagcgcaattctctccaagccctaatgccaatagattaggcacaatgtcctaatgccaatggcttaggcacaaagtcctaatgccaatgatttaggcacaaagtcctaatgccaatggtttaggcacaaagtcctaatgccaccaatgacgtaggcactttgagaatagtcaatgcctctgggcttggcacatgtgacagtcagtattcccgtgatccgtaagggaaaataccaggtaagttatacaatcccacattgcttggggaaagtcaagtgtgatgattctgagactgtataggtatgggactagacaattgaagagggcttaaatagattgattggtactacctatatcaacaacgtgcatcttgtttttcagtagcccttcacgaaagaactccacgattaagcgtgcttgacttggggtaacttcaggatgggtgacctcctgggaagttttcccaggaagtgtgcaagtgaggacaaagaacgttggaaacaattctattggtttgtagggtcatcagtccatgaagcagccagagtgatgtactcgtgtataagagccattattttgtgagtgtatgggcccaatgaaggtttgaagtggggacattataaagggtatcagagccttgacccaatcggaagtgtggtcgacgaggacgtcggaccttgtaagagggtgattgtgacagtcagtagtcccatgatttgtaaggggaaataccgggtaagctgtacaatcccacatcgcctaaggaaggtcaaatgggataattttgagtctgtgtaggtatgggactacacagtt

SEQ ID NO: 107219 - DNA, 1842 bp, Cannabis sativa
tcttagtggtgaaattcacactaagaaataatactttttttttttattttaaaaatgggagctttccctagtaataaataggtcattgatccaacaaatttaattaaggtggcatcatgaattagatcaggtgcaaacactaggcttgtcgaagggatgcaaattattgtacgttatcattataacaggaatgataccatttggaaaaccagaagttagaggttaaaaaggaaaagttcaaaaagttatgaaaaatactagtaataggctagttttttaaatgccgagaagatgaataagaagacctattattataatgaattttttagtatttgtaattataattagtttatttgtgcattatataattaatctgattcattaataaaaaaagacttttgtctgcatatgagttgtgttaagttttttcttttttttttctttctaagaaattatctagtgaagttttcttaaaaattgtgaagaatggggtttgttaaagaaactcagatcaaagacccaaaaaaaaatccttgattcttaatatccaatattcgtcgtattgcagtggtgtgggattttattaagtaaacccacattaaagagtattattgtgaagaaaatcttgatcaaagtgtcttttttgttgttaggttagaacacaaataataagaagtgtgaattgctaataatcatctatgattaaatctactaaattagatgtgcacttttattcataaccaattgatcatgtgggtctttattatattaaatgccctactaataggtcttttttgaattcaccattttagaaagcaatatatatgtagctagcctagctagggattatacttacttataaattcacatattctataattaagaagagcaatataggtagaaagcggagatcatgcatattcttttaagtttcttattatttactatatatatttgattattcaaccttttgaattacatgcatatctttctgataccttctcaaacaaaattaatgatcagatagatgagtacagtggcggacctaatggagaataaggtggaacacttttacttattatgatcattttttttttcataacgtatacaaaaaaattaaattagaaattaattatgtagaataaaataggtatatatatagaattctgcacacacttaattgaaatcttgagtccgccaatagataggtaatataaatttcattattactctcaattatatgcactatcaactcaaacatgcaacctcaaatgtgcaaattgcgctaaaatgtactatttcaatctcaaacatcaaatgtaaatcataaatcttgatgtaattgtctgttaacaaccttattaatgatccgattacctaactaattagttattaatttcttttaattagttagttattgtgtacaatcgttttctgtttttgagcatctttgtaagtgctgtgcagagtttttttttttttttttataatatttttccctcttctctaaattttctttctaagcttttgtatctgaatttgcatgtctaaccatttccatttttattgaccggccatttgtaattgttgaaacataattgcctacatatatttattgaaatcagttgatataggatgaaagttttatgaactacttaattagtttaattggtggaccaataatttttcgacgttatattttcgagaatgattaaattgaaagtatgtagtttatattttattgtgattaagtttatttgtttaataacaataatattttgttggcttaattttttaagcatatttagtaatactattaagtagtacataattaattttact

SEQ ID NO: 107220 - DNA, 3426 bp, Cannabis sativa
  modified_base (60)..(64): a, c, t, g, unknown or other
  modified_base (1389)..(1393): a, c, t, g, unknown or other
  modified_base (2264)..(2280): a, c, t, g, unknown or other
ttgtgatttcattatttgttattagatcaaaattcgatggtttaatatttttaaaattannnnntatagttaaatttgtttagtaaccattcatgggtaacaccctatatgtgtcaaaaataaatatacgactaaatattcataaaaaattaatgcatatatagattaattatatataagaacaaattatatatatcaaaacagaaatataataaggctctgataccaactgttaaaaatttatatgaatgatattaaatatatgatcatgtatgaagtgcagaatgaatcgaacatatgtactatgtaagtaagaatcgaaatacctccagctattgattttttgaattttaatcccacacgagctttggatctacagaacaaaaggaaactgataagtgtgagtaatcgggcttctaagctctctattcttgttagatagatttactgtatttcaaagaatgagcagtgaactcggagattgagatcctatatttatataggtcagaccttccatcaaagtctctgccataattaattgtcagaatatttcgataattaattcaagaaattaaattagaaaattaaatatttggtaaatcataatctgaccatatataaaatatcaattaattaattgatcaaattcaaagaatataaaatatttattacattatatacacgtataaaattattaattaattttatacttaatatataaaatatttaaatagtggttttttatgattagttagcgatattttataaaaaaaaaatattattttaaattatatggaagtgaatatttaattgtagattattaggtacgtacagtggtgcctagcaccttctcgacttgttgcattgcgattggttagcgatattccctaaaagttattatattaaattatatgggacccgctacttagttggaccaatagcgatattaacacataaaaaagtgctagacaccactagcgttcttatgatatattgaaaattgctagtcacccttgccttttggcatttcttttatagaaaaatatatatacataatacatttgaccaattagtaacaaatcacttttgactttaggtggttgacactttgggtaggcaaacttggttcgagtatcccatctatttgtagacatatacatttaatgaaggtgcatggtggtgattttattatattagtattttattagtaattagtcttcaattataatttttttaacattgtgccatggattgggtatactctgggagtcatgtggtcaaataagtagagaaaaacttctatggcaatcttgactcttttcacataattggatacatagcgaatcatacaagaaacgtgttaaaattgagataaaataaaaaaaaaannnnnaataaataaataaataaataagaccttttactgcatatatgctagccatggttgacactgtaaataaatgttctttctgtccgtttatataataataagaaatattttgttttttctttttaaaaggttattcttttttataatccattttaaaaataaagttataatttttattattattattattattatttgttctaagaaagagcagccgtcaaagtggaacatcttatatagactaaattaagttagtgggtttattaattaatgttttggccaactgtgtgattaaatctagtaattaagttgaattctatgattgttggccaactttgcccagattgtgtccacttgttctaatactatatatacacaatactatgtttcacaataacgctaatggataggattatatatattatatatacgttgatctttatgccttttttcttgactaattgttttaataagaaaatttcagtaattgttcacgaattattcaccatttttcattcacagttgagtatttgaataaatttaattacaaatattaattttaaaaatattaaattattaaattttaatataataaaaaataattagaaaaaatttaaatttttatgtttaatttaattatttatttaaaaaataacaaaaaatattttttttacaataaagtaaaatatatttatataaaaaatatttactatttagtactatttttttaattttaatttttttttaaatttatggttgagtttctaaaatggttgcagcgctagttgcaatagagatttctatacgattttttgttgcaatttaggttacagcgctagttgcagtaggagtttttatgtaaaattccgtaaannnnnnnnnnnnnnnnnaaaaaaaaactatttttaaatgtaaaaaagaataagcaattaagaatcatatatttctaattactttttagagtacttttgttttttaggagaatgatttgagtttaggatttaggaaaaaaaagacaatgatattaatatacatcctaaaaaatctatcatcatatttcatcactaattaatgttatgtggatatcataattttttattttattaatttatgttttaattttttttggatggattttaatttaataaattaatattaccacatcttaggtaagatggcaaatcataacaatctatcaagattacccaagattttttttatatatatatataacaaaataagatttaagttatgtatatatgccattattgtatttaattaaaatatatttggctaagatattagtacttgagtggtatgtatgtaccatatcctatatgagccaatatactctttgcaaaaaaatatcgcctaacctttttgtaaatttccattgatatcctcaatttcttttcccatttattcatgttgtctattaacttttaacggttcaattttttgtctttatttatgtacattatacatgctaaatttcaacatccatgctttaaatgattaaaaagatcccattaataaaaaaaatactcaatatataaatagatgcttaaattttataaattataccagttttatccttctaacaataaacattagtaggagagtttattgaatcatatttaatatatatttttaggattatatttagattcaatctaattatatattaaatattaaattttactattcgatctgatctaattaatttaacttatctaatcgatccaacatccatccattatatgttggattggatcagttctatctattggatacatttcatatatatgctcttaatggatattacctatgtatgattattttattattaacaattagatcaaatctaataattgatatttataatcattaattaaatattaaaaaattaatatttcctactttctcacttctttgtttgattttttttattctctctacattcttaaaataaatgaaactattaatagaaaaaaaaatatatatatatataacattattgttaaagaagtgaaaca

SEQ ID NO: 107221 - DNA, 1854 bp, Cannabis sativa
  modified_base (1513)..(1527): a, c, t, g, unknown or other
aaaaaaaatgtaatagttcaaaccacataaaccacagaaaccgcaccgcaccacatcattttttgcggtgcaatttttgtggttttttagaatcgcggtgcgggtgctgtttgaaaaattggaaaaattacatgtgcgaattggtttgaaaaaatggttaaaaaccgcactacccgcaccgcgaacacccctacattccacgatggtagttaacaactaaaaatagatgggaatgttaaactgctaacagaacacgagtttagggagttttaccaccaaaattttagaattgggggttagttgcaaaaacctggtcacttaaggaggttatgccgcaaattactctaatttgaatgttccaattctaataagccttcattttttttttggtaaataccatttgatattttgagaaagattgattagactctctgattagttaaatgacaattaataacttatattttcaaaatgatacaaaataaacgttgagcttaatttttgtcaaattaaaacttaatattaacctgattacctaacatagagatgacaagactggttacatttgtttgcatctattcgtgttagaaattgacttcaagttgattatattaaaaaaaaaatgacgaaaattaagttcatgatctattttatagcattttgaaaaatacataatttaaattattattatttaggaaaatagaatatccaaatattaatttttataaaacacaaattcaaaatagtatttacttttttttttctaaaataagtagacttatatatcaccacatgcacaaaatcaattttattatattataatgatttttattattttatatttgaaaataattcattatatgtttttttctcttcatgataatgattcagtttgtgatgtaaattaaaaattgggtctctaactttagttagtaaatatatataaaaaaaaaatggtgtagagcatttcgatagtttgattattattaattaaccaaagtggttggttcctacgtactactttaacaacgtcatccatctttttagggattcaacttccacattacttgcaatgcggtccgaatctgaagcactaatatttaaattttggttcaccactgaatataagaggattgttattagacactaataatatctaactatatttataattagcctcttattagtgatattatataaaaattattatattaaattatatgagtctcacacaaataataataatattatatttttagagaatactaaattatttcgcacgtattataattaaatatttctttcatttctttttattttattttttaaaaaagtcatgcaattttaaaataatgacaggactaaattgggggaaagaagatggaatgaggatggagccaaaaagtttttgtaagaaggccaaagtaaaaaagaaaaaaaaaattaagggggtcgataaataaatttttggggtaagttaaaaaatactacttttattaatcaattaatcaannnnnnnnnnnnnnntatatttaattgaaacatacctctgtattgtacctaaaataccctgacataagagagtcgcatagaaagtatcttgaagtgacaggagcaaaattggtacaatatttaaaaaaaaaaataaaaataatagattttaaaaaagagggtaaaaataaaagagaataatataaaaaaagtatagagtgtaatttcctctaattttttaataaaaaataaaaaatatatatataaaataataattaaacaaaatttaaaaaaataaaaattaaaaaatacttggccctcatatggagaatgtagctcagacacactttggatagggttcta

SEQ ID NO: 107222 - DNA, 4894 bp, Cannabis sativa
cttatctgtatttgaatcacttctaatgcttggttatttttatagccggaacccgaatttcggcctcccatgtctgaagttgtacaggcactggtgcgactagtccaaagggccagcgtggtgaagaggcgttccaatgacgaatctggtttttcatacaggacccctgatcacgaagcgattgacatgtcgttttaagtgtttcatatttgcaattttgcaacataatagggagtaatttctttgctaaaactcagcacacagaacaaaatgttgtgaggacaaatcgagatcggctacagttgaacgaaacgaatcatgcacagatataaggctctaaaaaattaaaaacaaaaaaaaacaaaaacaaaaagaaggttggcaataagctagcggagatttgtaattatgatccatatacaattgtgtccattattgatactcgaaatggtattgaggcagaggtataggctggagtttgtaactgtgtatttattttgtattaacctttttattttggatacttggatgaacaattacaatgtaggtgcttttcgcatcacaataagattttatttcgatttttgtataactaaactcaatcatcatttggccccctaagtgataacacaaaagtcagctcttgccctctctattaataaagtcaagttattattgacatttgctttaatgaaaaatgattattcgtaaattaattgaattgaagctaataatgtttgacaattcaacatagttgttaattttaatcattttaggaccttgacaaaattggactaataataaacctgcaaggacaataaattttgcttagccagaccattcacaataaattacttgacattatttattaattatgatttgtattttttaaaagataattaagatttttgatctctaaatttgaccaatatcaaatttttgtttaattttattcaattttactaatttaataattatttgtgcattaaattatacttatatctaataaattataattcttgaatttttacatatactaaatcacattttttgaattttcatttatgttaaatttcttttattaaaattggacaaaaattcttaaatccaatcatctcaaaaaacaatatttttaaagaccttaaatctagctatttttttttttttttaaattcattaacggtcgttttttaaaggctattttttttaaaaaaaagaaaaagttattaatttatgtttttttgaccagcaaaggtaaaaaaagacaaagaggacagcatctattaaaacgacgagtcgtttaacggaaatcccgcgaaactccgacgatccaaagttcattcctttgattttcgtagtaagctttgcaattagcaaaagcaagaagacccacgtcgagcttttcctcgcttttttcttttccaagactcagaatatcttattccctcctactgcttttctaagatctcatcccaaccatggcttttacaggaggtgattcaacactccctcaccaagatagagaagaagaactgtctgaacccaatacctccttgtccagtttcatcaattctcgcttgaactcctccacacccaggagccgccaatcctccccggctaattctccccgacccggccccagtcgtttctccttcgctgatagatcctgcgattctaagtatgactcctcgtttcatgggtttaacatttttggttgtctcttggatcagaagaagcagaagcctcggcagcagagagccaggaggaaggtagggaaggtgtggtatgggatgaagcgagtcaaaggaatcgtaatcttgattttcttattgggtttatttttgttggtggattggatcatgctttcaaggctacaaaaccatggaatccatcccaaagctcggtcgtctacgaattcggcttctgtctctgcacgggtacgtattatgtacttgttattattgtgttccacttggtcttttgaatttgtgtaaatgggaatctgctgattcgtgtatataacaacaataatttttttttttatttgaattaaacaattcaaaataagttataggttcaagggactatttattcatgtgttgtgaatgaattaagtgacacaaagtaaggttgtacttataaatgaactgtgtccaactgcaccattaccaacgtcattggataagttggtaaaaggagcaaactttttgtttttgggggtcatgcagaaattatgttagttactctatatagaaaaaaaataaaaaaaaatatacatttaagcaagccaggtacatgaggtttgtgatatgttaaaagttttttactctcaggtaatttggttgacaaaaacgtggttgttgagattctccttttgttttgtttttctcttggcttctgcagaaagggtggaagaagtttggtaaaggaaaaagtgcacataaagggatctatggaaggatgttggctctagcagctcatgccttggcagaggtatttgatttcatgtcaactgtttgaatggcattttaagtcagtttagttgagatgagatcaagttatcatctgaaattttagatggagtctgccaggttgagtgatgataactatttatggttctttaccgctctgactgtattttatataacacagggacagaataaacctgagccaaaagatttgtggctggaaccatttattcctgcatcttcttggaagccttgcgccgaccaacgtaactgggagcctaatggtcttattccatctctcatataaatgtgtttgtgctttgcttgaatatgtgatttgagagtttgtagcttcttaaaggccagttatttttcctttttaaaaaaaggggcaagttatttttctttttaatttagtacaaatgacttaagctggttcttacctgcacttttgcaatgccttaacagaaggaaagaatggatacattttggttactgcaaatggaggaatgaaccagcagagagtagctgtgagtaaatattaaatttatcttcattaatttgtggtttatttcctttttttggtaacatccgaatttgaaatagtactttcccagaattggaaagcctcttggttcatttttcgacctatgaaatttgaacacttctgttttataacaggtatgcaatgctgtcgttcttgcaagattactcaatgcaactctggttgttcctaaatttttgtatagtagcgtttggaaagatgtaaggtgattcatttctttcctttcccttcctatcatctatttttgtaggttttttcatttataaggttgcgtttataatatttttatgaaatggagaagctgtaagggctacctgattgatatatgctgctgattgttcacattcaatgagtttacttggagcacagttaacagtcctacttcatgcttcctagtttttgcatcagctaatctcatattactatctcacagtcaattcagagatatctatcaagaggagcattttattaattacttgtcacaagatattcggattgtgaaagaactacccaaggagctgggatcactagatttgaaatccatcggtagcattgtacgttcatctcctcaatttggaatctctttccccttccccctcctttttttttttttgcttctgctatgtttttgaattacattgatgatggactgttgtatcagattacagatgaagacatcagaaaagaggcaaagccaagtttttacttgaagaatgttctccctattctacttaaaaatggagttgtacattttcttggatttggaaatcggttggcatttgatccaataccatttcaactgcaggtaaacaacaggttccacctcgcggcatctatatatataaataaattataataaattgcatcctttgcttaattagttgtttcttctaccgcttgttctctcttcctaattggggaatttcatctagagacttcgatgcagatgtaatttccatgctttgcaatttgctcccaagattcaagaaactggggctttaattcttcaaaggctgcgtcatcatgaaagtcatcctggaggaccattggatcattatcttgttggttcatatgctgaagcatttaagagacagaatcaaagtcatccaaagaaagcttccagatatctagctttacacttgagatttgaaattgacatggtagctcattctttatgtgaatttggtggaggtgaggaagagagaaaagagctggaagcttatcgtgaaatccatttccctgccctgacacttcttaagaagaccacaaagtatgctttatgcctttcctctattgctgttactgctattatatccttacaattatgtctgccataatataaatcaagttcccaattagttttatgcttcgatgtctggtgtttttttttgtgccactgtccagttgtgctaactggctttcttccgcataccattacaatatcatgcgacatgatttcctgttttgaaatttcagaatgtgttagtttgatattataaactatataaagattttaatatgaaaattcaagcttatttaaggagttgattttttcaatattctatggcttagcttattttattaatgatttgtctttcttggtagcagttggctttctgatgatttgtaaatttccagatatcttagatacgtccttggtagcagttagcttacctctttttgataaaagcaatcaaattgacaatgaagtagtttgatttgtaattgattttttttttcccaaaagtttttactacaggttaccgatctctgttatttctgtgtagcagttgagttagagattgctttttggtgaagtctccctcttttcataatcttttacatttttactccaggttac

SEQ ID NO: 107223 - DNA, 2753 bp, Cannabis sativa
  modified_base (2638)..(2646): a, c, t, g, unknown or other
tggattattgaattatctttctaacagtacaagaatcgctggaaaataatagatatcgagagagaaatcacacttttactgagccaatatcggacataaatttaaaaaaagaactgtaattcgacagtcagcataaaacatgaatttttgacattgaaataatcagaattaggaaagagtttcttcataaaaaatgtagaccattaaattatctttaaaacggtacctaaatcactgaaaatgggggcctatggggagagagatatggtatttttatgaaagcttatttctctgaaaacgaaaataaaaacatacgaaaatcctacataaaatcccgacattaagagacagtaaaagtttttaccttagaaatcgaatactgtgatagaggcttcaaacagtagtgtgcatgacagaacttttttccttgattctcttggtcctgatgataaaccttttattaataaataccttggtgtgccccagtaattttttcactcaaaaaaatcctcgttctacaatcttctccaaaaagctaatagtaagctttctgtttggaataataagctattttttagagctggtaaggaaatccttcttaaagcggttatccaggctatctgttcttatgccatgttatgcttcagacttcctctatctacttgtgggcagtttgagaagctcatggctaatttttggtggggctctttggggaataatcataggaaaattcattggaaaaaatagtcccttcttcgtaagtccaaattttttaggggtcttagttttcgtactactgttcaccacaatcaagccatggattccaagcaagcatggtggatctttactaatctcgattcccttctggctactctccttaaagccaaatattttaaaaataatgactttctctatgcttctcttggccactaccattctttcacttggagaagtctgctctagggtagggaactcctctcaagggtttaatttgaaaggtgggaaatggtaaatctattcaaatcactagtctgaattggatcctagatttgagggttgtatcttataaaaatgatctttctcctcctgaggatacaatctttttttcattaaaaaggagggattatgggatgttgataaactcaattcttatttctcaaaagatgtagttacttttattcttagaatccctgtcgatcctgctagagaggactgtctcatttggggacatcatctttgtggaaatctcactgtcaattcggcctactatcttgctaattcagcactttattttccttcttcttctaacctgagcttttttaaatattggtggaaaatagtttggactacaaagatgcttcctaagataaaacaccttgtttggaaagctttcaatcacttgcttccattgagccttaacctcttttataaggaaggggattgataacccttattgctctatttgctcccttcatgtttacactaattctcattctcttctagggtgttcaagagctgctaaaggctggttaactacaagatttgctcatttctttgacgctaacaaagattatgatataaaagtaagagttgccttaatcgtaacaaacttattttctcagctctcaagccttcttttgcagttatagaattttgggttaactcttacttgcagaaattttatgcagcccaagataagcttattatcccatctcacaacagtaatgcagaagcttccaacatctcctcaaatccttcaaatgatggtttagctcaagacaatgtttctcctcattttggaacttataaattgagtgtggacgcttcagtcagaaataaagattgtaaaattggctttagtgatgttgtcagaattataagggggaagttgttgcaagttgtttctcttcaatttctcgtgactctcccctcttttagcagagacagaatctctcatcaaggctctcacatgtgttcattagtttgattccctatcaacattatatctttagattgtcaagtattagttaaggacatcaagcacaagtagagtgatagaccttcactgtaattcaaaagattgattcttctctatctcacctttctaatgcttcccttagttttgtaccaaaaagtttaaatgtttttgctcataatcttactcaaagggcattatgaactgatttagaggttgtttagaacggttgtgtttcaagctctaatctttgatctttgtaacttgctcttcattgtgttatcttaatgttacaaatttttttttttttgaaattttttttttataaaaacgttacataaaatcgttaaggcaataattgacgaattataaagatcgtgcgcagggacggagctactttagctccaaagggggctatggcccctcccaaaattttggacaaaaaaaattataaagcaatttaggacttgtttggaacgtcgtattagctcgtattgtattgtattgtattatatttaattgggttatatatcatattttgatatactactatgttaaactttaatttatactaaaatattataaatttaggtgtccataaaagttaatatcacatatagttttacataaaaatattgtataaaatacaatttaatataatannnnnnnnnacaatacggtgtaatacggcgtactaaacgaactctaaaattttattttcttaaaaaattatgtatttggcctcccttaattattttttttttatcttttggccctc

SEQ ID NO: 107224 - DNA, 5315 bp, Cannabis sativa
tcatgggaagaaaaacatccataaccctactggtttgggagtcgaaaagtgttctgagtctgaaagttctaggccacatcggtattggattttcataactgaacacaaagcattcatgctaactttgtccaaggatggtggatttgtgagaatctgcgagaggactagcaggattcaagattgctgtaacaattgatgcagcagtttggattctggaaattttggaggagatacagaagaaatagggaagcagaggaactcattcaaaagattctttcagagcaatacaaacagctgcttcttggaagtcttccagaatgcgaagggtgtatttcttaagattactgtactgaaaaagaacattgtgaagatggtgatcatccctgaagaagttaaggtgaagggctggaaggagttcgaagattgtcttagcaacttattgagaagaaagtccacgaggagagtagaagagatccatgtggtaaaatcaggaaaccacaataaagcttcatgggctaacgtggtgaaacaatcagtggcttaagaagtagcaccacaaaaaaatgggaacaaactcagggaagaaaggggaggataccagaagcaccaggggaatatgaaatatggcaatcttggtgaatggaattttttacccacttttgagcaaggattctggtttataaagaactttccagcaaagcggctcaaccagaaaaacttcacggattatttgagtgcaaagcaatgtattaaagactggaagttggcagttattatgtttagagataacagtaaaagttcttggagttgcatcttttttaatttattcatggaagtgggaaaaaaacttgaaatcaactgtttgatgacatgagaattatatggtgcaagaatgagaacaaaaaggaggaattgttgaagataaaatagaagaaagtggcaggcacaaatgcgatagtgacctttgtcaattggtcgcttgaaaaccagagcaaagacgtgaagattgagtgcaaggggtcttgaattggggtcgaagggcttcctataaatctctggaaaatgaaaacaatgaggaaaatcgaagccttatgcagaaggccccttgacgttgataaagagactactgaaatgaattttttgcctcacataaaattgaaattggagggtgattctaatggctttattcctcagaccttagcagtaacaattgacaactttcacttggtattgaaatttttcaaactcaacgaaaagaattatagatttaatggaggtttcaatacactctggtttcaagacatggctatgtgccgtctgttaaaagataatgatgaggggtttgaagaatgctcgattgaaggaacaaataaggacgatatggtggttgattgatatacgggggtattgaaggatggttaggccattactgattagaaagaagatggtattcaggtatcggagaaccagacgctggcggagaatcattgcgttgaggaagaagtcgagaagatggggatggagcaagccattggtgattcagcaaatctcgaggtggatagccgtagtaatttaaatacattgatatttcaagtcccgaaaccagagcatgcggaggtgagaagtcaaataacttgaagagaatatttattcggctatttcagggtttgtctaggacacgtgtaccaaattttgtcaagagtccagaactaggtgctttctcccttttaaaaaacatgtgtcggtatgatcatagtttgggccgggagatatttggccgaaatgtagaaggaccaaggagtgaggactgggggtttgatgggcttcatagtcttaaaccaggggaattaatttactattgtaataagcctttcagtttagtgatgggccgagattgtctagcaactactctctcagataggatcgaaaaggagaccaaggactatttgatgacaagaagaattgggtcggggaaggacgaaaaggccctaagcgttaaaaagagccacgtactagcgataaacgaattcttcaaaggactacttgggtcgataaaaccaaaagctagagaaagctttaaatcgacaataattagcttctgggaagactttgagatgaacaaaagaatgggagaaaataaagtattacacaaggatggagaagatgagcaagaagaggaagtggtgaatgaaaaaagacttgatagtttacaataggaaaaggaaagcaatagatcacttctgtgaagaatttaatggatagaatttgggaagcttctaggagaatttggaaaaaggcaatagatctttggaagaagactttctggaacttagttcggagtgtgactcgtcagatgcggatggggaattcttcaaatgaggatgagaaagaagaccaagaagacattatttgtgacatgtagggactttggagaggaggaagaggtatctcaaaatcagttaagtctagaagggaatcagagaaaaaagggtattaatttggaggactctttgtgggacaagattgttgagtctggcggatttgggattggaaattctgcaaaacaaagagataggaaggcagagcgaaggagcgagtaagaatgggagaaagaaatgcaaagagctaaatcacctgaccttcaatgtgaattatgataagagctacaaaaagataggggccatgaaaaaagattaatgaagatcctttcttggaatattagaggtagtggtgataaaaagaagagaaacacaattaaagcaactaattttaaggccaatccagatctagtagttttacaagaagttaagaaggaagcagttaatagaagatttattggaagtatctggagatcaagattcaaagcttggatactactcccggccattgggagttttggtagtcaaagcttttgaaagagatggatgaaactttcatttgtcttattctcaaaaagctcaacagttgcaaggtaaaagacttcagaacaatcagcctcattactagtgtatacaagattatcgccaaagtcattctccttgctacaagacttagaggagtgttgggtgacacaatatcagaaactcagtctgctttcatggaaggcaaacaaattttggattcaataatgaggtcgtcgaagattatagatgacgaggcaagagtggctttgttttcaagattgatttcgagaaagcacatatcaaattggattgggattttctagagtgggttttgttgaaaaaggcatttggagaaaatggaggaaatagattagaggatgcatctcaacaacatcattctctatcttcatcaacgggagtacaaggggaaggtttttagggtctcggggactaaggcaaggaaaccaactatctccattcctttttacattggtgtctgatttccttgagagaatggtgaataaagcggtggattcaagttctttctcgagattcagtgttggcaaagataaagtgcaaatcagccatttacaattcacgaatgacactctattttttgtaaatgatgaggagtcacttcaaaagttggttagaattgttgcagccttctgtggtatttcaggattaaaagtgaatttaagtaagagccaactgttgagtctacgcctgaatgaaaaagtggtggaacaatgagctcttcaaatcgggagtgaagtaggcaagtggcctatgacatatcttagaatgcctctaggtgactcgcctaggaagaagagttttcaggtttcgattatggataaatgtgccaagaaactcgacggttggaactgctcctcatctagggaagataggcttaatcttattcagtctatcttatcttcccttccaatatactctccctcttctcaaagctccaaaattagtcacacggtctttggaaaagatgataaaagatttcttttgggaagatggagattcattgggcagtgaacatttgatttcatggaaggaggtatgtaagccaaagaatgagagggggctcgccattggaaatttggatttttgaaacaaggggccgcttatgaagtggcttttagagatattctttagaactgaattcattatggcatagagtgattaagagtcgctatggtcaagccgagaatctttgggactcaaaaaaaggtgttcggttatctccacaaggaccctggaaagatatttcagatttgtatgacaaatatttggagctagtgtattttaaagcgggaaaagggggtagcatttgcttttgggaagatgtatggattggagattcagctttgaaaagtgtctttccgatgttagcggtgatctccaaagccaagaatgaaagtataagggagctagtggtggacgaagggttgccaggcaatttagagaagagttggaattttatattcagaagaaaccttttggatagggaagtccctagtcttatcagcttaattcagcgattggagcatgtctggctgctcaccatagatgtatacatcagaatttggaggcttaattctggaggcattttctcttgtatatctgcctttagctggtttacttcaaacccaaaccatagtggccttttttgggcaaggatcctttggaaaagctcagttccttcaaaagttaaggtctttggatggctagtggctctaggcaaagtcaatgttcatgagaagttgcagacgagatgaccttacatttgtatttctcctagctggtgtgtgtgctgtaaaaatagcggggaagatttggaacacctatttttagaatgtcgttatgttcgtggaatctggctgcacttggtaaatgagttcaaacttgtttgggctatgcccagttgtgttccactaatgatggtgagtaaactaaggggcagcaaaagcaaaagcaaactatggagaacagtggttatggcattaatttaggctgtttggttggaaagaaattctagaatctttgagggtcgcgagagttcaaaggaagaactttgggagaaaataaaattctggtcagctacttgggtatacaagtctaaacattttgaggatttatcttttctagatttgtgtagagaatggaagtctctagtgtatgggagaggggacgtaaggttcacaccattttttttccttttatgtactttttccgtggttttttgttctttttcctctgccacaagtgaggtaatctatataaatatattgttaggctatttttagcctaagttttggatcacattttatagttatttttcttctttattattgtttttggaatagaattacgcttgttttctttggtttcaggttt

SEQ ID NO: 107225 - DNA, 3997 bp, Cannabis sativa
ggaacctattgaatacacataaattgagactatattaataaataataaatttgttagcctatattacatattgccaatgcatactatcatatcttttctatacaattcttaagttgccacacctatccaccaataacacgcaaaagatgtaaaaacctcttctctatttaacatctcaagatttgtcggataagtctattaatcacttaaattatctaatcatcatccttgtcatttgataatttaacatagatgcaaatatcttaaattctttggttttatcaagtcattgttcttgtactcgatgtttctcccatgccagtgtctcccatgccagtgatgcgccatgttaaatagtaaacacgtttctcatacataagaaccagttaatgattcacttccaccagtttattattaatattatttggtgatccaaattttctcctaaccacagcaaatgataatagtgtaactgggcaagtcttccaaaaacatagataggaatatgaatcattgtttgtagtgattttttaaactagaagatattaatggaattagaatcatagaaatcccagccgagaaaccagccatccaagtgtagaatgcataacaaatgaaaagcttcttctatttgaaatcatttcaagaaacataactgaaacaaagattataataaccataaatacccaaatcctcagtttccactggcagtccaaggtttattagcatatacatatatactaccacttacaagtgtccatatgtttgtttgatctgttcagattctgttcagcagttcatcaaccttcatagcccatttatctaactagtgctggaggaaggataatcaggctgcttctctggcatggcattttgaaatgctggcagtagactgtatgcctcattcagccgggacaaaatagggtattggctctgctcaagtatttaaatcagaaaacttgttagtagatcagatggagagcttttagtagtctccagtattattggattattttatttttttaatctttattcctatcattatttttacaataggtttctagcccgacaaagtaaaagaaaagaatcccggaaattataacaaataataatttgatagtataaataaatgaaaaagaaagagtaaaatgtaataaagaaaaagaagttataagaagaaaaaaagaaagtttgttgatggcattatgaaactagcatttcagattcaactttcatacgtacaactgacttttgagtagaactagaataagaaaataaaagaagaatgaatgggttcatcatttgccaacaataaattagaagaaaataggttcaggttagatgcaaaattataatcctgtttccttatcatgaattacatagtgaactttataataaaatatacatgtatgatgtatattatatctatatagtagtagtggtggtgtaatgttaatagagtacacgaaattagaatactcgtaccaggtcaaaattgaatcttgtaacaaaagaatgtatttgaggtgctaaaaataaatccgcctgcatattgtggtcaatttatcagataacttatatgtacaacactaacgaacataagcacaaacaaaaggtatgacaataaacaaatgagagagagagagagacagagagaaaagagtagaaaatcaaaccaagaagacttcatctccagttgcatatcttccagcatagttttttagcagaccctcaagtgctggacattcaaaaagaagtcaaattaagccttgaaatcctgacaatcatattactatcattgctcgtaattggtacatgtttatattttccatgcagataaataaaagaaacaaaaccactttacatgacaatacacacatcaccgcatcctatactcaagaatgtagcctttcttttagtagacactaacctgcaaagccatttccaagatgatatttaacccaaggtgttatctcttctggaccgaatttttctttgatgtaactctacaaatagaaaagcagcaacactgatttatcattttaatataactttaataaaaaaataacttaactctcacaaacgagggataaataaagcaataacaaccagataactaaaacttaccagtagtaccagattttgaagaggctgtatgcttgctgaaacaatatttgcaacctacatttaaggttgaaaaggacaagatcagtccaaaacccacaaaaaaactgatagagtgacaaatgtaggtgcaagtgttatgagggaaaacaaaatacaggagccattaggcaagagtttatgcaaaacccaatgggaagtgagttataacaacctcaaaccaaaatcttccatcatttttgttttttctgtgaacaactaaggcaaactagttttatcaggtcatgtggcaattcattaatctataaagactcagcttaacaactttttctattaccttacttatgtaggcctatatagtgaagagaaaatattctacaaatgggggagttacatttcactttaccttccagcttgtagtttagaaagagcaactttgactccgttggcttgacatgacacttaacaatgtagggcatgtatggaaaattagtttaaactcaacagtatgaaaatggaaaagaaaaaaaaaatatagaaataaataaatcttttaagtaattaattaataaagtttctcttctttttctatttttattaaagtaaagctgattagtgatttggtgaatagagacttattaaattgtaaagaatcatgataaggatactcataaggaatagttaaaattacctgcaaattaatagcttttcttttgagatcagttggcaagagcgggtgttgagggtacttctcatctaaatactaaacaaatttcaacaagagagaaaaaattagtttgttattcatgaagaacagtagaattctaaaactgtgtcagatacaggcacacaacacacagcagcagcagtcgagcaactcaccaataagatagcaaaagaatcagacaaaactatgtccccatccaccagcacgggcacgtacccgatcgggttgagcttcaaaaactctatgggaaaacaaacacaacccaattcctaaattagaaccttttttattaaacatgaatttcagttaatatatggattgaatggaagttgttgaatacaatgaaaaaacgagacctggatttcgttgctctcctttcacaaggttaactgcttcgtagtcgtagtctagccctggaattcaatacataattgttcagtttgggcatttcaaattttcattcaagagagaaatgaaagaggattgaatggtacctttcaaattgagggcgatcctaacccggaaggagcaagaactcctccagtaggaatagagcttgagcttgggttggtcatccccggttgcagtggcctaaaattacacatataataaaataaataaataatgattccaattttgttctgtgagagcagaattagggatttaccataagggatagggatgaagaacaagtgaggagtgagtgttgattaagtcggaagtcggaggagattgatggattaaacgatgcagttaaatttatgtttttgtcgttgggtttcgctactcagtagtgaaatctaggtgcaaatataagtatcacctccatataaatttaatttaataacattatatatagaataattctctagtagcgacattgactttatttcatagtataaagacatctaacatttttcattttcgaacataaacttgtgcttatacaaagtaaataagtttacaaagaaagtactcattatttaattttagatttaacttagcaattttatgagcttaacgcattagactctttatgaatgtagactatagttaggttagcactgaacaataacaagtttttaacacaaattaaaatgtcatttagaagactactattccaattataagaaacaagtttatcga

SEQ ID NO: 107226 - DNA, 3328 bp, Cannabis sativa
  modified_base (3125)..(3127): a, c, t, g, unknown or other
atttcggtaaaactaacctatttttaacaattaaaattaattttgttttttccataaataattatcttataacgtacatatataaaaaatccccaacaaaaaaaatactgaattttaggtaaaagtttacagttttactgttatacaggatttttttacaaaaatacagtttttttataaaataacctaaaataaccgtaaaataacaaaaatagaacaattaaaaataacagtagaataactaaaaaaaacaatcattgaacaacagtaaaaattttatatagtacacagtataaaacttatacaatattttcgaaaaaattctgtcccacaataaaaaggtaaagtgctctagtctaggctgagtaggaagaacaactgaggagaaagtacgaattgggctaggccgccgcccctggggtgctaggccatagtaaatgggccttaattttagttttctaaaaatgccatcttttccatagtttttggtactccactgattgtttcttcttcttttatgccacaaatactattttcttttttaaaaaaaaagattataattaaatctgaataaaaaaatttcaacataaatatatgaaaaatttatttatatttcccattacattaatatttaatattactaaattaatactactaatgttaatattattagtctatatattttataatgttttttcaaaaataatgttctgttatttttcttttttactttttgtatacataacattaatacatgattttgtaatagttttgataagttaaaattgtgcatcaattagggttttttttttattctttttatattttttattaattccattattgattaattgttagtttatgtatttttatacgtactgtcttttagttttttaatttttccttttggaaagtcttcatttgtgaatatttaagggttgtttggttcataacttaaaaattattttcagttttaaaaaatagaaaataatttttaaaattaataggagtcatttgttcaaaaattttaaaaacagtttttaatgaaatttaaaaaactagaaaatagaaaaaattaaaaatgttgttttcaatttttaaaaatattttttttgtctaacattgtatattttatatttttgctcacatactcaaactttagactcggaaccacgccctgaccctgacccaaacccagactcggaccccagaccccgaaccccgactaggaccccagatcccagcccagacccagaccctgaacccaaccctaaccctataccccaaacacaaaacccaaaacccgaaacccagacccaagcctggaccccaaaccccgatctagatccaagaccggcccagacccagaccccgactcagacctggatcccgactcaaacccgaacaccatattcggaccccgaccccaaactaggaactcagacctggacctggaccccggacccagacccgaatctagacctagaccccggatcccgactcgaatcccaggtccccactcggacccgaagcccatactcgaacccgactaaacactttggacctagccccgggtttgggatctggatttgggtctgggtccgaggtaggatgggttaatatcgtggtatgttgtaaaatattgaatttttttagtaagaaaaaaatctaaaaataattttgaaaaacttgtgccaaacactattgaatttttaaaatgacaaaaaacttttttctattctcacttttaaaaatacaattctgaaaactgaaaactaaaaatatagccaaacagcctcttagtggctcgatgtttccttgtttttttttttttaattattttctcttagattcctatatttacaatcatacaccattttttttatttaaaattcattttcatcttcttcactattttcattcttttttttaaaaaaaaaaaaagaaaaagaaaatgtgtatttccattatttgttttcttcttctgcattatttttttttattgttagtgaccatttcatttattttccttttattaccagtagttttgagaatcccagttgaagaacatggctattttgaggagtgtcggtgacacttgttcacgtcactcactagaaagtgaagattttgaagttacaggagaaagtgagagtagatggtgtcgtcaatgaaaaagtaagatctcaggaagaaacatcatggatcaccggttgttaataaatgtattgagaatgcaaccaaagtcccacattgactagaaatgggaagaattataggtataaaaggatggacactattctattagtatgaggccttttgggaagctgcccaaaaataaaatcgtgagggcttaggcccaaaacggacaatatcatactaatttgggagtcaaggtgacgtagcggcccgacaaagtgaaagaacggggtccaacaagtggtatcagagctaaaggttcaagagcgctgggataatgggctgtatttgtgatgtgtgaaagaaaccctcaatgtgatgacctcgcgattgaagatctatatggtgccttgtatcgaaagtctatctgatattgaggtattcaggtggcgtgtcccgttgatgattacgacggtacaagatggaaatcggtgttaggacctgtgtcaaaagtcttcctgacaaaggtgatggtcaggcggcgagttccctttttgatagcgacgacataagatggtttctctggaggggaggccacaagtatgtagtccttggtttgaggggaggattgttgggaatgcaaccaaagtctaggagtgttcatccaatccaatctgcactattttgctcatagtgcatccaatccgcactaagtgtgaatttcattttttggatccaatccaatcagcacaatagctcaaatctaatccaatccaatccaatctgcaaaagtgtagattggatatgttattttggattggttactttttaatatttatgaaaaatattttttttcacataactagcaacaaaataaaacaaattgtagttattttatgtcttcaaaaacacattaaaataaataaaataacaaataacaaattcaaaggaagaaaaaaaaattatatgtataaaaaaatatttannnttattttaaattgtatgtagaaaataaatatatataagaataaaatatacatttgatctattaagttttacaatataattgtattacatgtattagacttctaaagtactattttctttatattaaaatgttatttacatatatataattttttaatttttttttataaataagtgtggatttgttaggctatttttagcc

SEQ ID NO: 107227 - DNA, 4661 bp, Cannabis sativa
gactatatatttctatttacctcagcgcattgcaagtacaaccttaatgccagttctggtgccggaatgattgatagagcctcaatggtctgaaacacgtggatattgaatttttatataataactactgaaactttaaaatattggctaactgttaaaaaaaggtaagaatgataatggtgtactgttttcctattttgcagacgagtacctgatttaaaagctgaaatattttctttggtgtagttgttgtgtcatcaccaaaagggttttcctccggaccttgcaattgcctaaccaactgcagattcaagatacaaatagaataattcatgtcaatgccaaaaacagtttccctcaattgtaaatagagaatgttcaacattctcaataaaaatttggttacatatacaatgaagccttttttgtcaactatgttacagcttcactcattcatttagaagtttctgaacatatccaataacactgcctaaactctgaatataacacatttatcccagggagtgaagcaagtagaagcaaacctttagggaagagaaaaataagggaggaactgtgaaaaccaagcgcttcggccctccagtaagtatgtgcttcctcacagtacatataatctgcagacgagcccaagaatcattaacaacattatcatgaggtgtcaaattcaatcaagacccaaattctatgtcgtagcaaaagaaaaaagacccagattctatgatgcataccaaatgttttaaatatattatttatagcatagaattcaagtcattttaaatatggctgaacaggcttcaggcacgtcaaagttttgtatagtcaataccttgaacatctcttctggatcttcattggtgagcatctgaataagtcgagcaacagaattttgctcctcgttgaaatcatcttcatcaatctagagatcaaaacaaaaatatagactttacactcatttataatactagactagataacaacagaccaatgattatgcagcagagtatattaattcgggaaaataactgtggtagatttcaaatcaatgactacctcatcgtcaaaagttccgtccaaatccttaataagcccctttattaattcaaacaaagcttccacctacagaaaagtagaccacccagttatgaaaaatcccacttggaaaaaggggcaaagaataagtcattacatttacataccttgtcagcagttgatacatgagtcttatttttcataacacttgaaataataactgtagccatgaccttattggtttcattatcaagatattccatgacatggggataatttgaaagctttaaggtagtgacaatatcattatatttctcaagtggagcacttaaaagtgcaacgatctgttttgttgccttattgtcttcaatcttccctttgccagaaagttttttaacacaagctccctgacaaaaatagacaaagataaacatgtgttaatattactataagtaaatggaaaacttgcatctaccatacaataactcaaccgaaagaacataccaatacttgatctgcataatcaagccgatcagggtgtacgtggagagtaaatttaagaagtgacgagtacaatgttacaactccaacagtaggcatgtcaacatgcgcttctatcacctgcaccaacacacatccaattaattattgactatttagtctaatgtcccaatacaacgagtctcataaaagatagaaagtggctattcgtgacaggagacaaaaggaacttgttaaccacaccaaaccctttaacttaatatagttttcatatttgataactgtttttaatttgtaagtttgaggctacacaagatcctacctaagttcaactatttaatattcacaattaacttcaaacttcaatgctacacaggattttaccttcccaattgcattgctcaatttggaaaaagcttctacttgcaagaactcaggcaacacttctgcacttgaagcagcataatttgaaagcctttccatcaactgggataacactgtcttgatatcaacagatggctggaaaacataattttatacgagtcaataccacaaagtaaatcaaacaagtgaaagttggtcccaaaattctttatcacatagactactgtacatagtttcgatatagaggcggtgtcatgtaccattcaatgcttaacattcacataattgtctctttgttcaacattgtctattaccatacaaaaattaacttttattttgtgtgatataagatacgtttacagaaacttgaacccttgaccactcacaattcattcaactgcacaatcagtcaagctagccttaagtgacaccacttaaaaattgtttttatccagaaattctcctcataattcatataactttctggtcgtgtttggtaagaaagactgataaaaaaacttagttaagccaaaagaccagacatctatattcataaatgaaatttctcaactgtagactatttttgtgaaaggacctcaatatgcttatgaatagagtaggaatcttcaatttaaaaatgtttgaaaaagaccatgcaacttgtgattaaaagggataaaaaagacctaaaactaatcaaaatggaaataatgtcagctacctgaagttgagggcaagcacccaacaatacatcaagagtttgcaagtgatactcatcagggaatacttgaattatgcaatccatcagatagaattgtgcaatctcatctttgcaattgacaacctgtcaaagtagcaatttacagtaactgcaaacatccaaaaaaaaaaaaaacataagaagaagacaataaaactgaaaaggctataacctgctcaaggactctaggaagaacagattctttgtacatctcgagatcaatcccctctatctggctgagcacatgcaagttctttccaacctataaaaagtaaagagtaacaagagacaatccttctgtaagtgcacgcccaacatgtagagagttcaattgcagcaaaaccaaccagctatcagttactgatatttacaagatcacgcagctcgctccgctctttctcccgtttctccttttcccgggcaggtccctgcagaccagaaagcccgatagcaaccctcaactcaggatcagctaagagtatgaatgattcacaagcactacaacacctgcatgaccagaaatcatgccctcatgataaatttaccttcaagacatgcaagcattgtggtacctatgcatgtccaaacatgagagcaccataatagtagcaaccaacctgatgttgcatccgcacccaaagcttgttcatctcggtgaaattctggattacaaactccacagcatcaacaacagtgtctgcatccctaaagacatcaagacagcaatcatcagatcaggtttgttccttataatctacatgtaatgtatctaccaacagaaatatggaaaatagcttaatttccttacccttcatattcagaacctatatcaggcaatttgtccctgctgacttgagagaggtaactccttaaaaaaagcccacgtacaggatgctgaattccccggcacatttccaccagatctttaagaacatccttggcaggtgcttccttcgatttgatataaacagatcccactgtgcagaggaggtacctgattgcatcaggtagcaaaaccgtaaggtcggtaaaatcttaatgctacaactgacagtttaagatgggggcaatcagaatcaggtaacaatttaaggaaagatatcttccgcactccattaccaaaattaaaattgaaaaaaagaaacaaaggaaagaacatacagaaaatcacttaactatcttatacaaaacacatcctttgtgactctgtttggcttagcgccaaacactatgacttcaaggttttttgtaacagtgttctccatagttctttgttttcctctctaagttcaggtttctttggttaaagtataaagacaatatctattttgcattcattccaacctcataaaaaccaaatgtacggtttcaatagtcttttatgtcttgaggatcatacaattaacataatataaaatcaaaaaccaaaaggaccagttgggtttaaaggcaaaaatcacttacaatctaggcaatatgttaccggcgtgttgcacaagttcatacagatcaataacagaacaacctcttcgagcctcctccttaaaaaacatctccaatttcctcaattcatcaaatgctcgcatatctttaacacaaaacaaaaacgaagaaacagattcaattctcatccccacataattttccctcaaaattggcaacaaaaaactacaaattaattcaaattcacaaaacaggaaaccagatcgtcgatctaaacactcacagagctcataatacttatgaggagaaagcttcgaagttcgaagctcagaaagcatctgagcagaatattttaatgcatctcggagattattcgaatcctaaacacaaaacaaaacattacagaacaaatcagaacacaattatgctcttcgccaatcgaaaactagggtttctccatgaaaattctcgagaaatcaaataaatagatgcgattgattagaggttttaccagagcacgatg

SEQ ID NO: 107228 - DNA, 1798 bp, Cannabis sativa
cttctaggcagtataaaatgaaaattacaagtcaaaaacatactgggtccttgcctcgaagaaatagcgacggggtgaggctgatgcaacatccatagttaactcaacaaaagattttaacttgataggatccactgtggcatgatcatcattgcaagtctttgtatccacaggataaacctaaaatttatatattgatagtgttcaagatacaatattgctcatcacattcatacataaaaaactattgcaactatatgaagaaaacattgaagattgatgaaacaactaaacccttgccttctatctcctacgtggtaattaacactggctatgttttttctttttgaatcttattcttactagaataattttacattaaaatgattattacttctcattagtctttatttttgctaatttgaggttcttttctatttagatttattttatttcactcaactctaatgctttaatgaatctccagcagcaaccattttgtaaagttcaagaagcacaacacttgtgatggcaaagtagctttatccatggttaaccaatatctacttacagtgattattgcttcaggatccaaattacaacgctgcatgaaagcttctagtgaagcaggatcctggccagggagaacctcaaggctgtcaccaatatcatactctatgacctgttattaaaaaaatatgaagagaactttctaaggataaaagtaaaaaaaaaacatgataattttgatacagcggaggaattaaatagataaatggagatctagagggcatgtagacactagtcaaacaaagtacaaaacttacagatgaaacaaattcaaattcaaagtggcggacatctcttccacaaccttctttggtcaatggttgatttttcacctacaagagcaagtgaaaagaactataagctacaaatggatgagagagagaatgagtttgcagaaaggtccaacaacaatcaacttgcttttcagctaatcaccagcattttgatttcctagcataagatgtttaagggttttgtcaacttccacagagattacaatcacctatgccaagagttgctttacaatcacctattcttttaagtttgttttttgtaccatctgtaacgggcttcaattttttttaaaaaaaaaggagaaagagaacacttgtcttagattggtccctcctccgttatgtatagcaaacctcacttgtggcggaggacccaaatattcatgagataatgaaaccgtcaattaccaagataatgacaccaaacattatttcaaacataatagagaaagcttgagtaccaatttaagaaagcagtctggcctatctttgtgacgtgagaattttctaggggccattctccgagttgtctcaatttgcatttctttatgtttcaattctgaagctattgcaaaacaaatattaaatgtcaatctttattggagtatagtgtcccacatagggacaaaggcagaaatacatagtgaggggggccaatatgcaaaaacaaaatttgaggggggcaataaataattttttagaaaataagaaaaaattacaaaaacatagttaaaaaaggaagaaaaaatatttgggggggaggaggctccccataaacttcaaatagctttgtccctggtcccacatggaacaagtataagaatattaagtcatttataagaacatatgtaactccactcataaccaattagttttgatatgaaacttcgtgattcttgacatgggcccatatttggctaagcttctacttttgc

SEQ ID NO: 107229 - DNA, 3476 bp, Cannabis sativa
ttacagttttctaacttgttggcaatgaaaaataaggaatatttaactgtaattagctttaccattttgtattatctcagttatactgttttatgatatatatatttatattgatatattgattcgtcctcgttcattgaaatttttcattacataaaacaagttcattattttatgtaatttgcttattttaataagtaacttcatatttttcagaagttatcgtcgaaaatatgtgaacttgtacaagactaagctgaattctattcaacaagatcaggtattttattttttcgtaatttttttaatggattttccaactgttttctgatgacctgaagtggagtaatttcattgattttctgctcaaagtatttgagaatgttcctagcttgattaattcatttctttcttctccttttaaactggttctgtgtgttgccttaagatgtttggacaattttattacttttgagtttatatttgtggcggctgcagcattatctttcttgttagagaatattttatgcataaaagttgataaaatgatccaaattttgtgaaaaaaattgtatgtgtgtcattagggaaattgggtagctttttaaatttttaactcttaagaattttaatgcttgatcttgttctggacctagttattcttttcatataggttcataaccaagatttttaaaatggttgtgattttaatacactttgtatgcatttttttattagtattttaaaatggaaaacctcaaacttgtatgaacaatagaaatacaaggaaatatgggagaaaagaaaattttgggtagcaacttggatttttaagttaaaatattttgaggatttgtctagatttatgcagggattggggtaatatactgtatagttagatttatcctttgctggagttctttcaatcctgatgtagatattttgttttatatcaaaatatctctgttagcacggttttcctccaccacaagagaagtttatgaataaacttgagaggggatcagtctaaggtaggtgacctttgtctcttttttcaaaaagaaaaaaaaaagatatacaagggaaagtgagtgaaagaaacctactaaacagaaaccaattttaacatcagaagccaaaaaattacataaagttctgccaatgtcaaatatatgggaaaatatttttcttaaactcttcaacattttataaacatatgactgccctatttagtgaagtaatgtgaaatttacttagaagtcttaccatatttatcaaagaaagaataaaggggtgcaaggatttttttgtttttacttttaacttctttgtaatgggttaatttttttttggaaaaagagacaggccattgtcttagactggcccctacccgttttatattgaaagccctcacttgtggcggaggaaaaccgtggatacatgagttttagcacaaaacatactaaaacaagctcaaaaacaagacaggacgcaaagtaaagagtacttgtttgtccaaatgaaaaattacatcaaaattctccattctctacttaaatctaagaatgcttagtcgagctttctgctctgttttcattctcttgcggttggaggactcttttcttccttaagatttatttctctcttccttcttattaatttttccatattacatttatgttttcttcctttttatcaggcaattgatgaaaaggttcttggggagttggagcaaatcgagaaagaattagacatcgatgatattttaagttataggtcttctgctgaatgcaagcttcaggtatgtggcattacttgacgggctgagtattcaaatgcaattgcttgtgtatcagttcaatatttctgccaacgaaattgtgaaatccctacaggaacttttgtccaattcttcagctttcaataaaagtgtgaacagtagcagtgccctgtctgatagggcaaggaatgatgagcatttgactggcagatcccgtgggtggctgaactggctctcccttgggatgcttggtgctggaggaacagatgactctagtcaattttctggtgttgtttctgatgaagtcatacaggtgctctacttcagtctagttacccttctaaaaagagtgtctttaaaaaaatactatcttgctacatatgtgtatgtataggtgaaccaaaatattgtcttcttgaataggacatatacgaggcaacagagtttgttccttcaaatacacctggtcctgatgctgccacagatgatcagatctatttctgtgcaataaaattatgcattaatcacatttcagcaatgctgtgtagcatgtatgactcctcttctttgctctttttccaactaataattgttgtttgtcaattatttaattcactagaattgtgtaatttaatacgagtgattgcatttattatgacaagggccagggcattttgcttttttctttagcttcagtagctcattcatgataaccagttacttgtttttttatgattattgtttaattttttcagaaaatgcggcaaagaaattgctcagttggttttaagtggattaattattgagtgtaaactttgggagaactctgcaaccattgtcactattatcaattctggggagatgttttgtccatctaacaagaaagtacttgtgcatatgaaaacggtctctttctctctgtcattctctggttgtcattattgtgttggttagattcttaatgattcttttgtttgtttcattgccttgtgttattagaaaagctcacgttccttaaaaggtttggttggttttgaagttgttggtttgaggaaatttttagtgaagcctgccttgccgtgaacagaaacttgtgcctatattgcttctttggtgctgttattgtgtagttttgtttttcctttgtagctttatatgtgacgatttcttttcttagacaaatattgcttaaataggataacatcttatactaaattgatttattagttttaactttaaggatatggattttgattgatttcaatttcttttcaggctgctaataagaataacttagaggagtttgatcatccttccttaaagtttcaagtggatacttcctcaaaccatgaggttgggctttcggtaaaggtattcttctctcattttgaaaacaattataattaatgaagtaatgtattcgaaagttgaaaatatcataaaaagtttcacaattataggagattaatagaaatcagttaattatttaaaaatggaccatctgttggttagatgattcaagatatttagctatatcatatgcaaagcatctccaatggagagctataaatgtggtgtattgccattttttaagaacattttactaaaacttaactccgttggtgatggaaaatgtgtgacaaatatataatggggaagatcctgtctaagacaagaggatctcttctctttttca

SEQ ID NO: 107230 - DNA, 3334 bp, Cannabis sativa
gtttagggctcggtgtcagggtcggggtctagagttagggtctggggtcggggttcaaggtccaagaccaggtccgtagtctaggtctagggccaaggtccgaggctagggctaggtccaagtccagggtctgggtccaagaccgagtctggagtcgtctagtgccgaaacttaggtttgtggccgaggtccgaggccaaggctaagtctagatccaaggtttgggtctggatccaggttcggggtttgtgtctagttctaagtctgggtccatggttgggcccgtgtccaagtccccaatcctgaaccttttctcaacattattatacaagctaatacaaatcatttgtaatgtcttaaataacacgattcgcattatattaaaatttatgatcgtagtaattaatataatacaaaatttgttatttaatgcaatatgactcttattaagcctaccaaacatatagctattcagataaacacattcttagcatattatgtagatattttgaggtttggtataaaattactcttcttgtctcccactctctctccatttcttgatgtaattgaatgacaccagaaagcaagactgagattgaaaggtcaaatattgtatctgtttaatgcactcattcattcatcaaacttgtaagagaagcactaaagataaggaagaaaagagtcccgcattaaacagaatgggcaagtcctaccaaatgtaaatgcaagagaaacactacaaacattaacttcgaaaatttccatggtcaatgagaattatttgtagctagaaactcaaagctattataggcgaactacttgacatttcccaggatcaatataatagagacatgaatttgctatcatgctagagaacaaatacaaagggaattccctttagagtcatatattgccggatcaaggagacgtataaatgaatcaaaaagtaatgtcttagtcctaagaagaaaaataacggaaaacaaaaaaagcagttaactcatctcttttgtgcttttctacgcctagattgtgccttctgccatttccttcttgaaaccagtttgctttttggtttcagttttaattcaggtgagaacttgtaattgggatctctcattcgtgcttgaatatccttgaaaaactgcaaattcaatctcttaggccctccctgtctaagctctgcatactctggtccagagactatattttcaaatgcacctattagaatatctaaatcactcatgacctcccacacattggtgtaacgcccatctggccctttcttcaattttttcaatgcattctctactgcaagttttctagcttgcttcccaggtgacagctcctctggttcctgctcagccttcaatagttcagatattgttcgatactttgatgtttcctcaaactcaaacagtttatcaacatatttatcactagcttcatttgggtatgcttctgtgggaatatcatcatcgtcatctccttcagtccctgtccacagagtcttctcctcatcactcccagaccaaacgctttttaactcatcactatcatcagcatcaattaagtgagagtgctcctttgcctgttgccttaccttcctgatctcttcttctagattgtcttttccacattcctgatcactttcatcttcacttcctgtccataaagaagtctcctcgtccatctccttcttccatgtttttctaaaatcctcatcccctagtttgctcttgccaaagagatcataatggtcacgtccaccacgagcatatgatcgtgatgctgcaaaggcaatgtatgctttaagtgttgaacgatatttataaaaggagaagaaagaaaaaacttatgccacactaaagctcaaaaaccctttacattcttagaaaaactcttacaagctgaaactatggaaaagaagactagccaaaaatattccattacttcatatattattgggaaattggtaactagaactgaggttaggttaaattatattcacataattcttgtattgattctttttctttcatgttcctttggtcctaatgaacaattcaatgaacatccggtaattgcctactctctttcctttctatatccctaaacttagagccaggttcaagcgaagaatgaatcagtttcaagcagtcaactttttattattcaaggattacatacaaacagttggtgagcatcagatattagtataaaacacagctaactacatatattaatccctgataattttttataaacacataaaaaaaaaaacataaagagaggaaggggaggaaagctcaccttgaaaatataaagagagttgactagttgaagtacttgcagttgaaccaaacatagtttctaacctggaaacgataagacacgaactttacacagaagaagaagaaagacttctgcaaagagaagtgggacccaaattctgaagaatactgtagataaagattttgaccttgaagggtttctcagtctgccaaaaacttgtgcaagggaaaggcagctatacatacacagcctcctggccattaaagctaccaaaatttgatcccttccactgcacctatatctgttaagagagttacaatcaactccaccttcggtccctttgaactttgatcaaaaaagtagtggagaccacacaactggcgggaagccagatggaaatcaagcacatctcttccactttgcctaagatactttctaaaaattggataattaaggtcacatcaatattatatataaccgcctcacactccttgagaatcatgctcttgttcaatttagaatataaaactatctatcttattagtttttttattttaccaaagtataggatactgcaattataattacagaaaagacatgcattttttttttactcttaatatccaaaaaggaacatacttccagtgagattataagataatgtgatcaaaatcagaaagtgctatagctaaattgatttattctcaaaaacttgacttatgagcaaaattcatgaacagtcacacaaatttaaaacaaacttacaaaatgtaaagcattaacaacatagaacataattattaattacccataaagcatctttgattgctattcaactatataaataaattgtttacacaatcattttatcaaacagtatatatgcaatgcaactacccaatatcatatttaccaaaagagggcgatgatagagagagaagtgggtttacctggagtggcattggcatcagcgtgggtgtgagtttggagtgcggtggcggagtagggaaggtttcatagaggcatcagtacatct

SEQ ID NO: 107231 - DNA, 3607 bp, Cannabis sativa
tccacaattaaattaattcacaattaataataaaataattaaaattagtgctaattgcctttttttttaatccatattactagagcggtcattacaatgagagctgtcctggttgaaattttgtagcaacttcgtgcacttctttgatctcctctgattgtcccaatgattttggtatcacttgggaagtttaggcacaaatggcagatggatgttactactccaaaatccatcaaaaatggtcttcccagaatggtgttgtaagcggtagggcaatcacctactacgattgtgctgtacttggatgatgacattgtattgcttctgggaacttccccatttattgtcatcagaatgtctatttttcccatggtgatcagcgtgtctccactaaagcctcacagttgaatctgacatggtaacaggttgacttccaccagatcaatggctttaaaggctcctttgaaaatgatattcatagagctagatatgatctagatatgattgaattctaattactctctttccatatttagctagatatgatcttccattcgagatacctgggagttgattgctgatattgtacggatttagtaattaatggaaaactatactggatatctggatcctcattaattacttcttctagaaatactatttaatatcttttggatatacaccatgctggatgggttcctgccaagacgggttatttattcttcatccggaaggactaactgcttacggttttggccaagttatttcatttgggcccactttggatctagagtatttaaattatattttttgtaagaattccatgtgtccctatccgaaaatacggataaaaaggtttaatttaacttttttttactatattatttttactaaaatttcgccaacataacaactataaaatcccaaaatttttaaaatctaaaaataacaagaaataataaaataataataataaataaaacagatgaattatcatttaaatcaacacccatccaactgcaatacatatttagtcacagaacctacttctctatggtgaatatttaagatattcaaactcatctataactagcataaatatatcaattaatgacatttatataatactataatatgtaaataaaaaaattaataaatactaatcttcgaacgcaaaatagaaaaaaaaatatcgacagacaacgaaaagagtgagagcgagcagcggtgccaaatcacaataggcggtgatctcaccatactttaattaaaaattacaaatatataacaatattatatatacaatcacatgatatatatatacacatatatattattacacatacacatatacattaatacacatacacatacacgtatatattaatacatatatatatacacatatatacataactttatatattttcataaatatacttatttatacacatatatataaatttaaagtaaaaaaattgtaaaaagtaaaataattaatataaatatatatatacatatttaaccacacatatatacaaaaaattaattatacccatataaaaatataaacaagtaaatattttaaaaaataaattaaaattaaaaattaccttgactaagagagggggaggcagcagtcgaaaaggctcgagcaacaatggtggctggaggcaatctctttcaattgtttcttttatagagagagaagataggagagagagtgagagaattagagagagtgagagttagagacagagagagaaagagagtgagaatcgaagagagatggagagataaaaaaatcagagaaaataaggaagaatattcatcatctttgttttactcaaaatattttaaccgcacaattcgttgcgctggtaaaagatcataaaagcgtcggtacaaaataacaaaactatcgaaaatgaaatgcattgtttcaattactcttttaccgacgaaatatatgttggtaaaagttttcactctcatcgaaaagtcagacaggaatttttccacctactttttaatttgttggctttttccagcacatatttgtgccagtcaaagattaattgtcccaacaaagaatattcgcacgtgggaatttctccaccaaattatgggacctttactcgatggaaatatacgtcgataaaggtatacaaatcattaaaaattgtttgtgccaaaatgcagttagatttctcaattttacaagtgcaatacatgaattgtggtgatataggttacttttaccgaagcaattgtgcatccataaaagtgttacccaaataagttggctcttcctgcattcacccctttttttcgaaaactaatgccaatacatttggcaaaatgcacctccaaaagtcatctttcttgtagtgagtatctgaactaggaaaactcaaaacactcaccaactagaaaagctctgcctcaaccattcctttcttgggttcactacaaatggtttctctaggaaaactttccctttaaattaggggtgtttattgaatcaaattcaatattttttagtttattgagattcgatcaaattaatttcagttatctgagctgattcattggatataagatcaattttgtttattaaatgtatttcacatatatatatttattgaatagattcaaatttatctaatattatagactcaatctttgttggatcgattccaactcatgtagtattttagatctagtatatattggattggattcatccaatctaaaaaatatatatatatatatataagtaaaattctaattttaattttcatttgtaatattttacgtaaaacaacataaaatttaatttttcatttaaattaaataaaaatacaaatcacattaattagctagttttggagagctcatccaatatctaaattgatttaaataaatattcaaaaattatttaattaatctgatccaattataattaaatatctattatttaacagttagtttgttagtttgttgtgattagattgaattaatttatgcatatacctacaaatattaatgaatgaaatgatagtatggtgtctcatgcttggtcccctcctccagaaaattggatcaaaatcaactgtgatgttaaggttggtagcgagtccatatgcgtggaggcgctgggtaaggatcacgcggggacaggtttatgggtagcagctgacatgctcaacttcacggatctactgattggcgaagctgcgacatgtcgattagcattagaatcaattttcaataaagcaccattttgttttgattgagagtgattcagagaaagttatcaaagcgctgaaaggaatccagatcagttggaacattgataattataatatttttaatcaactctctaattattttttagggaaatttacaaaaatactgtaatatgggttaacttttacaaaaatactgtcacacggaaaagttttcaaaaatactgtgtttttataaaacactagtaaacacacaaaacataacaactcaaaacagcagtagaagaactacaaaacaccattagaacaccagtgaaaacttaacaaagtatactgcagtatgaaatttataaaaa

SEQ ID NO: 107232 - DNA, 3952 bp, Cannabis sativa
tttcaattgttaccttcaaactttgtgtcattcccgttaatggcttcccgtgatgtaagtagtagtgagtaacatcatacataacatatcctaataaaatccctccgaacaatgctggagcaactgatggtgatgatgaaagtctaacaatggtccaaaactagagggaaaaaatcaggactaaatcagaagcagataatgcaaatcatatacaagacagctaagataactcttaaaaattaaaaatacaagaagtgtacacaaatatacacttatgaagtgtgacaatataagctgatttcagaaattaaatctttaattcaaactagggaaacaaagtatgctatgtagcatacaaaatatgtagtttcttctgaaattaaaagaagataaagcaagtgaaacttaaatcggtgttagcaacccaatgatgagaaaatgataattggattagtacaaagaacatactggcacacatagaatagctgctgccacaggagggaatacaagtcgcaatccatccatggggtgcttgtgatggcaaccatgaagaagataatgaaaagtgtttcccctgcaaaaagttataaaatggataagacttctattggagaaggaaagatatagaagtaaccaataacattaatgtttccatatgaaaaggagaggaagctaaccagtagcttgttgtttttatgtggaaaagaaatcggtgcaaactatactccatcaatgtccaaaggaaaattccaacaaccactttttgagctgccagaggaagagtaaggcccatttgaagagacgtggtgacaagccagcacacaaccggcagccaaataagtggaatcacccaccatgctgttttggtgaggagctgtttcaagtaaacaaggcaaaagaaattattacaaagaaagaaaaagaaaactcaaattgcatatacattggaaagatatcaaaaacacgactttactaagtttcaatgcattttttaaaagaaaattcaatataacaaagttactccttgtgtaatcttttcaaatgttttaaaaagacttcctcacatgcaaacatataaactggtatgtcaaaaattgggtccttaaagtttatctcaatataatcctactgtcttcaagaaactattctcggtatttttttttattgttagacacagttcataagtgtactgggtcaaacgaatatgaaaagagcatgaataatacctcgcaaaagtcattcccgaaaaatctggggccttccttgctcactataggctgatgaacccattgatcgtaagcttctccaagatgaccaacctgtgaaaccagttatgagaaaggacaagttaactagggaattttacacattttcaaaatattgtagcaaagcaattatgacatagggaaagaaaagggtctatctctgttgccaggcacccgagtgaatataaagcatatacatgcggatatgagaaagaggacctttgtaaactatgaagcaatgtataaagaacaaaattacaggacactagacaataagtccatagtatagaaaatagaaatgagaactgacctgaaagactaaaggcttattcaaatccacagtgaacggtttattcaccatattgatgacttgatacctacttataacacaaatatcgaaagaggaaagaaaacagtaaaatataacagatgtgcaagatttcttctcataaatgcaaataatatataaaggaagcttcaaacatactgagaagaatagatcgaaagttgaaacagtttttcattctatgtttgaaataaatatatccaaattttgatggtattcaattgtttaacaagaagagcgtcatgtaaacaaaatgaggattggaaatattgtaagattctaattagccttctttatatcattgatggaaatatagaaagaccagctatggacctagggtcattaatattagtgatcaaaccacttgaggctacctgaagtagtttaggggatgattgtgtgtgtgtgaatggtgggagttctggttcccttatctttttttctttttccttttcactaggaacctcaagggtctttccaatttgattgtcttaacctgtttctcacaccatcatcatgaggacaagattaaaagagtcattgtctaagcgaataataaatttgaatactgaacccagttgatctatgctattctcttccttttgaaaatcagatagcttaatcaatttctcgttccaaaaattctcaaaaaaggtaaaaagtatatcctgtcggatactcatgatcttgcttctcacattgtaggaattaattaccaaataaataactgcataatgtcaaagaaacatagattgcacaaccaaaaaaaaatgtccacacgactccagcacctatttggaagtagtttagctaaaggggcaagcaagtgaaccacaaaaatcatgtttaggtatcaaaattatagaccaatcatcagcattggtgttttatgtatgctcaaaaccaaaacatacataactggttttctacattgaagctcataaaaggtaaattgatgttaatccactctcatctcatatttcaaaatcagcctagtgaaagatttggttaaaggaagcagtacaattgtatcaacaaccctgactaacttgagacattgaatcgataatcaattaaaaaaaaaaagagaaaattatagtcactactcaacacatcatttttgtttatcaaagttgtgaattgtctaaatgaagaactttgacagaaaaaaaaaagaaaattggaaaatcgaagaaactgtcataataagcacaagcacaatgtgagatgaaattgacaaaattgtgagattcccccccaccccagatttatacattgatctgtaatatagcattgttgtttattctaaatgaagagcagattgtgagattttgtcttttaacaagattcgacattcataatcgaagtctaaatgaacaacacaaagagcacattgaatgagggtggtcaagtttcagaaaacacataagagaggaatggcgaaaatggaagattttgaagcatctgagaataaagagaccaacctttgtggttttggtgaagaatgcggttgaatgagcgagctccttccttatgggtggagattggaggagttgggattgtgggaaagtgaatatatcccaccaatgaagctttaacaggaaaacaaaccaaaaattgtttgatatttatttatttatttatatatttcgaaattacagcttggcctcacgttgtctttctcagtttttatctctctctctctctctctcacgcacaatatctactacttttcttttttcttaaggaaaagtaagaaaattattgacttgaagaaaaaaaaaataaaaaatatctgtcatagctaaaatatgacatattttacaaaatattttttttaataaaaagttattaaatactattcatatttattatattaaattatttgggatttaatatttaattgtattaatagtaatattgagtattagatacgggtctcttttagtattttttttctttaataacagctaaatttagcacattaaaagttagaacctctcattctttaccctataattataagtctacacattctttaaggtttcttacaatactaggcttacatccacctaaaattctaaatattcttatttgaacttagaattataaggtgctcgagtcaaagaaccttatagttagttcatacttatgtttgctgcacattcacgttcgagatggttatgagtattatctaaagatgtggttaattatgtctatttgcagagtttattattagaaatttttatattaaaaatacaaaataatttttttattacatatatactcctacacggtagtagttacttttgtacactttaagtttttttatttacaattt

SEQ ID NO: 107233 - DNA, 4472 bp, Cannabis sativa
agctggctagccaagaagtgacttccggaccaagggagctttcgttcaaccaagggaacctgacctcttcaaggaaacaatgtacagagctgtcttttcaacttgcaaaaggctggtctccacactcaaaggctgacctcctcttggtggagctacagtgacctgttaggtcctggcaggaccatggtcggccaggattgacctggaaggatcatggccggccagacttcccttgtaggcctatggacgactaagattgacctggtaggactccatgcacaactctacacgtggatacaagcatgggctgcgaattgggccctaaaagcccaatagactggctgaagaatatctagaattaagggcattttggtcttttgtaaatacctagctaactatcctattttcaagggatttgaattgtaaacctagggtttaggcctcctatataaaggccttaacctctagcttaaaacctaatttctgtaggttgcctctaagttacttagcctccatatagctctgagtctctctctctctctctctctctctctctctctcttgtacacacccatttgggctcttcatctctctcacacgcctactctaggctggccgacaccctaggctggccaaccccctaggctgtcaacacttgagatctgcctactgattcatattttctaatcttaagggtgctatagcagatctcacctatagtgatctggatagtattttccttggtataaatacaactaaaaggggagtaggtcattactcgctaccacaagggggccgaacctctataacaaatctctgtgtttattgttttttcaatctatttgtttgacacgtggccaacatcagatctatacgacccaactgtcagttgatcgttttttgaggtcaacaatattcactcgaaaactcgcacgaaacttgatcctcgagccactaaaactgtgtttattggttattcttctactcataaaggtttcagtgtttttgtcccctcacaaagaaaatctatctcacgagatgccacattctttgaaaacactccatatttcactcccacctcgctttacggggagaatgataattaagaagttctgtggtataaccacctctcttgtcattaaagagctgactaaccaccaacttcctttctaattctctggagaggttatgaaagatggtgctcaagaggtgtggctgttttgagtgaggaataatgccatcctccaattcctgggttgagctttggaacgcatgtactcctaagtttttgttgaaagaatctctcttttggataaggattcttttgtttaaaactgggattaattgcagggtataggtctttccattctatatcccctcgactgcaagtagcagctgtaacagtggttttctccttgtatttcaatttcgggattggcttcatcgaatcttttacaatactgacccaagactttgattctactggccttttatttctgaatttggtcgccttctcttgatattctgactcgtatcccttctcaaaacaccatttaaactttttgcgaactcattccatcccctgacatttcttttctctggtatgatgaccatatactattgtttttaagaaccaataacttgatgaacacccttctcctatttttgaaactctccaaaaagttgtttgaactgttgcaaaaagtcctcttgaagttcccctctaacttccttttttttttttccaattcctccatagttttgattgtccatgttgcagcatccaatggcttcgctatctcgaaacccgacaacctagttctttcgcatattctgatggagcctccatcattcgataagataagcatgaaagctttatgagtagttctaaaacttcagtatctatggaatcctgcttcccaaaagaaactggataattttgtaggccaaactagtggggttatgaccccttttcttcccaaagccaatgggggtttggtgcctaccatggctggaagggccacgataatcccccataacgtgcatgaaaaaactcaaaagtaggagagagaagaaagcacaattagttatttagctgagctttttaagtgggtatgtgtcatctggaagtcattagtgatgttcttagcaaggtctattaaattcgactttgagagagtagtagacaagttgggtacatggggcccacttgcggtgaatttgactgccggactttggggttttgcaaatcggcgactgggcaatccgtctatgtgggcagtgagaataaactcacactccaattggggtttctgaaaaagggaccctacactcgaactctaatttttttttatgaatcttattgtagaatttcgaatcacaattttaagtattgctctgataccatataaagaacggtgaatagaattgtgtatattattcatgtaaatgtcttatatttatacaacttaagaaaaactaaaataggaaagtataagagaaaatatgaaacgaaataattacaattgatcctatcttctaactaatttaccattaatattctaacatctatagatcttattgtgatactaaaaatgaagatcatactaaaataaatattattcttcctttcatactccagaactttgcatactagaagttaagatcatattgagttaatacaaatatatgtcatgactatttatcctaatatttcttacttggactaacttagcttttttattgttcattacttagaacttcatgtgaagatatatgctcattagttatatttctatcttttgcagattggtgacagatttatacgtcgtaggttcgtgcaaaagttttatgacagagcgcttaccattggccttcaaggctacgcaaaattgtacgtgcattttcctttgcaatttagtggatagacaatggagtcttattattataatgaataaaaaattatttttcttcctgaactctatcacttatatgattgtgccccctgtaatattagcgttgtcaaaaatcccttaaattttatcagatagtaaaaattaagattttgttaaagaataaaactattttggctcctaaactttgtcatttatatgattgtggcccttgtaatagtagtattgttaaaaatgttcctttaactttatcaattagtaaaagttaaggtgtatgttaaacttttgtaattgattatacgatttaaaaataaaagagctattaaattttacaaagaaattttataaaaaatacaatgaaactaatttataatgaaaaccccattttaatgtgaaaattatatttgtaaactaaactttctaaaaaaaaaaaacttaaaactaatttgattaccaaagaaaaaaagttgaaacatagaatatattaaagattaaatcaaaataaaattttgtaaagtttatttttattttagtttgcttaggtagaaaattaaattagacaatataatgccacatcaataagataactaagaaaattaacagaatagcataatactaatttttgataactgtctaaagtttaaggagtatatttaatatccatataagtacattggcttgattttttagttaacaaagttcatgattttttaaacaaaactgacttggtgttagaatattaactgtatattagttgtaaaaattagggtaactgtgtttaatagtttcctatttgtatttagtagtttcccatttagtcttctagctttgtatataaatatatactattcaatggaatataatacacaattctattcaccattctgtacatggtattagagccatacttagaatgataattgtaattcgaaattagggttcataaacaaacaaaaaaaagagattagggttgtttttcggaaaccctatttggagtgaaagtttattctcaccgcccacatagaaggaatgcccagttaccgaactacaaaaccccaaattctggcatctagattcaccgcgcgtgggcgccgccatttttcgatgtccagattcccacgcgccgacgcgtgagggcgcgtccgacatcttcttcggtgacagtcaacacccgtcacactctcggtcgttcctcgtcctccttgcatcggtctccagcggttcttggtagtttgtggtttgatacttttgccttattcgtgtttgggtgttcattcttttgtgtttgctttcttttttctttcaattgtttttgatttcgagattatggcagagataaaatcagattcgaaatcaatcgttgtttctgatgtggttcccgtgatgtctaaaatcacggaccataaattgattgattcaaattatttggaatggagtaagacgattcaactgtatttgaggagtattgacaaagaagatcacttgactgatgatccttccaaagaaaaagacgattaaaggaaaatatggctccatgaggatgctcgcttgttccttcaa

SEQ ID NO: 107234 - DNA, 5345 bp, Cannabis sativa
tccaaactattacaaattatttgttatgtagttaatgctgttgtgcatttcaattgatcaaaactcactactcaattgaaaaaatgggccacatggccatattattgtgatagacaaccagtagaatcaacaagttttgtaaactatcgatcaattaacataagccatgcggccaagctattgtaaacgactagtggaatcaacaagttttgtagattatcgatcacttaaggctcgtggccatgttattatgaacaactagcaaattcaagcaatataattgaaatgtaatgcctcgtgattgtttagacagttcgtagtcaagtgatgatgtagtcttattttggtcagattattgatgagtgtcaatctttgttgttggagttagaaacttgttctttaattttgttaagcattctgctaataaagcggcaaactttcttgctcaagcctcgatcgtacattgagtgagctgtttatttgccctaattttaaagatgtttctatcatatcgtttaatgcaatttccttttccattcaaaaccatatggtgaaagtttagccccactaactttgtattgtcgtttcttttgattattgtcgtttgtctactaattgttgaatattgtcgtttttatttaatagttgtcgtttatgtgtaatagttgtcgttcttgctaataattgtcgttttctcctaatgtgtcattcaactaattttctatcacctttattgaacattgtcgtttttctaatagttgtcgcttttgctaataattgtcgttttcgcctaatgtgtcattcaaccaattttctggcacctttatttaacattgtcgtttttacctaattgtatcaatcaactaatattccgtccccattattgaacattgtcgtttgttttaataattgtcgtttttgcctaattgtgtcattcaactaatttctgtcaccgttgaacattgtcgttttttctaattgttgtcgttctccctaataattgtcgtttattaaaaaataatattatgtaataataaatcaaataaagatgacctggtaaacaatttagactaaactattaaaatactagtatataagtttaaaaaaaaaagtgaaaaattagtgtgaagaataatacgattacattatattatactaattaaaatacattaagaatgttcaaatattccttcaaaaaaacaaaaaaaatccaagtaaatatctggattatgatgtaaattctcatttacctaacaagtcaaaattttcttctcttcatcttctatttcttctactgcataaatatatatacaataataaatataaaattaaagaaacatttattcattgatgtttttttttctaaaaaaaaatatatacaaataaataagaacaactgcgtacctggagaagtggtgtttaatctcaggcctatataagtaatgatgctagaaattaccctgttatcaaataaataaataatcaactcaaatatcaaaaattaatttttcttcaaataaatattatgaacctttatattgtataactttatattgaactatatcttatgtaatatttttatgttaaactgtgtatactcaacttttattattatatatataaacacataatattttaaaattataagatacaaatgaaaaccaaagtcatgttttttaaaattactataatagttaataatgttatctacttctattgaatttcagcaaatctatattctatacagactaaaatgaatatttaaagaaactaaataatgtaaaataattaacatctcagtttcaataatctctaacctggtatggaagtagattgggttgatttcttgtgatgatttcgttccttcttgtacctcaactgaatcggatcaaacccgccttcctgtgctccataaacagcccaagacggtgtgagagccatataatccttactatcgaaaggttttccagatgcaaccaagtcatggaatttttcatagtctatccatgtgtaccattgcccatcaatcttaaacttgtcggttttcgcaaggaggacacagcacgagtggacatgctcgcaagcaacctcgtaatcccctccgcttttcaatgccaaagcctccgaaaaggctttaacatcagcatgccaaggcacattctccattgtcaactttgacgtagaggatgttccgcaatatgtaacacctttgatttcgataaaatcgggtttaccaatgctaaagaggttaaaatatgcatctatatcctctgtattccatcctttcacaagggttaaacggtaaactgttctttgatgtttgtccctcaaagctgtcaatgaatcaataaatctctcccaaaaatccccgaagaggggtctatcgattgccttcaaactatcctttgttgcagcatcaacactaacatataactgagtaataggctttaaatctttaatcttttcggggaactgagcatttgttactaagaaagttgaaatccgacgacgatgcaactcatcgataagtgtgttgatttcaggatacattataggttcaccgacaagcgataaggcacaatgcctaggagacataccttcagtcagccgttcgagtgtaacaccgggaactcctttcatttgcttaatcatctttaagtgttgttcgatagccgagttcacaatttgtaagggatcatccatgttccattgccaactctttccaactgggtttgtatgatgtctccagcaaaacacacatttatttgcacaagctaagctaggtgtcgcttccatgcacctaaaacaaaacaaaacaaaattaaaattttctcacccattttccatgtatggactacttgggatgttatttctactcaaacaatatactaaactcatcaagtttgggaccaattatacaatttagttgacttttgactggggactctaagtcttaggtggtcctctttataagaagctcatctatcttttctgtccctagatcttggctaagttgagaaattatctaatgatattttgatataagacctaattttgattctaaaagactcataattggacgttagaccgaaagaaatatttccacatacctgaaatgatggcttaccattaatatatattaattgaaatagaatttttaaccccccacacttatataggattttgctctctaaattattattttataaaaaatacccctcaaactatgaaaaaatgcaaatttcccctttgattacatttcgttcctcttttgagataatatattgatatagcaactgtgacaaaggaaaataagctgagcaatctcacatcacctagaaaaagttaagtatgatgattctttgcaggtatgagacaggtacacgcccgaaaacactcttgttagggaaatgtctaatggaggcttgaagcgggaacaagccatacctatgattatatgaaaagaacctatatttaactaacttaaactagttagaatcaagttaatgactttaaacattcaaacattaaccctaaaattagagatacacagtcctaaatttatagttatagtactacctatgcaattatctatttgcctagactcttgaactgaaaatgaataaatatgcaattgcttccatagttcaagataaattctttaaaaacaataataatttaagaggccaaatgtttgttcttaataatttcagtaaagaagataactatgcaatttcaaaaattaacaacaaattatagcttaaacttactactaagaattgattagtgcttacctatgactttcaataccatagaatgaatgcttgtaacaaccacctcttcctctaagctgtgattttgtccatctacagatcttcacaccactatgtgaaccaataatcttgtaaccctgtttctccaaactcgccctaatcactggagtaaccatattcttcttcccatttgaattcgaattattcgaaactccattactttgagctcctgttttccttgaaggtcctttaccagcaatatcctcaagatcaacaatctcagattcctcttcttcttcttcttcaacactctcatcatcactaacaaaaccaccattttcttcttcaacaacctcatcacctttcaaaaacctaacaagtttcagagaccaatcatcgaacacttcatcgacatctccttcgctatccacatcaccttccgaaaccggcaatatctcattgccgcccaatgccttcatcctcttcgacaaatccttcgctacagcattaaaagtcgaatcgtaagctcgactcccaactccaaacacagcgaactcacattgcttaagcaaaagcgatccaaccctaaaatcttctgcactctcagctaaccaatcggtaaagaatctcgaatcggtcggagcttttccttcgtcccaagttgaagcgatgatcagtaccagagtttcgttacaaagatcttccggctcgtagtccttggcgtcgacgaggtcgaaatcgaagctgtttgaggcgaggagacggagtagacgatgagctagggttttggaggtgcctgtttgggaaatgaagatgatcttgttggatttgcgagttggagaagatgaagatggagttctagggtatgggagtgatcggagtcggagagatttgtagaggaagtagaatgtggtggcggagagggcggcgagtagagttacacgcgccggagcggaagtgagggacatggcggcgttaagtaatttttgggtttcttaaaaataagcttatataaggcattttatgagagctttaggttataggaggattttttttttttttttaattagggtagaatttttatttaagaatacatttgaaattatgtaaattttattataattaaaaagaggtatactaaaaaaaattaaaacatcaaaaagtataaaatgtaacaacatggtttgccctcaaggtaacgagccaggcgtgtatctcgggcttccgaacagtcacgatgtcaaaattgtgaaaaaaatatattagtgtttagataaagtacatattatttatttagttataattactcgaaaatatataacaccgtttatggtagacactaattatgtataatgttgattgagattttcggtaactatatatttaacgtgataatgagagcttagggataattatgcaggtaatttttacgtggttcagacattaataagtcatagtccacgagtctctattatcaatgaaagtatttcttacaaagaatgtttactgcgtttttttccgatcgcctcagttattttgtaaggagtatttatagcgatctttccttccaag

SEQ ID NO: 107235 - DNA, 4186 bp, Cannabis sativa
tccatgaaacttcaggccaatcttgctgttggcaataacaaatataactcaggaaggtacattccaccacctgctcgaggaaatgccacagagagttcttcaagaaatggtgccaggagcaattctcgtagttcctatgtgtcagcccagattaatttgtcaattgtgtctcaaaagtggacacactgcggctgtatgtcactaccgctttgacaaaaattttgttcctccaaaacctgcccctccacgtgcctatcatactgaacttgaagtggacaatgagaatcaggtacataacactactgttctacccgattttggtgatgatcatctctggtttgttgatacaggtgccaatgttcatgttacaaatggctctgagtcccttgaatctcctactccctatgctggtactgaaacactctctgtaggtgatggtaagacttttctcataactcacataggttccacttccttatcttccaacaattcaccaaatttacacttaaattctgttttgcatgttcctgccatgaaaaagaatctcataagtgtctctaaattaacacatgataataatgtgtatcttgaatttcataagaattgttgttttgttaaggacaaactcactggagctgttcttctcaaaggaccaattaaggatggcctctatgttcttggtgattcaagtcaaccctcacataccctccaatgtaatcttacctcattctctcaacctacccctgctcatacttgtcatagttgctgtaatgactccactgtttcatcagtgacatcttgtaatatgccaactattaataaagaattttgttcagattactctttacaatattctccatctgtttctttcacttgtcttaatcaagacataaatctttggcatcaaaaattggggcatccttcttctgcaattttaagcagaatattaacaaatatacctcatacaggaactttaaaagacctacaattttgcattgcatgtcaaaaaggcaaaagtcacaaacaaccttattccttgtctaccagtcatgcttcccaaccccttcagttaattcatactgatttatggggtccatctcatatttcatctaaggaaggatacaaatattacattcattttatagatgatcatactaggtacacttggatttatcctttaacacttaagtctcaagcctttgatgtctttcttaagttcaaaagtatggttgaaaaacaattcaatttgcctatcaagagtgttcagtccgattggggagggatatacagaccatttgctaattttttacatgatcaaggaattcatttccaacatccttgtccacatgatcatgaacaaaatggaagagccgaaagaaaacataggcacattactgaaatcggtttggttcttcttgctcaatctggtctttcattatcatattggtggtatgcgtttcaaaatgttgttttcacaatcaatagacttcctactgctgttcttgactttaaaagtccatatgaatgtttatttggaagtaaattagattacaagattttaaaaccatttgggtgtgcttgttttccacatttgagaccttataataatcacaagcttgagtacagatcagatcagtgcatattcttgggttattcatctcgtcacaaaggctatttgtgtgagaattcacaaggaagactatatattgcaaggaatgttgtctttaatgaaggatgttttcctgcattttctactccctgctcatcacaggtacattcaacattttctaataattttccttgtgctacatatcattttcctcctgctgcttctcattctaatcttttttgtaattcctctactgctgcatctctacccgagccatcaacccaaccagcaccagcaacaacatcaaccaatattcaccccacaccagttacaatgccactctctacaaaccagcagcctataccacatccacaaccctcattttccccaacacagcagcctcccccacaccagcaatcaccaattatacccactacacccaatattcacaccacaccagatataataccttcctctatccaccagcagcctacaccacttctgcagcctacctctcaccaaacacaacaatcccttacacaccagcaaccaccaacaatacaacaacctatatcccaacccctaaaccagtcctctattgtatctggtgtacagcagcagtctactacaaatcagaatgtgatccctactgcagagccatctcatccaccaacatatgattcaagcatcatttcgcgaattcacaaaatgaagacaaggtctcaaagtgggatttacaaaccaaaagcctatctatccacaagacaaccacttgctgaatccttatttcctactgaaccaaggacagttcagcaagcccttaaggacccaaaatggtttaactcaatgcaaaaagagaatactgccttagttaaagccaaaacctggacattggtcccatatcagcctcacatgcatgttattgacaacaaatgggtgtatcggatcaaacttaatgcagatggttctctcaacacttataaatcaagattagtggccaaaggttatctacaaacacctggtattgactatgaagaaacctttagccccgtggtgaaaccggttactgttaggactgttctcaccttagcagtcacttcatcatggcctgttaagcaattggatgttagtaatgcctttttgaatgatgatttgcaagaaacggtctacatgaggcaacctagaggctttgaggatccaacaaaaccaactcatgtctgtcatttacataaagctctctacggattgaagcaagcaccaagagcttggaatgagaaactaaggcaaacacttttaaagtggggttttcgagcttcaagatccaacacttcactttttgtatatgcctccggatctgatctcataattcttctagtatatgttgatgacatactagttactggaccaaactcacagttaatttcaaaactcatcactgatctgaatgcctcctttgctttaaaagatcttggtcctatccactactttcttggtatagagatctatagagatgctgctggtatgtatctctctcaaagcaaatatgtcactgatcttcttgttcggcttcagcttgatggtgctaaaagctgcccgaatcccaccagctctactcagaaattatccctatccgatggtgaaccttttcaagatattactctctatagaagcacacttggtgctctacaatatctcaccttgacacggcctgatgttgcctttataataaataaacttagtcagtttattcatgcgccaactgttactcattgggaggcctgcaaacgtctacttcgttatctcaaaggcacaatttctcatggattacttctcagaccagcagccacaatggatatttctgcttactccgatgctgattgggccagttgtatagatgatcgaaggtccacggggggctatgtgatttttcttggaggtaatttggtttcttggtctgccaagaagcaaaacgttgttgctaggtccagtactgaaagtgaatttcaaagcctagccaacactgctgcagaaattaggtggctggtgaacttgctatctgagttgcacataaaaccagctcaaacaccagttatctgggttgataaccaaggagcagctgcacttgcagctaatcctatctttcatgctcgatctaagcacatcgaaatcgatcttcactttgtaagggatcaaattttggcaaaggagttagctatccgatatgttccagccacagatcaaatcgcagattctcttacaaaacctctctctacagatcgatttttgtatctcaaaggcaaactaaaaatggcttccaccccttttcgtttgaggggggatattaactaatgttttactggttttaactgtcctttattttctgttaacagttagttaatttcagttagtttctttaactaacttctgttttgctttgtaatctttgagtataaataaagtgcttactgctcatttttagagctaagctttcagctaattcctctctctctgttctttctttttctctgagttttactctggtttttaccatctgatttagcttgataagcttctaca

SEQ ID NO: 107236 - DNA, 3874 bp, Cannabis sativa
  modified_base (3384)..(3400): a, c, t, g, unknown or other
tacaagatcaaaccgggggattacaagttctacaccaaaatcattggattgatatttcccccagaaaaggaacacttgtgatcaatgttggagatctctcacaagtaaatgcttggacattttcaatctattcgattgagattatagactaccttctggtattttgataacagcttcgtccattgctctgttgttcgcagctaatctctaatggtaagttcaaaaatgttgagcatagagtgctggcgaactccaccagtccgagaatctctgttgcttacttatttacaacacattttgaagagtctgaaaagttttatggtcctatcaaggaattggtaacatatgaaagtccaccgttgtacaaggagaccaatttttgcacttgctctgtcacagaaggagaaagatctaaaccagtcttaaaacaaaacataaccatgggttccatttcgtaaatcaaaatgaaacggtagaaaatataataccaatgccatacatacactcttgtgccactcacgacattaaggaaataagatgaatgtaactaatacagcaaagtagctgcaccggcttattcatctagtcttttttttttttttgtgcttatttttctagtttgtcatgtacaatgccctcaatttccatcttgactttctcatttccattatttgttcaaaatcacatagcttagttgtaacaccaagcatatgtgtgaatatcagtagaaagtgaagtaagcactcaagataccaaagtgaagcagccaggattgaaaagatcaatgtgtggcataatagtaggactaatatgccaagagtggatggtgcttaaattaatcaaattgtgataaacaagaacaatttatgttttattgctagatgcaagaagaataacaatacatgtaatccaatcatacaaagattcggagtcaaaaatagaggccaaattctttttttctactaagtttaaattcaaagtataacatctaaacacaagtcatctatgactgcaaaaaagaatgagatgaaaagtatgaaccccatctcaatgaacatccgagagtcccaataagcttgagattctacaatggtacttcacatacattctccaagactattgaagttttttttttcagtcccaatcttcatcatccaactgactatccatctcatctcttggtggcctaatcaccataataactgtagctagacactcctccacacccaaatttttcaattccaatcccctcacaacctttaacccctcgccaaggcctccttcgccatcagcagcaaccaaataaactccatcatcagttgccacctcctttctctgcctattagccactaccaaaattgattcttctttgtaccacttattagttttccatggcaagactctagcatcactaaaagcgataacaatccctccttttcctaaccccactacaggctcccaagctggcaacaccacccacctcttccaccctttgtcggccacaaccacattgaactctccctcagctctacactctcctggcgcttctaagacctccttctccctctcctcagccctgcaaacgggcaacaccaccaccgagctagcctccgccacctcgccaatcttcaacctcactactggaacaagaacaggatcaccaagctcatcttttgcctctgagtttccctcagctccatgcaattcctccaacaccctagcctttgcaccctcagtttctgcaaatttcaaagcttgctcaaaagcagtcgctctcttatcggaatcgctcttatgctctctaccttgcctataatacataaaagcgagacaatcccctgggcgagtatagtcaaaactatcccaccctttatctccgcggcggcgagggaaatctttcatggagcgggcgaggtcttgagctccctttccgtcgaacccattggcaataatgaaggctgcggcggcagatcgttgttggacactcaggagccgaatttcgtacaacaactcagcaccaccagcatcgaaatgggcaacgatatctgggtcggttttggattggattaaagattcacgtacctgggcagcaaccaaaaggcgattttgctcgaccccagaaattccagtggcttcttcgatggaagagggcgtgaacccttcttggacaagggaaggaatgattggggcgtactcgaaccagagaccgaggcggttggcgagaacttctaggcgactgggagtgtcgagagagcgaaattggttgggaagaggagacggtggtgggcgaaagggttggtaaggctgctgctgcaactgctgatttctggagctcgatgatgaaggggtgagagtggccgagatgggtttatttgagggtttaaaaagaagggtagtgaagggagaggaagaaaagagcttatcgtggtagaatggagaaaggggtttgagagtgtttgcagtgaaagagagcatcgccatggccatggtgaagtgagctgagctgagctgaaactgaaagctaaaacatcacttggttttcctatcgcgccttatctgatctttaattcttggacaacttgaaattttgtttttatcgttacattttagagcatggtaaaattaggatggtttgtgaggtaatattgagatgttatgtaaatgtatgatattataattaaaaaattgttttttgtttttaaaaataaaaaattgtttttggcttatttggccttgtttcttgaaaacagttttcggaaataaagttacaaaatataagaatttcgaaaactaaaaaccaatttactattggttaatattgtttttaaaaaacattaaccaaacgtgacttgtgttttaaaaacttcaaaaactatcttttgttctcatttctaaaaacaattttttgaaaacaaaatacagaaaacaataccaaacatactctaaatcatccacactcaaccaatcaccaacctttcttctacctcataggtaaacaaaatgttcaatatgttggtgcttcactatcttcattagagaactcctcaatcacagtaaatcctgatgaagatgatatgcgtcatcttcttcactagacaactctttcccaactttactttaatagtttcattcagtgaagtaagaaagaattaattacatacatttatgatatttctttttgaatgcgacagtcaatttggatgactgacagcccttaagtaggttttgtatatttttttgattgtcaatattttgattatatagtggttaacatttgttgacctcgcttttagccaatgacaatgagtctaatttgtaagcgacaagtagtataatatgagtgtaatataataaagcaaagtaagacacaagaattttatagannnnnnnnnnnnnnnnnttcggtaatagcctaatcctcgtagtttgtattaacttaagaacaaggagaatggttccttttcttagagctcttacaatagtatctttgaatatgaattcttagatagaatgttttcgaccctttgcctagtgaatatgaatcactatttatagggctataagcttgggagggaagtatttcccttttggttacaattaatataagtggaaagattgcatagtaaatacagaatacactaatcgtgggattcagacagcttgccatatctctgtgatctgatcccaaagttatagggatttctttgatgactcataatgcgaaagctaaattttctaagtgttggcgtgctgcgcggattgctcgatgcccagcttagaggacttcatccgagcgaatttatgtggtgccctgttccgcatatctcttgcgagcaggtacatagcgttgattccacgtgtcaccatcgtgtaa

SEQ ID NO: 107237 - DNA, 9743 bp, Cannabis sativa
aaaaaaaaagaaaaaaagtaaattccaaaaatgtcctcattgtccgactccgacccactcggagtactggtctctcttctctaaccactcccattttcggacagcgttaactaaagttcagagcaacgtttcctaatgcgactgactctctccgatcttctctctcccaaattatctggtaagccatgaactttggataattatatatatatgaagcgaatgtgttgactactttgataattctattttcttcttctgctcaaaatgtttgccgaaatgcgatgttttctcagatcataaagaagccctctacttttatggctgttcctgtggaagaagccattgcggcgctgtctacattctcactcgaggtatttccactgaacacacttttttttttgcgaatcatttccgtacttattgctgatttattatttacatttttctggttatattttgttagagatgccagtatcatgctagctttctggaatttgaatagcaatagaatgaatttagcttgagaaacgacctaaatgcatgtacagtttaatcaatacatgtatgagggttgagatttgaaatgcagctcattctgtttttatttctatatatgcataatacttaaataattattgttaggatgagcaagcacaagtgcaaggaccaggaatttgggtgttaactgagagaggagcaactgaaagtccaattggtatgataattttttagtttcttcgttttttttatggttctgtgagaatatgttgctttttatgtcgtgagacatgaataacttaaatttcattagtgctacgtctacaagtttaagttatcatcatccttgcatgaaaaattatagggatattagtgttttaagttgatagaatgttgaactctaattgaaaacttgccatggttttcttagtgttgaatggtttgtgttggtaaaagtcccacgtatatctcatttttaaattattacttcattgttgtagagtataatgatgtttctgcatatcgcctatctctatcagaggacacaaaagctcttaatcaattggtatgaatttatttttgctcctattgagagttttttaaaagttatattcatataactaacatataatgttatccgataattaccatgattaccagtttcttaatctctcattatacatggtctggtgttctaaattgaactctggaacgtgtgcagaatgctcttattcatgaaggaaaggagatgtcatcagttctttatacatatcgtagttgtgtcaaagcgctacctcaggttaatgtggttatagttcaaagtaaaactttccttttgaatctcaacaatacaactctttcacattactcatttttattcttactcttttatagcataaaaaatacttacctaaaaatttaattttttccggcttcctgcggagaaactttttttagtgtcactgttaaccttaggtcttgtagttgtagacgtaatccttgtagttctgttggaccttttatttttccagtaagcaagttgtacggctcctaacttccacacttcttaccattattttctgatgctatgtacatcatatatgctgttggaatgatgtttcagcttcctgaatccatgaaacaaagtcaaggtgacttgtatatggaaacttatcaagttctggatttggaaatgagtcgtctgcgtgaaatacagcaatggcaagcatcagctgcttctaaagtataagttcatatgcatttttttattattattatttatttttctcaaaatgtagtattgaggatgaaatgttcaccttagtacaaatggcatttttctgacagttagctgctgacatgcaacggttttctaggcctgagcgacgcataaatggtcctacagtaactcatctgtggtgtgtaaagtcattctttcatattctttgtgaaacatatctctctctctccctctctctctctctctctgtaacattttcagattgagcttttgcttgcctccaatatttcccaaattcttaacacgatgatgatccgtaccttttttcctggtgactattatttactccaggtccatgttgaagttacttgacgttttagttcaactagatcatcttaaaaatgctaaagcaagtatacctaacgacttctcttggtataaaaggtaagacaataaattgatctcttctaccaaacataactgattttttttctcaacaagtatttcattattgttatagctgataaaattaatagcccccatagctcttaatttaattctgcagacaatacattgttgtgaaatacctagaaacataaaaggaaagatagcatgctaagtgatttcagtgcctgctactggttgaaaatttaagtacttcatattttttctttaaagaatatacgcttcgcaaaaaagagtgttatttgttgataaatccttctgtcttctgggtaatttgtcaggacattcacacaagtcagtgttcaatggcatgacactgattcaatgagagaggagttagatgacttgcaggtgcttgattctagttcctttacttagtccatgtattgacatgaccatttgggttcttatgtagttcttattattatttaaaatacaaccaataatatgatattgcaatgcagtaataacctccattttcatctgtcagatttttctgagcacacgatgggctattttattaaatttgcacgttgagatgttccgggtgaacaagtatccgatatatattgcacatgtgacagtgcatcttttcatatgatgtgaagagaaaatttccatcaactttcttgattttccttgtatgctcaagattttcttttaatgttcggagatatgaaataatattagctaaacagtcatatcttaaggcttgttattctcccttgagctccttaatgtgacatagtgtggaggacattcttcaagttctcatagtctttgctgttgagtcactggagttggattttgcgcttctgttcccagaaagacacattctactccgtgttttgcctgttcttgttgttttagcaacatcatcagaaaaggatagtgagtctttatacaaaagggtgaaaattaacagactgataaacatatttaaggtatgtacaataacaaaaaagtggcacatgacacatgggttaacttaatggaatgtttgcatataatatatatttagttattttgaaagtttgctttggtgattttttcatctgttgcagaatgatccagtcattcctgcatttccagatcttcatctttctcctgctgcaattatgaaagagttgtcaatgtattttcaaaaattttcttctcaaacccgtcttcttactattcctgcacctcatgagcttccactgcgcgaagcacaagaatatcctttgacatataatcttgtattgtgtcctttttttttggctttatatgctgttcaaatcaccagctaatgcgctgtgtgccatcttccttgtgagtggagtcaccagctgatgctatgtgtaccatcgtccttatgaccttatttcatccttattgactgaagaaggaattatgtctgatgatggacttgtactcttcaacatttatttaaccttattatttctacaatcagcaatgcggataaaagagaaaaaaaagtaatgcatatataataaaatgttgttttttttagttagcattcagtttttaatatacatgtcaggatgatacagccacacataaactttttataacatttctagaatgtttttgttttattggtctatctagaactgttagtcaatcacacaagaacataattctgaagaggttttgttcttttgtgtgaagccttgacatacttcaaagcatttattttcgtctaatttttagtgaagccttgacattattacttatcagagacattatctgatcattaatcacattggatccatccgtgccgagcatgatgactttactattcgctttgcttctgccatgaatcaggtatactccttggttctcatatgaagatcctcacttttgattattagtcattgtaaaaggtagatacaccgttttatcttgtcttccctttgcagctcttgttgctgaaatcatcagatagtgctgatattgagtggtgtaaagaagtcaagggcaacgtatatgatatggtcgttgaagggtttcagattttaagcagatggactgcacgtatctgggaacaatgtgcatggaagttttctcggccctgcaaagatgttcctgtggaattacaggaggcatcagcatctttttctgactacgaaaaggtattatcttcaacagatgttaacatcatacttatcatactcagcatggtagatgctggtgtcaccatcccactatagtgcatgttccaactgcagatcacatggtgacctgatttttcctttgcattataggttgtacgatataattacagtgcagaggaaaggaaagccctagttgaacttgttagctatgttaaaagtattggatccatgatgcaacaatgtgatacattggtggctgatgctttatgggaaacaatacatgcagaggtccaagattttgttcaaaatacattggctactatgttgaggactacctttcggaagaagaaggatctctctaggtgggatttcactttgtatttagtgatttaattggttaacatttttgttccatctaaaagtttatgctaccttaatgtacactacctatgattatacactctagtaatatttctagtagcatgttccaaaatacttatatgttgatttgattgctaatttttcaggattctttctgatatgcggaccctttcagcagattggatggcaaacacaggcaagtctgagtctgaaatgcattctttgcagcatggaggagaagaaagcaaaggaaatgtatttttccctaggcctgttgcaccaactgcttctcaggtttctttcctctcatttgtctgtgtgtttaattattacatgttaactcagtttctgctatcatagcaaacttatgttcgagtgaattggactaaaggaaacacttgtggtgatatccttgttcatatttgcttacatgtgtaataatcaaacacgatcatcattacatacaataccgattttctactcaggcacgcaaaagacttgtttgcctgagcttagatacataaaatgcagacatgaattatgcatccttgatttaaatattttatgcatctctgaaaataaaaaatatccaaacacaatattccatgagaccaaggaggtggtgtagttttatattaaactttatatcatctaagcttttgggacagctgatacttcggttgatgttgaactaaacaagtttatttattttttattttttttaaaaaaaacagggggaagaaattgataagctttcttctatatttaggtccattgcttacagtttctgatatatgaggtggtctctggtggtaatctgaggaagcctggagggctctttgggaatagtgggtctgagattcctgtcaatgatatgaaacagttggaaaccttcttttacaagctcagttttttcttacatatattggattactcaggtatgtttgctttgtcctgtttggcttcattttcctgagagtgtcagagttgataagctagacaaactatcattaatattgccttataaccgatgtcttatgctcatttgatttaatctgcagcaacagttgcaactttgacagaccttggcttcctatggtttagagaattttatttggaatcatctcgtgttattcaggtataatcaactttgtaacactagaattgtagtcatctcaaacttgaaacgtgtaacagagggataattttaatgattttctaatactgtcaccattagtcctcttgttttattgaaacatttttattctccttgttcagtttcctattgaatgctctcttccctggatgttggtggattatgttcttgagtcacagaacgcgagtcttattgagagtattttaatgccatttgacatctataatgattcagcccagcaagcattaattgttttgaaacaacgattcctctatgatgaaattgaggctgaggtacggaaatttctgtagttcgagaaattagaattttattcttgtatttccattcatcctacagggcaataagaattcttttaacttgttttaccgtccactatattctttctttgacgattggttattaatctttgaaaatattttcctttagctaatatttagtacaaacttgttatgataatgataaatcatttattacaaaagcagagttttctggaattctgcctgagtcatgttaatctttcttcaatcagcggttatgcttttttttttccctcatttttttgaagatacatgttagtttggtccaataaattcccttgctgaattgaaagcatcttccattgcgtatggatacttctcttatactgccactcgtggataaacttttttcttttccaaagttgtttcttgatgattggccatattgttttctttaaaatataggtggatcactgctttgatttatttgtttctaaactgtgcgacactgtatttacatattacaagagctgggcagcgaggtttgtgttttttcttttcctgtgccactgatatatcaatgctattgttactccttttacaagatttatgagatagctaataaatattgttggccatatatttgcagtgaattacttgatccctcattcctcttcgcatcagataatggtgataaattttctatccaaccaatgaggtttactgcactcctaaagatgactagagtgaaggtgaataatatttttgagtttgttactttctttcttttggtatctgaaacaaaaaggcttttattactagatattagaaatttatgtttatctttggcgttttgatatcataagatcgacatttttaactttggttctctgctcttttatgtgcttactaatacagctacttgggaggacaattaacttgagaagtttgattactgagcggatgaataaagtttttagggagaatcttgaatttctctttgaccgttttgagtctcaggacctgtgtgctatagttgtaagttgattgactttatttacttttgtcatgtagcattaagaaacaccttgtttattatcactcattaaatgtgattttatggtttcaggagttggaaaagttggtagatattttgaagcatgctcattgtttgctatcaacagatctttcaatagattccttcagtttgatgatgagtgagatgcaagagaatatatctctcgtgtcattttctagtagacttgcttcccaggtttagtaacattttctttgttattctaatatgataagcttgccttgtgtcactcgaggagcagtttctttttgcttcaaaaatagaatgagtatctaaacccacccacacagatagatagatgtgtatgagaatcttatttaatctgggaaaataaaaaatattggagacttctttttgagttttctcttaatcaacttttgtctttcagatatggtctgagatgcaaaatgatttcttgccaaactttatcctttgcaacactacccagcgttttattagatcatcaaaggttccacatgttcctgtgcaaaagccatcagttccctatgcaaagcctaatttctactgtggtacacaagtaagaatctatttctcaagcaccataattaagtagaataatgcttttcatcatatatatgatttagctggataatcttattttctgctacctttgtttttggtgtgataggaattaaatttggctcatcaaagttttgcacggcttcatagtggtttctttggagttccccatatgttctcaattgtcaagcttctagggtctagatccctgccgtggcttataagggcacttctggatcatatatccaataaggtatttcccttttacattacaccaccttatttgcatccagcatttcaaaacataaaatttatttagcctaatgacatctgcctgcttgcttcagctaacaacacttgaaccaatgatcaccggattgcaagaatcattgccaaaatccattggattgcttccttttgatgggggtgtgacaggtacataatatgcatcacgttgcaagttcaaatagaataacatcctgtacctgtcacactagcttacaatatcttaaattgaaacgtgatgcatatcatatccaacactagcttacaatataattatgatgttgatgttatgttggcacactgaccttatcttgtggcattttatacccaaagtaaagtgaaatcttattattattgttaatcactaacatatgttttcttctttccagcatgtgtttgtgtgtatattgcgtgttcttcaagcttaatattattctcttaagagttttttggatgatatttcctgatctgtgtgaagatttctctctggacaggttgtatgaggcttgtaaaagaacatcttaattggggaacaaaatcagagctcaaatcagaggttcttagggggataaaggaaattggaagtgtgttatattggatggggcttcttgatatagtgttggttggtatcccgtgcttcattttacatattagagatgattataaatcaaaacccgtattgtaagaataacgtacatccaaagtgatttgcaatcggaaaagataaattatatatggcaacattatggactttataacatgagaattcctttgcctgaatttcatattatgggaggatgaacctaatttatactgtcttattggttagttaaagttgaatttagtgtttctggtcacttgaatcttattgttgctatttcacatgctgaacagagagaagtagatacctggcacttcatgcaaacagctccttggttgggtctacttcctagtgctgatggacaagtattacattctcaagatggtggagatagtccaattgtcagtctatttaaatcagtcactgctgcaattttatctaagccagggtgcccaaatccaacctctttcaacaccctatcaaaacaggcagaagctgcaggtacagagtcagacattcaatttttcataaactcgttgtatttaaatattatcaattcttgggtagctcaaatggtcaagcaggtggttagccctctctaaagtttaagattcaacttcttggatacctacatagcaattgctgtagttttttatgtcctcaaatattgtatggttggagagtctagcttaaatgtgcatcacttattgttattcgtgtttgtgagcaagtgacacgtggcaaataaaggaagagattagcctcataatctcactaattaaaatctcccactacaactttgtcacgtagaagcctcccggatccaagagcaagtcaagattgagaagatacatggaagaccactttgccctatcttagagcatgtttggtattattttttgttttttgttttcaaaaaagtgtttttagaaatgagaacaaaaactagtttttgaagttttcaaaacataagtcacgtttggttagtgttttctcaaaacaatattgaccaaaagtgaattgtattttaaaacagaatacaacattttgttgttttcaaaattcttgttttttgtaactttgttt

SEQ ID NO: 107238 - DNA, 4806 bp, Cannabis sativa
tatttctatttcttaagaaagtgtactatttgtacaacttaaatacggaaacggatctgtgctctatttaaggacattaataacaactggaaatgattttttaaaatataaatattaaaaattatgttggtaatggatgcctaaaaattatgtttgttaactgttataataaaaaccttacactataaatttataatgtattcatctatttgtttttgtaagcaagtattacttgaatacttgatgtccatattaagggggattgtcacttgttagtaattttttggaaaatatatatttgagaaaattaagggtagatagtattttaaatgttttacaaaagttattaattagattttctgttttgttaaatgataaaatagatcctgtgttttccaatatagtacaaataagatcttgtgtctaaatatgttatgacaaaatagtttatattttttatatatgttcgtgttaagaattgtctaaaatacagaatcatttcgtcatttaacaaaatagaaagtcggatcagtaattttataaattaaagactctaaaataatatttagccaaaaaattattaaggatttacggatttttcatttttatttccttccgttgtatttgtaattaaatatacaatgaatgagtgtccttttttttcctttctctgagaagtcttaattagagtttaatttcctttaacagttaacatatcaattagtgacaaatggacagaagctggaggtgaaatgaccaaaataccctgaggcgtaaggtcgctttcttgtgcctttcgtgtgcgcaggtcaccccccaaccccaagactcactcgtgtctacagtactttcgttttcaccaattcccccacactactccaacttagtgcccctccactctctctctctcggagtataaccacgtcttcaaccccaacgctagaaatattttatttatttatttgttattattattattattcttttatttttctgggcctatataaaaaacagagtatagtttcattccaggccccaaatttatatatatgcacatattttttttattacctgatctttatttattgctaaaccagactagaggacccttttggggaaacctcaatctaatcggttctgctctgtgttttcggttaatgaagaagaggaaataattttgggaacccatttttttctttctttcattttgttcttgtttgtttttctggttttcttggaaaactagatttttgaaagaagaaaagaaaagtttttttttttttttttttgagaaagttgatgatgggtcctttgacagtgctgatggtaagcttattagcctgcgccgccgtaagattgagctcatcagatccgagcgacgaagcatgtttgacccatttaagtcaatcgatacaagacccaactgggtctctcaagaactggaccaaatccacctttgctaacccttgtagcggtttcacctcttacctacaaggagccacctgcaacaatggccgaatctataagctctcactcactaacctctcattacgaggctcaatctcgccgtttctcgccaactgtacaaatctccaagcccttgacctctcttcaaattttctcaccggaccaatcccttcggaccttcagtacttggtcaaccttgctgtacttaacctctcctccaatcggctcgagggaccaatcccacctcagctcacattgtgtgcttatctcaatgttattgatctccatgataacttgctcacgggacagattcctcagcaattgggtcttcttcttcggctctccgctttcgatgtttcaaacaatcggctctcgggtccaataccttccatgcttagcaaccgaagtgggaatttgccgaaactcaatgccagttcctttgaaggaaataaagatctttatggataccctttaccgccttacaaaaataaagggttgtcagttttggccattgttgggatcggattgggaagtgggttcgcgagtttggtcctcagttttactggggtttgtatttggttgaaaattacagagcgtaaaatggcccttgatgaaggcaagatcagtcaactcatgcccgattattgaacctaaaagtattttcaggtacttttcgaatatatatatatattcaaaaaaaaaaaaaggagatttgagccttgaatatgtttatggaatgaagatatgggctagtctctgtctctattcagatgggtcaaattcagaatgtattcttttactgatcctaggggaaaaaaaagaaaggaaaaaaaattaattcttctacttcttaccattttgggttcttttcttcattctcttctttttcatgagttgatattattctccgcaattcttaattctcgtttctctacaatcaatcaacagtgtatagaccaattcaaacacttatttcagtgaattagtagtgcaacttttttgctttgttcttttggaatgtaacgctagctagcaatgttgtatagtgtaaatgtaatgttattgttcacgattttcatctctctctctctctatcatattaaaaaagttggaattttggagctgtacggttttttttttttttgtctgctatgtggtaaaatgtaatagaaaacaactggtgggggaaagaactgctttattttaatatcttcaacattgttgcatttattatatacaagagctatcacagacttggggttggttctggttctattgagccggtggattgggagaccactgaactatatggtaatggaattgtcgagttctggtcctgaaattgcttaaaataaacactagagtttttgtgcttttgctccaacattccaagcaacttggctcctaattctacttggggtttggggttcaaggctctatcttatatctataactataaccacgctttttttgtaggttcctctgttttcccatttcataaagtctatatggtaaaataaagtttcaattttttttagtaaagcataaaaagaaaagtgtcttttttttagacaaattaattacgttagtttgataattagttagcatgttacatagttgctcacataattgtaatctgtgggttgattggttgtatctactcttggcttctagcctagccctccttttaattattcacttaatttaatatgcatattatgtttaacgtggacctagtcttctagcttgggatctttgaagttctcaagagttaactttgttttaatgtaatcttacttttaagattactgacctttaaattactaataaattttgttatctttgaatattttgcatgtaactgtgtgcgtaagtaaccctcccatgtatgcatgctcagttatcaaaactaaaaataatcaattcttttttattttattttattttttgaaaaaataccctcctatttgcaaatttaaaatgtcttaaacgtattgagttttgcaaataaagttgaaattctaggcctgcatatttccataactgactagatagacagcatctccaaaaattgtgctgctttataattattccttctttttttcactttgttgtgaaaaatattttactaccatgtatgctttttcctacaccaaaaaaaaaaaaacaatgaaggtgagagcaaatgtcgagaaagaagaagagaaaaaaaaaactgttccaaacaaatgggataacagtaagaaaaaaaattaaagcaataagcacagttaaattagacaaagattcgaaacattcatgattggttttttgtcttatagatgaacaattaggaaaattagtcattcaactctacaaaacatacacattatctgtgtctaatcaagaaaaacttgagttgaattgagctgagctgatcacatccatccataatagagatatttgaaaactcaacacaccgaaaagaaaaaaaaaatatatttatatatggtcaaatatgctctcattgggcttcattaatgggtcctccgagaatggcatgcatttcatcatggggttgggcccccttatgcccttactgctccccaccctaactcacttatttcttttatttttattcaaataattttgcagactactaatttattaaacttttttctcgtgaaatttgaaatttgatgttgattataactgctatactctctctctctctctcttctacaatttgctgaagtcacaaggaatgtgtttgctttttttttttctttctttggggtgtgcagtgtgctaggctggtgacttggcccgcaccacgcattagagacggtctacacaagttacgtaacaccctttattatctacaacactcaatgcacttattaaagttaataacaccctaatttgctcctacttgtttgaatatcatttccctagagaaatttcctgcctacaaacttcaatttttgtgaatatatctcatgcccaaatctttgaataataataataataataataatgtatgtgggtgtgtcttatatttttggattggaatcttcaaagaggaagacatgtgagttaaaatttctaaaaggttattttgcatgatcctttatgatcttttggtaataaattttaatctgttttttgtttttaaaattatgatctataaaattaattttacttttttatttttaattaagaatcataatttgaaaacgagaaaaatgtcactttcaaaattttttaatagttttttttttcttaattaattaatattttagatctggctccaacctacatcttagaatctgaacccagacttgaatctcgacccggacc

SEQ ID NO: 107239 - DNA, 4528 bp, Cannabis sativa
  modified_base (4491)..(4493): a, c, t, g, unknown or other
ttgtatatgctatattacatacactatatatatagtctaacaactgatactacatgtacgaaattagagaaaaattacagttttacaaacattggatacttatgccgctaaaaataaacattgaaattatgccacttacaaacttaaaactttgagtacttatgccgctatttaccctaatataaatggattatatttttccaaaccgatttaattaaattggcctattgaaatttcttcaatccgcccaattctcaatccatgataagcctactaagtaccatattatcgaccgtatatataatcatatatagatgtactctttaattatgcatggacgggtgaaaatgaggtgacaaccaaaccattttcacatcttgcggaaagaaaattgaaaaaccaaccttgacaatatatcattttcaaaaaaaaaaaaccttgacaatatatttccaaacgtacgtacgtaaagtactaaatattaatagtcaatgtgatatgatggaaatgttaaatcgtgctagctactttaatagattagcgtcattaaagtactaaataatagagcttattaacacactaaattaatttctttgtccaaaaaatatttcctgcaatttcctcgattatacgtacttaggcgaccaaattataaaaatttgatcttcatgtttataaattataataattagattttgtggaatcaataaaaattgtggatcaagtaataattaagagctaatactatagagatgttaattaaataataatttataactaagtaaaatctatttgaatattactttgtgatgattctctatatccattttcactcaattaatactccagcacatgcacttgtatccgtagtgttatatttatccgaaaatgataattcataatatatattaatatataatcaaaagattctagagctggtagctagctataagaaatttttcttttccattcaaaaaacacacataaaaaatatgtgccatatatattcaacctgcagcccacatgtctaagaagagtgtacatgaaatgaaaaatgaaaaatagatattataaaaatttaaagatatatatcataaatagtttttatatatttattgaagtagtgcccattaatttcattctagcataatagtatcaccgacaggtgactttaaaacagatcgcattaggaaccacatgcacttgctctcatattgtctctcgtacgctgtctaaaaactccgtacacatgcctagtacgtactcttttactctttagtctttaggacgtgatcaattcatcagagaataacgcgttttcatataattcttatcttttcattcatcaattaaattatatattttctatgtaaaacatattattgattttattttagtcaccgacgtaaccgtgttttgagtctataaaacacagacattttcctctaatgattgtataagatttttaaaaagagcttgttttattagtgaagttacgtaaaacaatacaaaagagggaagaaagcggtttatagtacgtattaacatattatatatggcggtttgtagtgtttcttgggattttatttggtatattttcttcttttctagtatggtttttaagagcatcagtgctcgtcaagctaacggctggctcggtgctcatgcaactttctatggaggcaatcaaaacccctctactcttggtaattaatatacttggaagacctcattaattatttatatttcatatgaaactcaaaaaactaatgaatgtataattaataatatatttatgtaggaggagcttgtggttatgacaacacattccatgcgggttttggagttcagacggcggcagtgagcggagctctgtttagaggcggggaggcgtgcggtgcgtgctaccaggtgatctgcgactacaaaacggatccaaagtggtgcctgcaacggcgttccgtgacagtaaccactacaaacttttgtccccaaaacaacaacggaggttggtgcaatcctcctcgccaccacttcgacatgtccatgcctgccttttttcgcattgccagacaaggcaacgaaggaattgtacccgttatatatagaaggtaataataattaatatatacaacgtatatatatagtaatgacatcatttgatgacttgtatatattcttattaattatatataatataaattattctaataataataaccagaaccatgtgcaataagagaaatgctaagttcacagtaacacaacacatttattttaatatagcatctcgtacattttaatttaataaataatataaagaatcactaactaattataaggtacacacaaattggtgtgcaattgggcacggtatactcgtgcaataatattgtagtttcataacgttagtgtccagtaacttatgatgtcttataattggttagcaatatgacattgtaaaatggtaacatttctttaaacaaaagagcactactaaagagaatcaaagtgtctagcaccactatagttgacgccttataattggttatcaattttttataatttttattaaaataaaatatacggtacccaatattaaattacatcaataacaaaatgctacctttagcatttctagaaaaaaaaaaagaagtcattacatatatgtgactgcagtatatatatttttggctttgatctcttaagtaacagacattaaatatttatatgcgtatagggtgtcatgtagaagaagaggtggagtccgtttcacaatgagaggtcaaggaaatttcaacatggtgatgatgtcgaacgtgggaggaagtggagacgtgaaagctgcatggataaaggggtcgaggatgagaacatggatgcccatgcataggaattggggtgctaattggcagagtagcattgatgttcgtggtcgaactctctctttcaagctcactttggttgatggtaaaacacttgaatttcccaacgttgttccttccagttggagatttggacaaacattttcctcaagaaaccagttcttctagactcgatccctctcacagtgtcccaatcataaagggactcgccgtgtagattcagaattgtcttattattaatgatcaaaaaggacattaataattagttcttactgttttttatttttattgtttgttatgtcaatataggagaacacacaacaacatgagttattgatatgtcgattgtgtgttactcaattcgtgtttaacaacgcgcgttaattattatatacttcttttatattccatacatgtaatgtatgtctggtcaaaatatattaattattataaaagcaacttttgcaattgcattctaatttttgtagcataattgtaataaaaaaaaactacccaaccaaatggaagtctatatagcaattatgggagatcgaagctttggtggaatgtgttatataaatatatagaagatattgccacatattggttcatgataagttcattcatattattaatatgcatatgattttccttagcattataaactctctttacatgaatgttttcatagatgtcataggagtataaacgagtcctgcttatatattctagtaaaactatattatgttataatattaaaatattttatgtgacactaagtgttgctcactcaatgtcgatattagcgcgtataatgataactatataatcggtaatgcatggtattaccatcgagccataatgagatggaaataacgtactaatatgctcgggcccatagacacgctctaaaatattttttagtcccattggaccaagacaatgaattctctctatttggactataagaccaaaagacgcactaatctttataaaaaaagagtcatgccccttattggtgagcaaggatgtgtgtgggtatgtgtgttttgagagagaaaaaagtagtgttcatacacaccccttccatgcacatatattttcttttgatgtgtagattgaaagaagagaattgctcaagtaaaaggatctaaatgacatgaagaaatcaatacatattagagagatatgtttattatatatcttttaatgcgttaaatataataatttgagtttgggttgcttgttgagcattataattgtaaatgtttaaatcttatggtgccgtttggtaacacttttgctttctaattttttaatcacaaaatgaaagtaaaattttgtttttaaaaaaattatttttgaaaaacaaaaatgcgttctgtaaccacttttattttttaattttaaaaacagaaaacaaaagtgtgttcagtaaagtttatttttatttttattttttaattttatttacgtcgggtctaggttcagggtcggattcgggttcaggtcagggactgggtttagcaccagggtcgtagggggatttgggtccgagtctaatcaaagtccaaaatattgattaagaaaaaaaactgtttaaaannntattgaaagtgacttttttttttatttttaaaatt

SEQ ID NO: 107240 - DNA, 3255 bp, Cannabis sativa
cgtgtgggacacggggataaggttatggttgggtgtatgagtgcctgattataatccgggttattattatgttattacttatgcttttcttactgagtctgttgactgaaatttgctatgtccatgtgtaggtaagggcaagactaaggttgagcagctgccagagagagcagatggagattgtatatgtcgggacagttaggcctggagcgtacgatctttgggacatcagggcttattttgtatagtcactaggcgacaaacttttgtatatgcatagtgaaacttttgtaaataattttgtaaacgggatctcggtttattataaatatggtattttagtgtttataattaattaagtaaaatcttaattaatcacgattttcaataaaatcgtcaattagcaacgagctgcacagttaagtttaaaatcacgttaacatgcctaaaatagttagggtgttacaatttatttccttgtaaagcttcaattaagtttaatttcatttaaaattaaattaattataagtattataattattttttttttttttgtaatttattactaaacaaagttttttgaggttttttcatatatagctttatttgggtcaaaatttactttttttattaccatatgacaaaataaataaaattaggaaaactaaagttttttttttcaaaaatacgacacagagacttcttctccaaaagaacttctccttcttgcagagcaaaacaatgagtttctctccatcgtcgataacacttattaagagatggagatctgaaatcatcaaccaccaatgatgtagaagcattttgcaatctccatatacgccgacaaagaactttgggctgatctccattaacgccggcaagaagttttgcttagatgttctgccatggcaacgagattaccgtggggagatatccatgaaaccaacgataaaggatcaacaatctagggggagatctagtggaatcaataaatatcatgtgactgagaggtcttcttgaattttcatacccacatgttttgggttttctttcaaaaagaaaatttgatttttatgtagtttttgaaataaaaaaaaaaataaatttgatgttgtttagtgtgtttttttttcaattattttgttaattatttgttgttgtttggttgatttatatatattttcagtattttttttataattttcgaaaatatatcttaaaggaaactactgcattgaatttttgggaaatataataagagcaatgagtatgtgttaaaatttcaatacaaaaatatgttgctttcatgttgtttttaagtttcatttatgttgttttttcacccttctaaaaataaaagtaaaatgtacaagcgacagaataacaacacaaatataacaatgaatgtgacaggaagatattgcaaatatgaaaaaaaaaatttacaaatactcatgcaataacaacatcaatagttgattttgagttgttttgtgtgtttgctataattacttgttcatcaattgatatttttttggttgaaaacaacaaaaataaaaaatacacaatatctacaaaagaataattaagttattttcatgttattgtgaagtttcttttatgttgtttttgcaacatcttattatttcaacttgaaaatattatataatatcaagttgttatttcatgttgctataaaatttgttatgaattgttcatacactacactagttgtttagcaattaaaggaatataattttacatgttaaaacaaaaacttatctttatctcttacatctaaacatgaaaaatgataagagaacacattatgttgattttaaatcaagtaagggtattgatagaaggagactgtaaatatgaagaaaaaattacttataattagtagtaacattatttgttgttttacagttgttttaaagttgtaaacacgttgtttagtttcataatttcttgaacatgttgctttcacgttgtttgtacacgttgagtttcagttgttaaaatttatagattccttaaattatcaattttttataattttttatatcgttattaaatagttgttaatagtttaaaaaaaaataactactaacaactattgtcttttttttaaaaaaaaagtatataattatacaaatacttgatgtataaattgaaaatataataatagttgtttcttaatatactaaaagatataaacaattaaaaaataaaattataatattcaatatctcgtacaagatatatatgaagttaactagagaaaagtttaaaaaaatatacaaaagcaaagttttcttaaaaaatattgctcttcagcacatacaacctaaacgaaacacacttctcaatcattaattcatgcacagtaactccatccttcttgaaagactttggaatattttcttgtacacttttgatgtatgcaactaacttcattctaatcaattttgaagttcatcattactagaaattaagtcctatagaaattaaaacaacatcaaaacaacattaaacaaactataaaacaactttctaatatcttaatctgaacatgagggctcctcccccatttgggaccgaaatatgaagagtgcctagaataaaattggcatttgagtgacgaaaccgcatgcagcctgttaaatgtcaacctgggcattgactaggtgttctggcctctagatggcctcgttcgcttcctaaaaccacttatatcttcattgtcaatgaaaatagtaaaaatgtccaaaataaatatctggaaaagtcgctagaagcgtctcaggttgaccatatgtcatcttgggcgctggacactaggcccaagtcaatctggacgctgagtaggccttttggccactagatcgattcgtttgttacccaaaatcacttaaatctccattatggttaaagatagataaaatgctcatgaaatatcttcaggaaagcctttggaggcgccccaaattaataatggactggacattgggcaggttgaccagatgtcgggttgacgaatttcgggttcatgtgtttcaagtgaaaaaagtgaactcgtacccgcacgttcacgtgttgcggtttggcaagttcgcaggttggcccggtcaactttttttttttaaaacccaattttatatagttattttattttgctttatttatttatgaaattatacataacgccttaatctatatcctttagagaaaaatatattaaaaaagtattaa

SEQ ID NO: 107241 - DNA, 2510 bp, Cannabis sativa
  modified_base (65)..(67): a, c, t, g, unknown or other
  modified_base (2446)..(2483): a, c, t, g, unknown or other
cataaccttaataatttttcccatatttttgaaaatagcccttttagaaaatataaggtctattnnntcatttaataaaacagatgatccaattagtagctttttgcaaaacacagagtttatttacccttaaatttaccatatttcccatgtattaatgggcctgggccaatatgatgaaggccactgtttgaagcaataggcccaatactaggcagtaggtgtgactgaggtgagttccacgtatctcgatcttcctctgcaaaaactctccctttcttctccttcgtctccctctctccctctcttaactccattaaaacaccttcctcttctaacttgcgtagggtttcaaacatgtcttccgtgggaacttcaaagggcattcttgaaatcgccaagttcggtctctacgtctctgttccgatcgttctcatgtacgctttcgccaacaacagtaaaaatatcaagaaattcatgggcaatgtaaatctctctctctctctctctatctatatatatatatatattcatagactagtaaaggcgtgaatcattaaaaatgaacaatcaatttaaattagtgctttctggtattatggattagaaaatgaattgctcagtttggttcgaatcaaatttgccaagtcttagtttaggttcataatatgttattgaattgagcttttttgtaattataattagagttagttagtttgtggcactctttttgagccaatgtgaatgtgatgactttagtaaagtaataataaatacctataaatttatgatatatttggttagtgtaaactgaaattgatactgaatttagatgaagatgctggtttaagagaactgattatgttcctctatgaagttgggatttgtggtacatttttcaatttctacaatcctagtctctttcacactgaatgatttgtttcacttgaatggtcaatgcttctttcatgactatgatagagcagaggaatatgatgtgaaccaatttcctatttcagtaagcagagaatagaaaaagcaataaaacagtaactgtcaaatagaacagtagggaaaactaagccaattcagccctggatttcactgtatttctgataaaggaaattacagcaggaaagggaatgtccttctcggaccagtgatgctgagaatgatctctattcttgcattcctttgttcttcccttactaacctatttctcactcgcaaaaccacccctcaatacacttttttctgactcatacactttttatttgatctcttatatcatactctgctatcttggggtctaacagaatacaactttgtatggttattgtggtatgtatagtagataaaatgaaagacgcatttttgcattaaataaacctttgggggcttattcttagttcttaattttccataaagctacccttttctttttggaaggccagaagtggaagcaactgatgctttggtattgagttggtgcctaatttactttgaaatagatacattagtgagcaaataagctattatatgactcagattattagccatatctaaccagaacttggtggagttatacaagttttggttgttcatcgaagtgttctatcttaaatgcacttcactacatataatgatgcttttatcttagatttcagcttaagataataatgtgtattcatttattggactgaaagaaacattcttgcaatattaaggtttgatgacattagagacacatagtgaagtttctagtataaacttatgatcacaagggtcatagtaatgtgtatagcttctacttttatcaaatttcttatggatccttacttttggccttgcagcattcttatgtagtttatcccccagaggcaccgagacctcactcaccagaggagatgagggagatggctcgggaactagctcgcaagaaaaatgtacgttgatgtgttctgttttttttttctttctttctttctttctttgttggaaagttgccatagctacatttcaagtaaatgttgtgtacacatttaatgtaatatgatgcagcagtaaagtaggtttgatttgtgtaactcaaataatgcaaatggtttctatttgtccttggttcttttattgcaaggctaatgatgaacaaccaatctttacacttaaccaaagtttcttacaatttcttacaaaattatgcggcaagcaagttaatggcctattatagatgataaatactttcagtattattatttatcaagaataattatgcttgagttagttatgttttcatgattagagttgcttgaatcccattcaaatttgtattttaaaaattgtaccgattcatgcctcctgaacttttaaggtcgttaaaaatgccctgtaaattattgagagattattagatttaaggacttttggggtaagttgaaaaataccnnnnnnnnnnnnnnnnnnnnnnnnnnnnnnnnnnnnnntatatttaattgaaacatacctttttt

SEQ ID NO: 107242 - DNA, 2650 bp, Cannabis sativa
ttttttttttttttgctttttttagaaaattacatctttctagaaaaaaagaaaaggaattttcaaaaatattattattttatattttatttgtaattttatagtctaaaatttttaattataaaaataaacttgtaatgttttaaaattacaaaaatatactttgctcagtaaaatgttaaaaaaaaaactaaaaaacaacgagaatcaaccttacaacaactataaataaactataaaataataaaaaaacagtttattatttttactgaagagatatttttataattaagaaattttaaggagtagaaatgaatttttttccctgtagatggatttttctaattaattttagtctattatgtaaatttaatgagccttttttggaaggagcatttacaatgatatgtgttaaccccaaaaattagcgttgctaacttttgaaattagttaactaatgaccaagggactaacgaaagtgcattcaacaagcttacctacccattatgtattttataaagtcgtcgtcgatactcacagttctcaggatacatccaagtgattcatgactaaccctatggtaatttacaaacgagagaacaacaaaaagcaaggatgtaagtaggtgaagtcttgcatgcatgtgtgtgtgcattaggtgcatgcgattgtgtgcatgtgtgtgtgtgcgcgcgcgtccgagagcaagggtgcgagacgaggggctcgcatgtgagcccgtggggggctcgcatgcgagtgtgcatgtgtgtacggttgcaagggtgcgagacgaggggctcgcatgcgagcgtgcgtgtgtgtgtgcgactacaagggtgtgagacgaggtgctcgcaagcgagcatgtgtatgtgtgtgtttgtatgcatgcaagtccgttagtgtgaaggtgttgtttattgccaagtgtgttgtttttgtgaagaggagtgaaggtgaaatttgaatgcacaccaaagagaatattgttagaggggaatcaaaggacaaggcgtgcaaaggagaagcgtacaaccatgacctctaaaagctctgaaagcaaggaggtacgagtagtagagacaacacacctgcgagggtacactgtagtaacacctttgtgagcgaggaccacctctacgactagactagggaccacctctgcgactggggaccaccactgcgactggggaccacctgacaccaaataaaaactttcaatattcaatgtatctgtttgaacagacttttgtctgtttgaacaaaatctttgactttccttttttgaaagatttttcatttaattgctagtagtttcttgattcttctttcatgacctaaagagtttttaaaatttataaagacattcgtaggtcattagtttttagtagctctcttggtgcatcattttctaaatcatttcccaaatttagagagagtttttttattgtgtgaagaacttgagtccaacgagttcttagtattttgttattgtgttattctgtattgtttcttattgaaattatgtaggttgaacactttagatattgttcatcaagcatcaggagaagacttttcgtgagtcacttttcgagcataaaagtgcaagtgagtactctttggaaggaagtgtgcaagtgctatgatttgaagggagttcaaggtctttaattagaataatagattactaaaggtgtggcaaattcaaagagggagtctttatttatataagtcaatttgattttgtaatcacttgagattaatcatctaataaatttcattttctaggtgtagccccatgggctagtagtaatttaaaaagattattaataccacgtataatctcgtgtattctttatttcatgtttgtttttgctctctataaactttctatttaaacatatctcttttgttcaaacagtttctatgcctctttaaacatcttgaaaatagtataatatttaattaattaatttgataatcataaaaacgaaattttgtgtaaaagttagttgtaaaattttgagcctttgcttattgaatgtaacagatttgtgtttgtaataatctttccagtagaaatttgcggcaaaactctctcaactatcaatttacttacaaaaaaccatccaacctcatattttggtgggaaaaccctccaaagtactgttccgtttacatttttaaggtgtcgtctgtccagcctcgttaagtcctaatttttcccacgtgggaatgacaggtcactaagaaattatcctatgtagtcatattttacaaaataaaaataaaaactttaagagtaatttgcggcgaaaccccccaactatcaatttacttgcaaaaaaccatccaaaatactttaaggttggatggttttttgcaagtaaattgatagttgggggagttttgccacaaattactcttaaattttttatttttattttaatttttattttgtaaaatatgaccacgtaggataattttttagtgacatgtcattgtcacgtgggaaaaattaggatttaacgaggctggacagacgacaccttaaaaatgtaaacgaaacagtactttagaggattttcctaacaaaatatgaggttggatgattttttgcaagtaaattgatagttgagggggtttt

SEQ ID NO: 107243 - DNA, 2318 bp, Cannabis sativa
  modified_base (1964)..(1965): a, c, t, g, unknown or other
agagcacttgtgcttccacctactgaagatacggataactggcttaagttcgcttcattatgtcggcaaagtggacggattagtcaagctaggtccactctagttaaactcttacaggtcagtggtgtataatggctttattgaggttgctattaggtcatttctttgtttttgtttttgtgtgcacgtgtttgtgttttgtaccctgtattcagcatttttctgaaccctcttcagtatgaccccgacacatctcatgaaagtgtccggtaccatgggcctccccaagtaatgtttgcatacttgaaataccaatggtcccttggtgaggatcttaagcggaaggaagcatttgctaggctgcaggtatagcatatctgcatttatctttgtcttgaaatgagatgatgaattttagcttcacctagcattgtttaaatctcagttttctcatcgcttgttttcttgtctgttgaatttctgttacagaatttggctttagagctttcaacttcaacaagcattcaagttgcacaagcaagcttgatgcctggaaatagctcaagtattcctctcattgctcgtgtctaccttaaacttggagaatggcagtgggctttgtttcctgtattggatgatgagaccatacagggtattatgtttatgacaacagttttttttgccttttattctttaattatttccacttttataaatactagtcctactgctgaaattctgagaaatttttgtgaccatttttagtttcttactattactttccttagaaaacattttaatattgttttaaaatctaaggtattatgcttataacaacttccttttttgtgtaatataattaaataatttaattgtgacctttttttaatacccgttctggcgctgaaacttttgagaaatagttataaccatttttagtttcttactttgttaatttctttagatagtgttttaatattgttttgataactttgaattatgcagaaatcctccctgcttttcgtaacgccactcattgtgctaataataaatgggcaaaagcctggcataaatgggcattattcaacacagcagtaatgtctcattatactttgagaggttatcccaatgtggcagcgcaatatgttgttgcagcagtcactggatattttcattcaatagcatgtgcagcaaatgcaaaaggtgttgatgatagtttgcaggtatatgatattccctcaatcaaggcattgacatgttcttgtttatctttctataaatattggttgcactttctgagctggtattttctcttcttttatttattttgaaactaatttttataatttttaaatttatgtcaaatattaattgtgtagatttactattcgaagttcatatcctcaatcagtttttacttgctttgagacatgccccctattgattctaggaaataattctcacttaatggggaaatactctgttttccgatagcataaaattgaaagaaatagtcctactgtaaacaatagtgaagagaatcgtgtgttgtatttcatagaatagtataaatttatatacaaagttaggagactaaatgaaaaactactaaatacaaataggaaactactaaatacaatttaccttaatttttacaactaatatacaattaatattctaacactcatcttcaagctagagcaagcttgttagaaagataatcaacccgcaccccattcaaagcctttgtaaaaatatctcttaattgttcttcagtcttcacatatgttgtggagattaggtcttgttgaattttctcacgaacaaatgaaaatcaatctcaatgtgcttagtttgctcgtggaacatgggattcgaggcaatatgaagagcaacttgattatcacaccacaattttgctggaatagaagtcttaaattcgaattcagtcaaaagctgataannccatattacctcacacacagactgtgccatagctctatattctgatatagcactggatctagacacaacattttgattcatactcttccaagagattagattgcccccaacaaatacacaatatcctgaagtggatcgtctatctaccttggagcctgcccaatctgcattagagaaacactcaatctgggtgtgtccacgatccttgtaaactatacctcgccctgatggtcctttcaagtaatataaaatttgctttaatgttgtccaatgatgaattgttggagaagacataaactgactaatgacattaattgagaatgcaatatctggacgagtcacagttagataat

SEQ ID NO: 107244 - DNA, 2108 bp, Cannabis sativa
taaggtgtgtgtgaccggtccatataattgtgtatggctaatattgcagttcattgagacaaaattattggctcaacgaaacatgatctattattgggcaagaacttgcttgcaaattaagtgttacttactcacgcttaattaattttaaaatttattcacattgatacgtatgtaaaatgaaaaatttataattattgcatatatatggtagagtaaaattattcaattattacacataacagcttaattgtttattgtaaaaatatatatactttttgtaaccttattatattaattagcttaaaggaaaatacagtaagtcatttccttcttccatatttatagatatattacttaaaatttaattaaccaacataatatatgtatgtaattgaactaaataacatcaagaattaatgttcagagaacatattgaatgtgcggtatatacaaaaatgaaaagaaaagaaaagaaaaacattaacacaaagaaggtatatgaataaaaaaactcaataagggaatcacatagctgtgactatatatagataagatatgtaccaacaaatagatggtatatatatatatatatatatgtatataagacttgaaataaaactaaaagataaaacaaagaaagatgacaatagtaaagacagagagtcttaatcagtgaccaacaccagggcttggaacatcaccatattgtctatacttgtcatagtcatcaccaggagtaacttcttgatcatcttcaggattactatatttatactgatctttcacatccaacggctcagctacttccacgtggcacttctgatttagaacacaacctttgctcattaatctggcttctgctattgctactgcttttctttcaaaacatagtacttccaaggacataagagccaaaactataagaattgtacttctcatgacctctcttctacccatatttttcatttttgagaacacaacatatggaaagagtagtagtagtatatagtagtagtagtagtgttgaacccttttagagaaggaaaatatatatcaaataagttgatgcccggttcaaattatttatagtcatcaccatatatcatggtatcattatctttataaagtaaaagtagctaaaactattatagttttcataaaagtattggtgtctaatgaggaccacaccacagagttgatggacatagaaaaacaaaccccactttgtttattttactttggtaatagtatcatcatcataataataaagtatcattttttctgattttctggtctttgaattagtgtctattataataaatactctattaatatctgtctgatttagtagactttagctagctagcttgtatttcaaaaaacaaaaagaaaaatggttcagtataatatcttacatagaaaggcttttgtttaataataagattttgttttcaccaaacctcagaaagcatgattctgataataaagagctagagaagaataccatatatgtcccattttttgtaatgataagaaaaacaaagctaaaataacaggctttctcatccaatcagtaaccctcttaatgatggattagaccaaattggtctctatctaccacaccttaaaatgataacatttaatgtcacatgcatatataccataaatcaaggatcaaagatatatacatatatataattaatttataaaaaaggacatgaaagtaatacattatattaactaactgttgggttgtgattttccgtgaattagtaaataaaccatgttcatatatggcctcgttaatgaatgaaataataaatacataagattcttataatttcttatgagtttccgagtaaggatttaggaatcatcacattcacattcatatatttctgtatatatatcatgtgaaatatgcactataataaaagtagagtaggtagtgtccaaaagtttaatacatagtcaaaactttggacatgagaaagatataaactcactctaatataatatacatcacctaatatttaaagtattattttatgggatatatctttatatattaaaagtgcatatctaacggcatttcttggtttaac

SEQ ID NO: 107245 - DNA, 2103 bp, Cannabis sativa
tatcttgttttctcgtgaaccaaatagaagactgacctggtttgattctgatacggaaggataggagaggaaaaagatcaggagtgagagattgaaggtgaggagtgtgcaaccgaagtccatgggaagcaagctattctatttctaactcagatcgatgacttggcatttgttttgtcctgtcatttatagttgtgagaaatgctaaaaaatactcatgctcactttctgctctatcttttcaaatacatcactacaattttcctttttatatttaataacatacttttacattatacttttgtcatctaaagagtgatttacttacctctgtgaaaaatttctaaatatttgcttttgaaatgccctttgttaatggtacaagttacctaatccttatatttctaggcaatactattatcatttcaatacacaatgcatataattagcgtaacatgtattgatgctttcaatgagaaataatatctatcaaaagattgaaccaatgactatatatatactgcatatactaattgtagaaaatctaactcttcatactagaagatcaatgatagtaaaaactaattctctatacataatgaatttgatcaactctcaaaaattgaagcattatatatatagacgtacccctttaattaaaaactataaactaataaaatgaaaattagcttaatcttatcatacaactacagaataaagaactcaactttcacagaaaaaattattcattggttttatttttctttcaaactcatatgaaaaatcaaaactttacattgaagaactcaactttcccagaaaaaattcagatgggttttgtattttcagtaattaaatgcttcaacctcaaattcaaatgaaaatctaaagggcatacagagaagtcaaatacagagatgagagttgagaaaacataccattaggatctgaatttattgattatgaatgagccagccacatctcaagttatgaaaagaacacaaaaagatcactaaatgcaaacataaaaagtcaagtaatcatctctgaacaaattagtatctgcaaaatttgactatatacatatgtaatacaatctggtacttctactacacaaaactaaagattatggttgcagagaatgagccattgattccgagaaccaaaatcagttactgctaattggtacaaaaataataccagtactagagaggcaaatcaagaagatccgtacctttgtcgtttccatctgcgagtgagggagctgcgtcttcgtcgtcgactcgtttgtgagtgaggagtctgccgttatctatgagtgagggaggaagatttgggctgttgggcggagccggagatgggcgtggctgttggctggcaccggcggcgacaatgagatgaaagagaggaagacgagactatagtttaggtgtctcaaaaatgaaataacaaaagtggtttgactttgggttttccatttcaatgttccataataaaataataatatattttaaaattatatataaatattaattagatgatattagatgcttattggattcgatggttcggttggattcattagattcacatgtcaaccaacaaatttaatattggactttcaaaaatattattcgatccgattggatatttaattttttgtgatcggttgttattggatcagtaggttgtattggataatttctacacagtcttatctatatcattaaattaatattatttttattttctacactataaaaataataatttttgcacatatttacattatacataaatatcatgaaaataaatttaaagaatgcactatttattctctacatgtagagcaagttgcattaatttaagtacctctattattattacaaaacagagaacaaaagaaaagaaacaatggatgaattgtatattattaaatccatcgagattagaaaagagtgggtcttatatgttagacatttatttgtatagactaaaacatacatgattatgaataaagtgcgttattaatcaaacatatatacactatgaataaggaccgaaatacctccagccattgaatcttgagcttcaaacccacat

SEQ ID NO: 107246 - DNA, 3117 bp, Cannabis sativa
ataatgtatgagaaatgttaacatcttggtgcctatcatcttccgtaatgtcataccgttttagatatatttaagtattgagtctcatataacttaaaaaatatatttttttaaaaaaatattaataattaatggtaagatgtcacctatagttagtaggtacgcgctaatagcaatgctcataatatagtgataactaacatgttgctggccatttacttaaaattataatcacacaattgacctatttgattaaacaatcatttccaaagcttttaatttaaatagtcaaagcttattatattatcatataataaaacttaggaatttggaaaagtattgtgtcttttaaatcaacggtcatgaccaacttaccaccatcttttctgccatttatcatgcctttattattatttttttatttttaatgatgcactttcttgttaagtaaaattccaccaatgaaaaagttatattattttaattcaaactctatgactaaaaaaagttaaattattttattatcgatttgagttatatataatttctcaaaaacaaaataaccccattattaacatgtaattttggtttgatcacactataaataaactaaataaatggtaaaattaattgaaaaggaaaaattagttttattacattatcttattattatttcaacaaaaaaaatatatatattattttgaaaaaaaaaaaaaaaagctgttacagatttatattttctaagagatatttaagcctactaaatttccttaattaatgctattaaaccagaaatagtattatagccagatagatagttcactcttaatatttttcttctacttaataaacaaaaaccaaagattaatatcaaagaaagttttgtatgtactttaactaaaaaaaaagatcatatttttattaatcatggctctcaaggatcttcctttcaagctcaaggtataataaagttttgatctttatttcattttcatcttccttattggatttacagagtcataatatatatgagcagggttttaggctgaaaagattgccattgggagaagtgaataagaagaagaagaagaaaagagaggtaagaatatgtaagccatcatggatgacaccaatctcacatggctaccatgtggttgagtctactcaatctatcagagttggctcggacgagtcagaggctgactcagtggtggtacaaagagaacagtttgatcaacttgaggtttggttcttcggaatctccgatgctaagattggtgatggagtcaacaactacattcaatcacattttatggacaaaaagccaaaagaagtatgtaaatttgtaacttgttcaaaagaatcaaattattgtcactatattagatttgtaaaaatctcatctttttctttgtcttttgttataaatatgtcatcttttttatgtggttgtgtagataaggagaagaagcaaagagacaatgaagaaagcatatatgggtgttagaggaaagatgagagagactattcagaaaacagaagagagagcaaaagcagggtcagtttcagtgatggtaatcaatggtgataagcttgtaataggtaatattggagagtacaaagctgtggtttgtaaaaatggtgtggctcgttatatgaatcctcaacacaagcatttttcatcccctaaaccacattggtctggtagatttctttcaggtaaaaaacaatttttaattttcattgattgaccattttgatcatactgtaactaatttggttttgtttgtattgtagtgaggatgttatcatgtcattctggcaataatacaatgcagtctaaaagctcagaggttcttgttggggttgagagagttgattctgatactgaatttgtcatattagccagcactggcatttgggaggtaataataatattttattatattgtttgtatattaaaaccgatataataattgtaaaaataaatagataagagcatgaaaatggttgaacttgaataggcaatgaagccacaagaggcagtgaatctgacaaggcacttagaggatccacaagaagctgcagaatgcttggcaaaagaagctataactagaatgagcaagaccaacatttcttgcttgatcattagatttgattgaagttattatcctaccactttctcactctttgattttcaagacaagtgtaaaagtaggatctttgttatggaagcttttaattgtggaaaacttcaatcatttttctttttaaatattaattaaagagaatagatgtaagaaatattttagtatagtatgtatgtaagcaaaagctaccaaataaattaaaagaaatgaaagtgaacacaaatgtgggtggtggactgtacaaaaataagattagatataaatatatgatgtttgttttgtcaatgaaacaatacaatacaaaagaactgaactgaactgaacaatcttcataagtatataacaactctatgactacacctacaatgctggaaaatgaagaacacagctccaaacctccatgtcatgtcatgcacggcatgccatcatgttgccatcttcttatcgctacttttacttcggaacggtgatagcaaggagaagtggcgggaagctgcacccgaagaaattaaaccacacctttggtgtcagataaatttgcaaataattttcatgaaatttcaccgaagaaacattgaagttacattttgcacttacgcttttgtggagtagtgttggcagtgggagtttcgtcttgagatattagattcttcaatgtatgaactgtttacagaaatgaaaacaacagttaacttctgtattatgatatcatacataataaagaaaggaattccatgcattatgagtaacatgtcaaataagtattttattccctgttccaaaagttacttctttttattttcatcttaaaccccagaaattcttcaaaccaaaaagcaggcttagtcttgagttcacaattggagcttattacataaccgctaatgttcgggaagcatgaaattcttggttaggcaacaactaacacatcagaccataaggaagcattagttttgctttctaacga

SEQ ID NO: 107247 - DNA, 758 bp, Cannabis sativa
tatataggtagtgagtagtgagactcattaataattatcttctctttctttcttgtgtagatttcataagtaacttcgttaattaataaactatttaattaatggaggatcccatgagtgataaatcatcatattataatccttataccacaaaatatgatgatcaaaccaattccaaatcattatggaggatgttcttaatattcctttggtcatttgtaggtttgggtttctttatgttcatcataacccaattattattcatccctcccttgcctcttttctctgtcgccataatctccacaacctcctcctcctcttcctcgatcatttacaacgcctcatccaacctctacacatttccgaatttgaaagtagggttttggaccaaaaaccgagcttttaaatccatgtattacaaaaacattactttgtttgtgtatcaattattgtctctaaaaccttatcttttagagttagagggtaaagagactatcaaaccatattattttgggttagagaataatgagagcaccgatattttatgggttactctacacaacttgacagtgcctatcgacaacgacaactacaaaaggaaacatactgatgatttttgggtttcggaaagattggtacttatgtatcgaggtctacttatgtataaaggcgatcgtgttaggcctaaacaagtgattaatatgaaagcttataattgtagaaaagttaataatatactatttgtgaatgaaacgacg

SEQ ID NO: 107248 - DNA, 4248 bp, Cannabis sativa
gagagagagagagagagaagggatagtgaagaggaggagttgatcaaatgagcctttaataagttttggcatgcttttccctccaaaaatttagtgggcaattactcttcctataaaatagccatgtagaataccaaggtcctgtagtgggatcatgtgcagcaataaaaaaaaattcccataatgattagcaaaacatcattttttgtcatgatgtgggtatgtgaaaggccaaatagctgaccggacaatagttgcttggttaaggttttaattgccaaagctgaagttgaaaattccttatctgtacaaacatttgcacaggaacttgagggaaaatgttatcacaattttttccacatgatgtggcatgtccacatagacaagattaatgccacgtggaattcagtgtgtcactaggcgagccaatcatcatgcataacatatctattgacgaggaatccaaatactcattcaagatgaagttataagaaaatggccaaccaggagggtctgactggaccacccctggctggccaaggaacaccatgtgccggccagccccaagcaaagggtgtgcgagccagcaatcgtaaagggtgccaaaaagaaccccaatcgattgagatttctacagccctcatcctgcacagatcacaacccaagttcacccatgagacaactccaacaacccacaaaaataaggtttcaaccccaaaatatctacctatcttttaaggatattaattaattatttttatagcttaaatatatgttaaaaatggaaatatctccaatttttaagggatattaacctatttgaatataaatcttttgtaagctctaagttatatgaagatcattaagccatatggagaaaacctaagttctatgtcccaaaagacctagagcacccttgttttctttctctcatgtgccaccttcaggctattagaaaatcatacattattctcagtattgtaacattcatagagaatcatactagaaattgcaaggtaaaagcctgtaatttatgtggtgttatctctcaaattaatacaactaaaaggggagtaggtcattacccattaaacgagagggttgaacctctataaatcgatgtgttatttctttattcactttatttacttacacgtggtgattattgatcataaaaaaggcttcgctgtcagttgaccaaatctaatgtgaaccacttccatgaaaaacatgactctcatctctgactacatgagcatgcccatctgttctaactttgacaaatacctagaacttcctcaaagctttggacgctcaaaaaatcaagcatttcattacatcaaagagtgtgtctgattctacattttgaattggaagaataaatgtttctccaagggcaagaaataagttctcttaaaagcaataatgcattctatcccttcctatgctatgtcctgcttcagactccatgttagcatctgccactctttagagtctatgatggacaatttttggtggcatataaataaccataaccaccctaaaactcactggcacagttgggtcaatctttgtaaatctaagaaggatggtggcctaggtttcaggtctctcaagcacttcaatcaagccatgcttactaaggaagcatggaggctattacaaaactcaacttccctcgttaccaaagtccttgctaatcgataccatcctcactcctccttcattgctagtagggttagcaatgccccttcattagtttggcgaagaattaattaggagaaagatttacttaaacaaggcctgtgagctaagattgggaatggtcaaaacactcaccccactctagattattggatccccaacattaggtttgtgtccacttctcataaccccctagttaggttgctcttttcattaacaaaaacatgacttggaaatcttctcgtcctaatcaattttccccaagccatattattagtgccattcttactatcccccttctgctcacactagctgagaacaaatttatctggaaatactcaacttcaagatcttacactgtcaaatctggataccatctcagcttctcaagtgacatatctcgtaagaaaccctttacctcccatccatctccttggtggaaaacactttggtccatcaacacgcctttcaaaatgaaacactttgcctatcgagccacaaaaaattcgcttcccaccctcctaaaccttcataaaaggacaattgttccttctcctattgttaaaaacatgcaacatatcaagtcttttaatttaatcattttgcatcttttaaatgttttaactacagataagttggagttttttgtttgtttggcttggcttatttggcatgataggaatgcacttacccatgggaaagattcagacggtcaacacaatcacttgctagacaatgctagatctttgattaatgaatattcccatgctaaagagccagatcaagcccttcaaatagatcatctcacttgcccaaaggcccctgctacttggactcccctctcctggttttgccaaactatccactgatgcaaccattgattcctacacaaaaaagttaggttttgtaggagttcttcgtaacaacaattgagaaacaatcattgcccttgcagtctcttatcctggaattaggaaacctcatatccatgaagtcaaagctctaattattacactgaagtctcagtgaagacttcctcattcattttatagagacaaattgtaagacaataattgattctttgaacaataatatggattaaacatatttcccaagtaaggacacttctttcccactgtcaaagtatcaagattaaacatatttgtaagattgaaaacacagcagcccacgatttggcgaagaaggtacttcagcttgatgaagatacctgctagattggtggcgaggcttgcattataccttcagttctatcttcctcgtagcgtagcatcctccttaccctagaaaatgtaaatgaaaatcttctttaagaacatcaaactaattcaaattaataaaaaaaaaaccccataaagtacgaatacctagacaattataagcaaaaagaaaaaaaaataaaaaataacaataataaaatttcaaactccattcatgaggaatccaaattcaaattggatttgaaattccaactcctatatatatataaatattgttagttagatatatttgcatgatcatggtcttaaagaaacccaaaataaaatatgaatgacgaattgttaatcataaacttttaccacttatgttcttcatgaatatgaatacccactgagtatccctctgcccagtcgatggagccatctccgactatggatcttcgaaatcgacatccccatagagatcctagaccaacaaaactccccaaaaccccacctccttctctcgttctctctcaaagccatcctcgttgtgtctccctctttttcgttttcaagatttgcagaagttcttagacctgttaaccaagatttgtgaagaagaataaagggaatgaggttgaagaagaagaaaagagatgttccactagagttggacagagaatcgtgtgagagagaggattcacaagagggaagaaactttaggggtttgagattttgaagggtgaatatctcgattatagacttagcttgagtcgatgatggccggagatggcagcatgatttcgcagaaagtttgcttgtgtgcatttgggaaagaagacgaataagaaggagaagaagagcatgaatcaaaggcaatggcttagtggatttgtttttaattattgtttaatttattttaatttacatttttatttcttttaaattaattattaacaaaagaaaaatattggagtttttctttaataatttttaatcaaaattataaggtggaccaataatacttcaatacgtggtaaatttgacagcaactaacggactttataaaataggtacttacacttttaagaatatgaagcttggggactaatactaggggtgttcatcaaagcacacaaaccgccagcaacgcaccgcactgcaaaaaaagtagtttgaaattctttcagtgcgatcgcgatttgaatttttcctaaactggatggtgtggtgcgctttgtagttttgaattgttcatatgcggttcaaactgtaccgcaccgcacattataaaaatactaatttttatagtgaaaattacatg

SEQ ID NO: 107249 - DNA, 3164 bp, Cannabis sativa
ctgaagttttggcttaagtatttaatagtggtgtcctctctcaacactgatttttgttatgcttcaaattatagaggcagaaaagctttctggtctttcatttaatctgtgtgtttcttagttctttcttttgttatcaaaagctgtgttatgattgtctttcttgatgtaggtatatttcgaagactgttaattggtctataatgatgtcattgttcacggtacataattactcgatattcttttgatcatgatatgtattcaaaataatgtttcaagatgagacattacatgttggctttcgatacatctagtaaaaatcttttgttttacaggttgtgcccgcagcttcggtgtttggttcatcgtggacagattggcagcgcatatttgctaatacaaagtgagtttcatctcatatttagtactatgcgacttgctcggtcatttttacatgaatcagtttcttgctcaccggcaattgcctttgcatttagagaattttcttctgctatttgctgctgacataaaatttaatctatgaatatgcagaccagttggacctatagattatatgatttgtttaccagcacatggagctgtaattggagcatggtttggggcttggcctatgccacttgactgggaaaggccttggcaggtacgcatgctataatcgagtttttatacatgtgtgtgaaaataacaagcggggtagctcaaatggtcagacttgtgatttacaatctcgcatggtatgatagtaactgctatagttttccacttcataagtattgtaggatttggcaaatttcgaagttgggcttaagtaagtgagtttgcaagacttttaagtataaataaaatagaataaataagatttgtctcccccaaattatgactttgtagagttgcctttaaaccttttttttttgttgcaaaattttttccctgaagtattaaaatcgtttcaaatatttccttttacttacattctgttgttgtatgtcactaaattgaatttcgggtagttttaagttctaagccatataagcgaattgttttaaaaaactagcagaatttaattgtaggggaatatttgcaacaatctgtatagttcggagaatttttggaacaaaaaaaaaaaagttcaggaacaaaactctacaagggtcgtagtttaggggatttttcttttatataattattcaataaagtattgtaggacactacacacacataaagacaaggttattttctattcatagtttgtttagtttatgtgatttgttgaggtctgaaatggtatgttaacctgtaggaatggcctatatgtgtgagttatggagctatatctggataccttattggaatggcggcatcgttcttatttgtacttgtacgttgcacattgcatcatacgaaaacagactaattagtaaaatgttcttttagaaaaaaagaaaagagaggaaacaacacagtggagaggagtagaagtaatcttacaacaacaacaacactgagatcatagggaaatttagttgaatgtagttaaacataaaatgtttgttgccttttgtgttggctttgttataaattataacttgttaaatgtggaatttctcactcacttattttgtttcctcttggtccatatattatagctttgtatatgtgaaagctagaagaatttgattacttttgagtacaaaattttaatttttctatctagttagaaaatcgatatcaatgtatttatgtttttcagaaaatgtgtatgagctaggaaaggttccttcctttttcttatgttttttcatagcgtaaaataagagtacagctgttacactatgaaatagtgtaggggcttattagtaaattgaaaatggtgtaaaagtctataaatatgtaattgtatagttatcgtgtaatatggattgagaaaatagaattttagttcaattgggagattgaaattgtctcaaagaatgcatttcgaagatttgtcctgtctcgaagagaacccgatacctaacaatagctttgaagaatctatcaatgcaaggccatttgattgtataaggtttacttagtatctaatggctatttacattacttttcctataatatattgggatcaaaacattttatatcaattactatgttgatgcttaggagggactcaatcttcagactttgtgggaacaaactacatggttgaccgcttgagctcgagctacatctctcatgtggtcgatttttcatgtattcgataattgcactttgggattgcgatgctgagtctcgaaattccctttaatcgcattctagcaccgcgaaacttgttttcgtggtgttatgatgctttttgacaggtctagctctccaattgctttaaaatcaatctgaaaatcacctaataaaccttcaaaacacagtgatcaaaactcaactacaaatagatttagactcaaatttcagactttgtgggaacaaaccacatggttgaccgctcgagctgtttctcttggtggtcaacttttcaagtggtcaatttttcatgtattcgataattgcactctggcattgcgacgccgaatcttgaaattccctttaatagcattctagactcgcgaaacttgatttcgtggtgttatgatgctttttctcaggtctagctctccaattgctttaaaatcaatctgaaaatcatctaataaaccttcaaaacacagtgatcaaaactcaacaacaaataagaatttagagaataacattaaacaaaacaacacattgattgtacttcaaatatctttatcatagacaactttttatagaaaattctaaacatttaagaagttccactttagcaagtttataatattaggttctcgtatcttgtcatatcttaaatcttttctacatcaactttttaaactctacttaataaaagtacttctgaatagtcatgagtaagtgcaatgtgtagcaaagtcaatttgagcctcattaggtacatgtctatattacataatctacacctattgatatgggcacatgaaaaaagttacagtaattaacatgccataatctgttccttaaattctcaaaagcataatagtcacacacatatatggtttactcaaatggtcaggcatgtg

SEQ ID NO: 107250 - DNA, 11000 bp, Cannabis sativa
  modified_base (6622)..(6629): a, c, t, g, unknown or other
  modified_base (10938)..(10939): a, c, t, g, unknown or other
gagagagagagagagagagtcatataagagactagatattccaatttttatttttaattgcctaaatgaaaactgaggggataagagtaattttccaatttaaaatctgcttaataaaaatataaaggattactacaatccactaatcttactaaaagacaagaataaggtaattttttttacttatttgccctttttcttctctaaaaagtaaacctaaaaacctaggggtagtatggtccaaaaccaaaaccctgaaatgatcctgacattctaaatgtctaactatattgcctcgctatttctaaggtactaaaccataatagagtgactctataggccatacgtcgcattccactgttatcgagcataaaatataaaaatcataaaatttcacatataccatatttaatacacctagaattcaaatatatctccataatcgcataaataataattaaatatctaaatctgagattaagccctaattatctattaattctcatattacagttgagtggtcattataattatcctcccgttaaaaggattttgtcctcaaaatctaacctaaacaactctggatattgagccctcatattggactccaactcccaagtggcttcctccaccttactatttctctagagtaccttgaccaaagttatcgtcttgttccaaaggactttatcctttccatccaggatcagcaatggttgctcttcatatgagaaatctggttagagttctaggttttcataactcaacacatgagtgggatctgagacatatttccttaacatagaaacatgaaatacattatgaattgttgatagtgttggaggcaaggctacacgatatgcaaccaatccaatcttcttgagaatctcaaaaggccctataaatctagggcataacttgccctttttcccaaaacatttaatctccttcatcggagatacttgtaagaatatatgatctcctacttgaaactctacattttctacatttcaaatctgcaaacctcttttgcctactctaagaggcaagcatcctggccttgatcttctctattgcctcattggtctgttgtactaactccggacccaaatattttttttctccaatttcatctcagtaaattggagatctgcactttcttgttagtccttacttgttggatctcatagccttcggtttcaaagtaaagtctttgatttcctcctttgttttaagtagcgggtacatttacctttgcatggtttcgtggcctagtacatgagagtgatgaggagaatttggtggaggattcttgttagttctcttggtattctaaggtcgctccacattaggtggaaggcccattggttggcgcccatgagtttgagtcctttcagactcttgctcgaagtttgcttccttctagggagtctcaacacctggtgtttgcttagtatttgcacggttaccaagtgtggtagtagtgttccgtgcattaaggttttctccttgagcactagtccccacttggccagttggccgatggggaatctctcttaccatctcaaaaagacccatacaggggctagtcctgtgattagagagataggcttctctgattcgttgacacaagttatctctttgctattcctgctcaactcgttagctctcaatgtttcgttagttctccacaaaccaattttaaaattgttcatgttgcttgtcgagagagtcttgcagttattattgtaggtcagtcataatttggttaagttgttcaacccaaggatcagcctcctcggggtcttatagttccatatatggttcactaggtggaatatgctcggtggtgttagtaccatgagcagttggtggccttgggggacgagaagtggagctagtttcgaggcctacacctagcatcttagtcccatcaccagcttcagtgactggcgtgcccccagtctgctggctagttgttgtggatcttgtttcaacacttgaggagagtgttgcaatcatcttgtaagtggcttccttgagttgtggctctcaatgaaagtaccaaaatattgacgcaaaaatctagacacagatctctgagccacaccagctcgctagattggcaagaataaattataagttaagtatatatgagagacacaaggaatttatagtagttcactccgtgtatcgcgacagtaatagagctacgtctatttcgagttttatttctcacgagatggattacataaaaatggctaagtctgaatacactaatttttagagagatatgctctgaccttatgactacttttcttaacttaaaaatgagctagtggacctctccttttataggtgaaggaggtcctactagatgggaataaaataatccaaaaaatatgaaaaaaaatatatttaggttatttttgaccgtagatgataatctaatggtaaaaattaattttggaagttgattatcaattttcgaagcttgagtcgcgccagcgggacctactctgggtaagttgcatcttaaatttgtaactcccttgagatgaaattaagagttaataactttagaattacgattgaagcgtgagccaagactttctagagcattgaaatagctttaaaatgaaagttgaatcgcatcaatcaaattaatattgtgtgaattattgctattttactgaaggttgttctgggcccagcgcccaggttgacgtgtgatgtcaacctcgatgttgggtgagtgggaaaacgtgttgagaatgtattttttgatgcttaagtgaattctaatatcacttagtccatttctgtgttttggtgaagctagtcactaaatctcgaagatgctgctgttctacgaaaatgggagactcaaaactacttagtttttgagtaaatcaccttgtcagaaaggtgaaaatatgaagttttgaatttaactcttatgacttcatggctcacagttatgatgaaaaactagatgaatggtcgagacgaaatcaaaattggataagcaaaacctagtgcaccagactattaggattcttgagtagagatatcgtgatagttaattaagttaattttatcatcactcgagagaggttaataaattacattaggattcttgaaattacaaattataaaatagattgggataatcggtaaattgagattcatagttggaaataagaaaatcaatgctctatgtctttatttttctattaaaattgttgtttgtttgtttacttttcaattactttattattccgttctgaattcttatttacttttaattctctaattaaaactaaaataaaaaaaagtatagtaattagtaaaatttaataatcaatccttgagaattcgacaacctttctataattaaaactttgttataacaatattgtatgcttgtagtaaaaattgtgtatcactctagatattgttgtttcttggagttgtgatttttttgttgattaccaaagattagacaagagttccagtggctttcactcggctgggaacttgccttcaactccaactggtccttctaattctatttgggtgtttcctattatgggagctttgaaaataaatattgatgtcgctcttgattcaattgatgatagatgtagtttgggtatggtggtttgtgattctacaagtgaagttatggaatttgctgtttgtcacatcttatgtagtttttctcctaaaatagcaaaagctctagcgttataaaatacaaccatccaataccgcctattgggttatcaacatctatttgaatttgattgtttgaatatgatactgaagtttaataatcaagttttttttgacttcttctttgggtttagtcttattagattttagacatagttttttctaaatttcattatgtcagtctttctatttgttctagatctattaatgttgttgttcatttttttttggctaaatatgtcttgttagaaattattagcaatatttggtgatctgattatctttcttgtatacatgatttaattttaagtaagatgaattaatataatcagtattcctcccttctcgctttaagcttgttgcttgaaaggtggacttgtagggttttttctcaaaaaaaaaatatatatatttatattacccattttagtaaaaaaaaattaatttaaaataaaaaacttaatttaacaaaaacaaatcaactaatttctttttctatagctagtagtactcaactatttttttttcttgatactttttgttgagattgatttgaattttgagtttttatttcaagtctaatattacttatttataaatttgtatttcagttttaatgttgattttattagttttttacttaaatattagatataattgttagtgtttgtatttatttaattctaaggtatattttattattatatttaaagaatttaaaactaaatttgtattaagttttttaattttaaaatagttattacttatttttttatataaaaaataaataattaataaagaatatcataaaataattttttttatctaccacatcattaaatcattctttttttaggggaattacttcatatattatttttctttaattttttttaaatttacggtttgggtttctaaggtggtttttctgctaaaaactatgtaggttgctatacgatttttggttgtgatttaagttgctccactaattttaataaatatttctatgtaaaattctgtaaaaatagataaaaaaaattattttaaagtgtaaaaaataaaaaaaaaaaaagtccttcatttctttttggaaggaagagataaaagtctacaaataccatatttgaggagttttttaaccaaacaaaataatttagcgaaagagtgaaaaactaaaaaaaagctttagtattagtgtttttttttttttttttgagagagaaccttttggacttatgtttgtacttatgtttgttcacttccgctacaaatataataatagttatattcgaagtgatagtaactcgaataataaccctaaaataaacaacaaactcactcacactaactaaacccttttggaaaataagacggagataaggaaaacacacacagacaaagcttccaactcctccaaaacatggcgaggttgaggacggccatggattcggcgttctgggatttggacgtggctacgcctcgagtccttgaaggctccgctaaggctgtaccgggtgagccattccctatggacgctactcgagcaagtcgagctattagaatacagcaagtctccttcttgggaaatgggtttcctcttggcattatcccttcttactttcctacttcatccaaggattctggttctttgagttttcaatccctctttctaaaacccgccacctccaactggtaagtaataaccccacacacacatactcactacacttttgtttctctttcgttttctctagctttgtttggtttctcggaaaatttaattgggttgagatgttttaaccagaaaataataatgtgggctggtaaagttgcatagggtgtttgggttactctgaatttatagtgttgaatgaaaaaaaggagaaaaatatcattggttgaagtaacattaatcttttctagtttcattagttgttgaatgacttaataacatgttattgttgaatgaattagtaaaattttagaaaagttattttgcttatgtagaatttcagagtaaaattttagaatttcagggaattcatggactttgttccatttgtttgcaatgtagtaatttttttttttatgataattatgatgtcctgtactagacatgtgaaatgagtcatttgaaagatgtttgagtacatctgattctgatctatgtaagtttttattgttcattcagaatagtatttccttgaagaaaatttattcaatgagttttcaaatatgggttactgatgatgatctacatgactattactgagtataggtgggttggatttattgggcagttccgaccgaagaaactgatatcttctataaaagctgaatttacaaatgaggatacagatttcccttctttcaaagatgtggcaaagcatgtattggaaaagtcactttattcatttggattatcaacacagttttctccaactccatcaacatacattaggtggagcacagaaagccacggtgaggaaaagcgacgccgccacaaaatgatgctatttcataaggtgtgtgtttgcattaaaatgttgaaaatgttattgttttgctccaactttttgtttacatagttcttttacctggctgcatagctgttcatatgattgaagttttgtatattatatttgctctactgttgtgcttaaatcatttgcctgatattttgattttcttatatccaattgcaaattcgttatctgtgtgctatacctattgcgtatttaatgattgaacaagatcagacgtttgagaacaaagaatttcatttttgctaaaaggatttacaagattatattttggagagtaaatactatttcagaccctatgttttgcaaaatttatagattagaccttctgttttgttaannnnnnnnatagaccctgtattttccaaaatggtaaaaataggaccctaagcttaatttttaacaatttttttttaatataaccaacttgaagacaattcctaatacaaatagatacaaaaaatgtaaacagttttgtcataacacatttagatcgaattattattgaattttattttgacaaaaaatcagttcagggtcctatttgtaccattttggaaaatacagagttcattttgtcatttaacaaaacagaaggcccaattagtaatttttacaaaacacagggtctaaaatggtatttaccctattttgaagggatggatggcccacatgtttcgctatcttatattcatacatcttaagtgaattaagaccaatttatgcttgacaatgtgttagatgcatacttcaattcaatcatttcagcctacaagtttcctacttaaaaatgtcaggttcttctgtctgtacacattccacttttaaacattaaaactctagtttgacaagtgacttttatctttggatgtcaagccttctcaatatgcatgctgcttacatttttattagttcttttgtttcaagtctaattagtttatcttcatctgcaatgtctttgcagctaacgagccatgatatcacttttgaggctgcatggcctcagctgtttattgatcataaaggacaatattgggatgtgccagagtcaatatccttggatctgttgtcccttgtttctgactctggatttcgttatcgccttggattgcataaaaacagtggtcatcctgatgcactaaatggccaaattgtcgatgctcctacatctcttttgcctggattatgtgcaaaggctgctttttcttatgagaaaagcagggacttctggaggaaggttcagacacgggaggatacaattgagaaaactgacagggggctgttttggcggccttcatatgatgtgcgtcttagcgaaccccattctgcaatatctggaattataggtacttactgtcactatccctcatttgtgtggttcattcatattgaaattttgattatccttgataaagttggcaactgtcttttcattattttatttctgtttttcaaggagaattttagaattttataactaatggattattttcttttccaaattcttatacttttaacttttttattacttctattattaggaaataaaatgctagagaccgaatcttaagtggtgactcggttgagagcaaaatgttagatatttatgacaaaatttccttgtctttgtttaaggagattgggagaaatctttaaaatgcttttttttttctccattcatatcttacatttggaaatttattcatttttcataaaggagccgaatgaattcaaagtttcacattcggttttaaattagagacgttaaatttaaaatgatgaattaacgtcgagtataacctctagctttgctctttcttatttgctggaagtgtttaaaagtgcttgatttgatcattaattctcttaagtatcaatataattactggtgattctcttttaagaaagttttttcgtttgaatatcattgttgaactttcatcttaggtggtacctgtgctgcctggtttggcgaccgggcgaactcaatgtctgctgaatcaaaagaatatgagggcatttctgcaagtactaagaagagaagcccactgagtgctgatttatttggttcagtttgctatactatccagcatgggaattttagaaagttttatggtgatctaaccagggtagatgctcggttggatatgtcttccgcttcatcttttgccaaaaggattctcaacggttccaaaagttctaaaatggcagaagatccaaattcccatcctaggctcaatttgacctttcaacagcaggtgctttttttttttttacaccttgcagtttagtttgtacaccttgtttggtgaaaatgacaatcccaactttgtgtttgtaggtaggagggccaattgtgtttcgattagattcgagattcttgctggactcgtcttccgggaaacatagaccgcatatggaggacttaatttgcagcttcacttactcctttagacttctacaatctgggaaagctgttttctggtattctccgaagagaaaagagggcatggttgagttacgtgtctacgagttttgacatgtttctattctctgtaccgtttaaatattttagttattgagtttttgaagggaattagctatagaaaatacccaaaaatgaaaaagtagaaggaaaaaaaggtcatttctgtttgaattttgtatgtctaattttattattataaaagcatttctcattttactttaaatgtgtagaaaatacaaatgttaaaggttcgtttttggcattacaaattggcaaaatagaagaacacaatgtttttagcctgatttaatttgatgtgatcgagtacaagagaaaaatatattcatcacatcaaatgtcatcttttgaaatgcagtaacagaagcgagagcgatcagaatcagaacaagaagctattgttactacttccataagaaggatcttagaacggatgaaagcatgggaactattgagagagacccatcaagaattgcatgaaacggtctacgaaaaatcgtactgtctacaaaagagaatttgtttatctgtgagagttgttgtcatatagcttgacgccatgtatggtagtttgaaccagctgtgggtagagagtcataaagggttgatcgtcgtgctgtacaaagtaacgactactggaatcgtccatggcaacgccaacgatgtctgctgcaatgacaacaattgccattgttgacagcagaaacttctactgtagtaaaactacaactgccacctccaggagccatgatggaaatgagtatcaacggagcaaggaagcgagcaactatgaaagcattgagaaaaggaaagaaaatgagtacgtagaaaaaagtggagcaaaaatgcttattcttttagcaatgcatcaccaatttgtatatccgctcttagttactgcgcaagctctagcagaatgctcctaagagaataacagtacctataaatattgaaaaggctcatatgtcctctaatttgtggttgataatctgtcttagtacatctcgggcataatcttagaaaaacgatatagtccacaactcaatccagagaattcattccacaaatattgtttcaactatttctctgtcgtaacaattatggtcacttggttactcttgttgtaagttttatggctcaatgtagatgttattggttgctggtatctctatttcagttaaggggtgctctctaattcacttatgaatcttatgatgaaagttacgtctattcttttaacagcagtttaatggtgtattgcattttgtttgccgtttggtataattgagtttaattgtaaggtgatgttaattccaaattaaataaattggaacgaattatcgaatgatgtttttggctgagtcgcggactatgtcgttgtctttaagatatttcgcaattctgtccgaagggtgcatgatagtttatcaaccacggcgtccctaggattaaacaacatttgtatacgaatcgttctgcaccgaatgatatcgcttgattacactccaaaaattgctctgagaaaaaccgtaagaaagaaaagaatattctttttgtgtgtttaaaaggatatgttctcctattgttctgatatgacttatatagagaaatcgatcacgataaaaaaggtaaataaaatcgtgagaggaacgttagtttatggcagtgaaaaactaatcattgattgatcgttttactgcttcaaataattaaatgataagattaattaagtaataaaaaatatttattttattaaataatttttcagtaaaaactaaagtcacaccacaccaactcgtgtgtgatgcttgacaaaataaagaacaatatatagttatattagtgatgtctatcttttgagtgatgtaattaattagtgatattgaaatggcgtttgattggaggtaatggaatgaaatgaaataaaaaagaattaatttggctaattagcaattttcctcccgaactttgacatgtactaaattatgccccttgaactttttgggcgttaaaaattctccctgaactattaagattattaaatttaaggacttttatctaattttagtaaaaaaaaattcaaatatggatgaaagctcaagggcatgatttagtacatatcaaaatttaaggggcatgatttggtagatnncaaagtctggggagcatggtttagtacataaacaatcacttaaacagtaaaattgaatgaa

SEQ ID NO: 107251 - DNA, 3283 bp, Cannabis sativa
gcagttaaggtaagagtttcaaacaaatgaacaatctctctctctctgtgttgaggtgttaggttaaccgatacttttgatactttaacagaagaagcaaccgaagaaacaaaaacagcagaagcagaagcagcaggatcaagcggatcaagaagaacaacagaagcagcaacagttgttaatgaatcaatctcttgttgaagtgaagcaagaaattatatcatttctaagcattctgggtttactatcctcacattcatacactgaggtaatatgagttatggcttgttcttatcaattcaaggtaggaaaaaaaatatattatatcgaatattgaccaatatttccctctacaggtactacagcagttcaaagataaggctttgaagcgagctgatttagttgaaagcgatgtgaccaacttgattgaagcgcgagcagaagctagaaaaaacaaggagtttgcaaagagtgatcagatcagagccgatttaagtgcgaagggaattgcgctcatggatctaggtaaggaaacaatttggagaccgtgtgtcccggtagaacagcaacaacagtcagttaaaacatgaaagttctttctttaatccattagcttggatttaaatggtgcattttgcatatcaaagtgcaaaaagtaaaaaaaaaaaaaactgtataattgcttagcattacattattgatgctgtaatacttgaggctttttcacttgttatgtaaaccccattataagttatcattgttttttttttcaatcaactcaatctcatagttttgtttaatacactttttttttagttgaatacccaacaaagctacttgaatggggatatttgtaaccttctcacattaattttatacaaaggtttttgtttcttatttattattttcccttgaatgtaaaaagaatcaattttctttgtttgaagaaaatgaattttccaccattttgataggactactatttcttacaaaaattggaagaaatgtcaaatgttattctatcacactaatgaaatattattacagagaatcaatggtttaataaagtcaacaatgacttagacaaggtttgactattgttcatctatgttcccaggtcaacactctaaagaaagaccttaatttatggaaatgtagacttggcttttcaatgtcattcaagtcaaatagatattttcataaagaggatgaactatgattattaattgctgcactaacaaaagggtatggtagagatttctctatttttaacacttaaaaaaaacaaaacaaatataactatgtatattataattatagctgtattgaaaataaaatttaaacatttaattacacgtgttaatatttttttttataaatgtgtaattaattattttaaattttattttgatattataaactatttaaaaaagttattttttattttatataagggtacaattaattattttaaattttatatttaatattataaattattcaaaaagatattgaaaattggtagaacacttataatataaatcttcatatagaaaaaattaagttacgatttatctaaatatgaaaaatataaatatcttaatttactgattaggacaaaagtgacactcctactataattgttcccactatacatgtatagcaaataaatttaaatttaaatctaatttaataaatgaatattataaatattttttgaaagttaaataaaaatttttattaataggtaaattaaacacaatccattacatgcataaattgctcatgagcaaaatcaacaaagataatcaagcatttatggtcacaaaaacattattcaaataactaaaaatctaaacataaagtgaactaataaaggaatatggatctggtgggattgaaacatcaacagttccttcaagcatttgtgtaacttttttcatagttggtctaaatgaaggatcttcttgaatgcaccaaatagcaaccataacacatttctcaacttttctcatgtcactcaaagcctcatcatcatttcccaacagcaaactcaattgaccatctctataacaatcattagcccaatcagccaacaccatttgatcttcttcttccatctcagcctcaaaattcctcctacaacatatgatctccaacaacataatcccatagctataaacatcaaccttaaccgaaacaggagtgtttcgaaaccattcgggagcaacataccctttggtacctctcaatgcagtagttgttctagtctgatctctctttagtagcttggctagtccaaaatcagctattcttgcattgaaaaactcatcaagaagaacattatgaggctttatatcacaatgtatgatttggtttttgcactcttcatgtaaataaaatagccctcttgcaatgcctaaagcaatttcctttctttgataccaacttggcttagaagaagatttgaataggaagttagctaatgaaccattgctcatgaattcatagacaagtaatctattttcttcttcattgcagaacccaattagttgaaccaaattcttatgattagttctactaattgcattaacttctgccttaaattcttcttctccttctcttacaacattgtccaactttttcactgcaacaaaattaccatcacaaagaacccctttgaatacaacggcgaaagcgcctcttcctagctcttcattgaatccgtttgtggcttcttccaactcttcataggtgaaactttgtaaattcatgccttccttgaattgggtttgtttagaaacttttgcttttctatacaagtgaaaaataaccactagtgcaggaattagtacaagaatatttataaggaaaaaatgtgtaccaaagagtagtgatgcaataacaactagtattgaatcatttctcttgtggggttgatctaatcttactttaataagagctttcccaccaacacttgaatccaattttccattagaaagaggtgttgtcttcttccaacactcaccatttctaaaaatagccacagcacaaaaacaatctcctaaacaagccttcctgcaccaattctcatccaccaaccgaaaatactcataatcagacagaggccagtctgtgttttccatggtgttgaagtagaaattttcttcatccttagaatctttatcacaactttgagcctcaaagttttgttggcaacctttcatctcatcattttgatctatgaaggagtaaccactcgggcacttacaactcggtcttt

SEQ ID NO: 107252 - DNA, 2176 bp, Cannabis sativa
  modified_base (38)..(41): a, c, t, g, unknown or other
  modified_base (1009)..(1010): a, c, t, g, unknown or other
cctttagcgtcgtcctgatcagcgtcggtagcgaattnnnnaaaaccgacgctgaaagggcttaaaaaccgcttctaaaggaggtttttgtagtagttataagtatatagttatttatacttagtttaagtttaaaaattaaattttcacctattaattacatttttaatataactataatatagctacctatatatataaaacacacttgtattggttttttatttagaaaaaacactcaaaccacaagggtgatgtaatgaattagtcaaaattcaaccacgactttgcaccgatcaagaacactactaatatctatagacaacagtcgcaactatggtattttttttctttttctttttccctatattgattatacaatatacgcattgccttataaagattatatatatgagtacatatatatctattatatatctatatataagaatattattggatatacatagtatataaccacttatatatattaagtccatccattggagtcggataatagggaaagagccaatacacatgaaacacatatatttaagaagaaagtggccaatttgagtgataaggataacattttaaaacatatataacgaaatgacaacttctcacatatttaacatatatttgtatatatatacgacacgatttcaaatttatgagctagctgtttcaaattacagaatatacatttatatatttcataccaagttgccatgtgtacgtaagggaagttgaattgatatatatgttaccaaattaattttgtagcaagaggtttggatagatatccatatgtacagatatgtactatgaaaatcgttgtcctttaatagaactggccgtacaatgctgtgaaaggctatcgattagttagatgcgcctttgactttgacccacacaagtatcaaaaaattgagacaaaactgtgtatatgcatataaattcattgatccatctctagctagcttttactaatatatatatatatatnnatatatatatattatatgcatatacaatacaaatatatgcagaagagaacccctgcaaaaaaggagaaatgataattaatgatcttgtttaattcatgttgtccaacttgtttttaaacaaatattagatttttttattgctaggtataaagaattatttgttagatcattataaatattgctgacaatacagaaatattaattgttgtattaacgttttataaataaataaatattataataaccatctaaagattacaaatttaattctgtcctggatcttaaaaaacatttatatgaaaagttaatgattttgacacagagagagagagacaacgtacataattcaggctagaaatcaatagggtttccttaaataaattgatctgttaattattataattatttttaattaatatgcaattgtaaatattgattatttgtgatttgtcttctccaatatattaatgtaagagtaaatagtgacataaatacttatagttttgagttaagctgcataaatttaataagttttttagtggtataagtacctaatatttgtaaaattgtaatttttttctattttcaatcagtaaagactctattttaaatttattaaaagaatatggaagtaactgatactacatgtttttatctagaccaatgatggccttatatgtataataacagaatctgtactaacaaaaattagagaaaaattatagttttacaaacttctgctaaaaataaatattagatttatgccgcttacaagctctaaactttaggtacctatgttgttatatctatagagaaatactaaaaggcacccaccagtggaagaccctcctatgtgtcattattgatattggtccaattaaatattgggtccatacagtttaatataattctctatttctacaagaaaactattgtggaagaaggaaagtaatgaatttcatgtattgtattaagttgaatcgatcgaataaaaatgtgcaggatatatatatacataacagaggactcaaacaaaccgactaaggcaaagacttaaactaactaactaaggcttgcagcgctaattgcaataggggtttttatacgatttttgttgtaatttaagttgcagcgctagttgcaataagggtttctatatagaattc

SEQ ID NO: 107253 - DNA, 3236 bp, Cannabis sativa
caagtgtcatacaaaaacagtataagacaaatgacaaatctctattcctcgacgcacgttaataacaaagaaccctaattttcaatccatacccgaattcctcaaaaacacacccccaaagccaacactttcagctcccaagttcaccgtttgatatctaatcaaaataatttcaataaaaaaactcaaaatttatggtaagaaagaaagtaacaaaaagaagccgggcatcatctatttgaaaatggagttggggtggtgagctggtcaggcggctagatcgatggctacttagcagcggggactgtcaacggcgcccggagctgggttctgggcagcgctaaagttgtgagaagtggctatggaggttgagtcgtgggttacactaaaacgttcactttcaaataaaataatgattgcaatgttaattagtagacgtgcttctccatgtttaccagatgttgggctccttcaataaccaaagcatttatgtatcagattctctgcttggggagcatattagcgtagtggtgcagtgcaactagtatttgttggagtgtttgtacttcattttgtggcaaaagccattggacttataactaaaaacggaacaatgagtagagaattagaacggtcggataagcgcgtaacctggattcgattcagtataagttgtaaaatgagcatatttggttccctcatgttattgggtactcatatctcagtgattctcttgttgcttaatggaggtaggaaatattgcacatacaattctcaagttattgcctcagagactcttcaagttgtattttcggcagcatcatccattgcagtgtataatgtggtaaagaataatctgattaaattcccctggctactaagagcatggtggcttttgagtttcttcatgtccgtgatcaacgtggctattgatacccatttgagaatcatgtatcatggaaagctaagattgattgactatttcaatttctttggtttccttttaaacttttgcctatttggcatttcaatcagaggaaaaacaggcataggacataatatcccaagcaacatcaccgacccacttctaaaaggaaaaagtgataacaaaaacaccgagaacaaaaatgaatctctctatgccaagtccactattctgcagctcattactttctcttggcttaatcccttgtttgttattggatacaagaacccgcttgaacaagatgaaataccaaatgttgatatcaaagactctgctgccttcctcaccaattcttttgatgagagcctcaagtatcttaagaaaagagatgaaactgagaatccatgtatctactgggcaatctttacatttgtttggaggaaagcagtaataaatggatgttttgctgtagtaagcgcagcagcttcatatgttggtccatatcttataaatgactttgtaagttttttaagtgagaaggaaaccagaagtctggaaagtggatactttcttgcattggctttcctcggggccaagatcattgagacaacagcacaaagacaatggattttcggggctcgccaactaggcctacgtcttagagctgctctgatatctcacatatacaagaaaggtctggttctttcaagtcaatctcgccaaagtcgcagtaatggagagataatcaactatatgagtgtagacatccaaagaataacggactttatttggtacgtaaacatgatttggatgttgcctattcaaatttccttagctatctacgtgctccatgcaaatttagattttggttctctggctgcattattagcaactttgatggtgatggcttgcaatataccgctgactagagtccagaagaaatatcagtccaagatcatggatgcaaaagatgataggatgaaagcaacttcagaagttcttcgtaacatgaaactacttaaacttcaagcatgggacactcaattccttgaaatgttggaagcattgaggagactggaatacacttggctttggaagtcgataagattaggtgcagttactgctttcatcttctggggatctcctacgtttatctctgtggtcacttttggctcatgtgttctgatgggcattgaactcactgctgggagagtcttagcagctcttgctacttttaggatgttacaagaccctatattcaatctacctgatttgcttaatgtgattgctcaaggaaaagtttcagcagacagagtagcatccttcctccaagaacatgaaattcaacaagataccattcaatatgttccaaaagatcagacaaaggttgatattgaggttcaaaatgggaaattcagttgggatgctgagtcaataataccaactctggatggaataaacttggaagtgaatagaggaatgaaggttgcaatttgtgggactgtaggatctggaaagtctagcttgctttcaagtatacttggagaaatgcaaaagcagtctggaatagttaagattagtggtacaaaggcttttgtttctcagtctccttggatacttacaggaaatataagggaaaatatcttgtttggaaatgaatatgttaaagccaagtatgacaaaacaattcaagcatgtgctttgacaaaagattttgacttgttcccttgtggggatctaacagaaattggggagagagggataaacatgagtggtggtcaaaagcaaagaatacagattgcacgagctgtttaccaggatgctgacatatatctattcgatgatccattcagtgcggttgatgctcatacaggaacacaactctttaaggtgagtttttctttccttattatgtgtttaaaattacttatacttgctacttgtgaaatatggtgattgaattgtctattgtattacagagaatagtatctatttatatgtaaagttaagagactaaaataggaaactactaaatataatttatcttaatttatacaactaatatacaactaatattctcacaaagcctctcaagttggagcatagatgttaatcatgcccgcttgttacaaagataatcaacccgcacccaattcaaagcctttgtaaaaatatctcctaattgttctccggtcttcacatatcctgtggagatcaggtcttgttaaattttctcacgaacaaataggaactattaaatacaatttactctaattttttcaactaatatataactaatactctaacacta

SEQ ID NO: 107254 - DNA, 2033 bp, Cannabis sativa
ttgatgctggggtctgtgttaattcccactttttaactaacacaaactactcgtctgcatcagttgggagttgatgcaaatattctcgagatttgtttcagctcgctactaacgtagcacccaattaatgcaaattctcccgagatttgagtcatgcaattttacatcagatctactacaaacgcaaataagtagtttatctcagctccaaactaatgcataaacaaatttttgtaatagtgtcacaagctttggtatactatgtaattgttgcatggggtctgacccttttctttgtgctgccttgtttggatgtgttctttatatgttggtttgcttatttttttttttgtaatcggcatatttgttattcctattgttaattttttgtaagaggcgtgataagtgtttactaagtacacaatattgaattattgggtgattgcatattcttgattaaaggcattttacgacacaaattcaagaataataaagtaaatatgagatccagttaccttttaggtagtttttgattgtacaactaattttattcaataaaacctaattttaatattttttcatatttatgtgcaccttaattttatttgaaaatattatcgtaagatgagaagaataaacataaggtttagggtttatttttttaagtatactgccacattaagtacaatattatgtaatgaatatatcgtaataatacatggaagataatacttttcatataatgatgacctatctccatgatttattatgtttgttatttaattagaataatcgttgatttttaagtgataaattaatttaaatactgaccaagtaaaaaaatattagaatattatatatagtattagtataagagtaaatattttatattcattgtattttgtcacaattaattggttgttattttatatatggtcaaattacgatttacgaattatttattactcgatttgatttctcgaattaattgttaaaatattataacaattaattgtgacagagactttaatggaatgtctcacctatataaatatagagtcttggtccttgaacttactacttattctgtgaaacacggtaaattcatataaaaatagcataagcttggaagcaattaatggtaggaggtattttgattatttatttatagtgcatatacattcaatttaattatgcacttcatacatgattatatgtgttttatatctttcatataaatttctaacatgttgttcatatgttagtttgcttcttcttttgtaattgacatgatttgttatttgtattgttaattttgtgagatttgaaaaattttgtttttatctgacttgatagtataagagtttgtcctattaaatagttgaatgaatatttttttattattttctttcaaaaaaaaaaaaataccacatattactttgtatgaaaaatttatttaatttttttctattaattattttattagaggcttctgatgttattcttggtatttcattggcaggtggttgttaatttattggatcagtggtgttagtattatgattccaatgaatgttatacggttaagggtagtgtatatgctctggctttatatatggtgaattatggtaaggtggcttcttcgataggctttatatggtggaatggtttatggaatttgcaaatacacataaagttaaaagaagtaagttgaaaagtgtatcttttattaatcacttaactaaatttacctttaatttatatttaattgaaacatacctctttttatatgtaatgtacccaaaatactttggagtcacatacagagtatcttgaagtgtcaggataaaaataaaaaaagacaatataaaaagggtatagagtctaatttcctcaagttaaaatctttgggcattttacaaaaatactgaatttgggttaatacttttcaattttactgccacacggcaaatgttacatttatactgtccttctttttttttttttcttttatactgtaaataccaaaaaaa

SEQ ID NO: 107255 - DNA, 3605 bp, Cannabis sativa
aaattaccaaaagacgtaaaagagaaatatctatttattattggtattcagaataaaaacaaatatttattattatttttttcaacaacgggcagattcttttatcactgcgtttcgccagagagaactgttaaaaagcaggataactattactatttacagtttttttttttttttttgctggctctattactattacagttgttatgttgatttttctttttttttaatgtaaaacctcctctaattttattcattatttaggtaatatttggtttgttggaatgctaatgtgatgaaataaaaataataataagaattgattataatgtttgatttatagttaaaataatattataatcaaaattattatgtttaatttagtataaaaatgtaatagaataaattttatattgaaaaaaataatcctattaattttattttataattataaaatattaacaaaaaaaagtaatataaacctttgccttttttctactatatttttattaaaatattttttttgatggtaatagagtctaattataatgaggattacattgattttggtaagtaattattattactatactcaatataataattaattgtaataattattacattgtaataattattatgctaattcatgtgttgtggaattatcattttgcatcactgtttgaaagatataaaagaacaaaaaaaaattactctccacaaacgaaaaaaaatagctaaaaatatcattataaagcataataaattgctaaagctttaacttttttttttatttaaaataaagtgaaattttattagcaaacatctttcatgattccatcatgaaaactaaaactatgagagaaatcttcactcctaagaacatgatcagctaccaaatagctagctctagctacaaaataagtaacattattggtagatcgtttaatacaaaaaatagacacatcattaataatatttaacaataccttacaatcattgattacactctcaaaataggacaccatttgaattggacttcttattgcttgaactacggtaagacaattcgtttcgataatcactcgacttcattctttgtttttaatccaacttaatgctttttgtactcccatggccttcgcactttcaggcgacacaaaaccttctctgcagcatgtaacagcctcaaaaaccaacctcgtagaggttcgtggaacaccaacaaaactgtaagtcatggcatgagagaagagtgtcgtatcaacgttaattttgatcacatcttcacttaatttttgccatgaatttgctccatcagttgctgtcaaaaatacagcaataggctaaagaaacttgtcctgtgcacgagcccattgctcaaggatagagtgagccaaaaaaaataactgcagcaatcgtacctcttttcttcttctaaacgcagtcattacacaccttccaaatcgcctaacatgtcatcgttattaacttcttgttctccccatcaaaagagcacaacctggggtgaagccaatttgaaaaagtacatgcaatactcgtgctaacttctaaattattgcgacaccaacatgattgaacaaaagaacactccaccaagtagtgagcaatgatttcccgaccagtttcacacataagacatagcgtatccacattaacatgatgatgcctcaattgagattttgtaagaagatagtccaaagcggctctccataataagtctttaactattagggggacacggaggcaccacattttactccaaaagtctgtttcattcaaatgcaaatcgttctctttaagctgttgcaagtgtatgtatgaactttttactgaaaaaaaaaatcatgagttctcaaaacaccagtaccacaaatcctcatgacgacttgaacacaagggaatactcaatataagtttcgtatctttgtcattaaaagaaaattttgaagtaactaatactataaatttttgttatactcaatgatctagaatcttaactttatgtgtcttattatttaagacaataatattgataaaattagaaaaaaattacaattttataaattttgagtacttatgtcgctaaaaaaatattgagtttatgtcacttacaaacataacattttggatacttatgatgctatttttttcaggttcatttaaatctctctaattgttaacattttttatcaaaagaatctctcctactagatcatctctaatggcacgacataaacttaaaattggtgaagtttttccactaaaatgctctaagtagacttcaaaagccatcctaattatgtgggtgtttacattatctcattaataatagtggcactacggattatactaaatctttttttttattagtttttaatatttaaataatatacttataattaaacttttgtatatgtattatttatgtttatttataagttaataaaataatataataataaaaatataattaatgttgtgattagaattgaaaaacattttcattaatattctataattttttgtgttgatataaatattaaatttaacagtattgttgcatttcgtgtgaatgcgaggctatccaagagaaatgcgttgcgttttgattggcacgagttagacgacttacacgcgtgtggtgcactgacagttactactacttccctattatccctttatttatgtcacattttaagtctttttcttaaataaatccaaacaaatctttcctaaataatttccaaatataatttaaaaactcttataatctcaaactactgctttaaaaaccaaaacaacaattaccattcaattttttctcaaaaaaaaaaaaacaattaccattgaattgaattttcttttttttaaaaaaaaaaacagcctcattaaaacttcaatagtaaattcactaaaaaaaatctgaagagaaaataaaagtaggggtgtacaaaaattttcgtaaaccgctcaacccgaataacccgttcaaaccaaaccgacaaaatcgataaaaaatacaaaccgacataactcgacaaaattctaaatcgcccaatcagttaattgggcgggttaaaaattgacctaaaccgcccaatcaaaccgcccaacccgatttaacacgatttttacttttttttatttttttattttatatatattatatattatataatatatattaaaaaaaaagtccaaaatcctaaaattctttctcaacctctcaataaaattctttctcacatattatgtatttatgtggttaatttttattttagttgaaactaaaaaaaaaaaaccctcttatttcggtttgggcgggttaatccgaccaaaccgcccaaaccgtcggtcgggttaagatttttttttttttttttttaattaggtaggttgtatgcagaattttacaaaccgaactttacgttgggttagaaaatatgtagtataaaccgactaaactgaccgatgtacaaccctaaataaaagtatcatgctatattattatttatgattgtctgtttaaagaacaacactaatacaatcagggtgaccatgccaccaacataattattaaa

SEQ ID NO: 107256 - DNA, 1168 bp, Cannabis sativa
aagttcaatatctgtcccttccaatgtatactccatacatccgaataccaagatggatcaagaataatatctgatgtagctatgttggcagtaagatgatccatattggcagctccaattctagggaattccatattaaaatgctgataacagtgtgtttccatatgactaggtttcgaacaaagttgacatatgggacgtgagccagtggtgatagtaacaacatttgaggaagaattttgagtgttacccctaccaactgaaggaggaggagaagagaaggaacctccacggggaggaataggatagggattccatacagaatggccacacccaaaatcaggaggcatagggtgaggattaaagttggatcgagaatttgtaggaacaagataagagggtctattgcgagaattttgatacatagcaacatttgtagagccaagatcgtgttgatgactatccatacagtgttcttgagagagaagaagagactcaatttcagctacagtgtaaggttgatttctggaatttacggagattacaaaggtatcgtactctgcaggaagacctttgaagatggcaaaaatatgttctttcacaatgacacggtgaccaattgaactaagacgattcgcaacagtcttgattctcaacaaattatatttgataggcagaactcctttcttgatagtttgtaattgattagtgaattggcaatgcatacatttgagtagagaagtatacctgaagagtgttttagacttgtgcatatgtgtgacttccaacaacatgagtaagaactttttcagtcatggatgaaaggagacaagagtagagaagctgatattgttgctcccattgagtaaacagaggattaacaatatccataactcgatctcgatatgagaggaatttagctagaggaggctgatctgagatgtaatcttaaagattataaccttgaatggcggagagcacttgaggtctccagagaagaaagttattgttatcgagcttgacagagagcttgtgagagaagaacacgggatgaaaaatcacagctggagtagctggttcagatagagcattcacttacgccatggaaagccagggaagaagacaatgtggaagcaagaagaaaaagatcgaaaaccaagagagagag

SEQ ID NO: 107257 - DNA, 1693 bp, Cannabis sativa
aaagtattgggggttttgccgccatttacccgtcataatattatcattttattacacttatgtcattaactaaataccttcactaatttataaataactttatatttatttttaaatgtcattgttgaactattttttttattttaattttattatataaaaatatgtaataataaagaaaaaagaatcggtcatatgaaaaagaatcggtcatatgaaaaaaaaaagaaaaaatatatatatatatattatttggattgttcttagccatcattccttttgccttttatggttgcagaagaaaaattgttagaggtatttattattttttttttgtgattagatttcaatttgttatttggattttgatagtccatttaggagcttatgctcattttttacatttttaattgtcatatgtattcttaatagcaagttgttgctataaataacttgggaagtggaaaatagctacaaagattaacttgttctttggtcttttgttgtgtataggagcaagatatggaacgtactgtagaagtagaataccaggctgactgtttttgcattatgtgatattcatttatatatattgatggtatatatggtgtgaactcaccatttagacaaatttatttgactattctagttgatagtactttttagagagaagatgtttcaagctatgacagaggaaatatttcactatgtagtactccaactggacttgattctaaagaccctttcgatctttaactaggttagtaaaagataacactaaaaaagtatgtttaattttatagtgattataatttaagaaattatgattatgtattttaggcccatgtgtgttaattctccagagtgaagacatgtttatggagaaagaaattagaagaacaagctcaattccaacaagctattgaaattcaaagtagaagaataagaatgatgagttagtaactttttgatgtgaaaacacatcatcaccatagaacactatctactggtaccttaattcaatcaccaactgaatctccaagcttatacactcagaatcttgtcctttttttttcaattcaaaacaacaattcatcatctcacaatatgatatgatatgtaataaatttatttaagctattaacaatatacaaagcttcattatttttttagtgtttgtttcacttaatgttttttaatattggtattgtgttcgaaactaatttcggtacttctgtgaatatcatattatttttgtatggcctttcaatatgcattttattattgtagcaaagattcgtgaagggtgaagctgccgattattttttatgtgtttttggaggagggtgttcatctaatccaatttgtattattttgctcatagtacattcgattcacattaagtgtagattttattttttggatccaatccaatccgcacaatagctcaaattcaatccaatccgcaaaagtgcagattggatcggttattttagatttattattttttaatattaaattatttaatatttatcaaaaaaaatattttttttcacatgactagcaacaaaataaaataaactatagatattttacgtttccaacaatacattaaaataaataaaatagcaaataacaaattcaaaggaagaaaaaaaattgtatgtataaaaaaattaatttttttttaaat

SEQ ID NO: 107258 - DNA, 5082 bp, Cannabis sativa
  modified_base (4636)..(4638): a, c, t, g, unknown or other
  modified_base (4871)..(4905): a, c, t, g, unknown or other
gaatgtttggtaaaatttaacctttgaactatagaaaacaatgcatttttctcaactttatattgtcaaaatgcatagaaattgaccattgtcattgcttgttagattataaaagagccatcttaatctattgattgatttaacattaaatgaagtcaaaacaatatatatttggtaactattatggattgaatgaataagctacatcttgaaaagtacatctcaacatatatatatttaggatcttagattaggactaactaatttgattctagcataagctccatttaatgatgactaccacaaaccaaacataaaatataagaatgtattctatgtggggttgtcatgatcactttacttcactctatagtctaggcctcaaagattcatgattgttataattgctagccattatgaagttcatgattgacatcattgattcatctttagtaaaaccatgtatatataattgaagttgaaatagaattgagactcaaatccatccaagttgttacagcaaagcataatagaccaaagaccaacaaaaacatttgctgtgagagaaatgttgagaagaggagctgtaactacatctatgttatcaaataatcccgccgtgttggcagggtggtgccgcccaaaacgaaggctgaggaggaggagaggagccactgttaggctcgggaacaagcgtagaggattctctcttggagcacgcccggtggttcagtggggattcatggctggtcctattcggatgctgagaaagatcataacagatatggtaccgaattcgcagtttattgaaggtgtttattggtcattaccatttctacatcctcagttgtttcccctttgttaatttgcaaactgcaatttttcttttggtgggttttcttctctttgtttctttcttcttataatgtgtaataaagggcttacaaaaagacctttttgattgatatagacagtatgtgcctatgtaattactacagttgaagacaatcaaagattgaaagttatgttttataaagattatgactttttttttatctcctttttctttctttgttttgccttataatatgtgaatataaatgaattgattcaagaaaaagaaccatatgcatttatgtacaaatacatagaaacacaatacaaaatcatagcaagtgatttgtcctccacttgactaaagcaaaggataattagaagaaagccatggaaataaaggaaaagccccataaacaatcctaaaaaagggcaggagaacaagaagatcaaagcttttgaaagctgatcttcttctagcaagcagatttgaaggttttactttgtacaggaaacctttgccgctttcttcacaaaatttcccacctacctatagtatagtacagcatagaatcactttttagcaaaaaatgaaagtactgaaggttgtttatgatcaccggcactcttcaattttggtttcttcctccctggactagccagaagcttattagtgtcgtctgaagtaacctttgaatcagctgaaagctcctcctcgtgttcccgcttcatttggcaattctctgcaactccatgtgaaaatgccatgacactagatttggagtcatgttcttctttttcagtagaagagaatggttctgttttcactttcgatccagggtcttcttctttcaggcattttgcagaatcaagcttgacaaccttctcgtctgagtttaacgccacttccttctttgctccttttgtcgagaaaaattttgatatcggtacattcccatctgtcttcaactttgtctggagacaatagtgcaatcagcaaatagcagctttattaaataccaaggaaagttataactgaaaacaactaagcaaagctcattctttgtcaaacaagaaggcaagcaagtcgaaaatagcaactgaagcagaaatctctcgtgaaataagagtttaacattagatcatcattctctcatgcacacaaccattgtgttcctaatcaaatgtagaataaagcttttaatgctatattcatgacaagttatgttaataatcagtgaaaaggaataatatggaaaatgccaacttgtcatacctccttaatgcactctggtccatcaaaagatggcttacccattgctggtgtcactgggtaccaaatctgaagaaactaaatgtcagaattcaagaaatgtgcaaggatagagttaaggcatattgagaaagcaatatcatgattattgtgggatcttaccagatctggattttcatatggtttaagcaatgtgtcgactttggaagaagaaccatcaagccatgcgtcacttgcctccttgtcaccaaaaattacaggcatacgatctgcaataacaaataacatatattgtagcgaaagctaaacttatgtaaagatgtgcacccgaaaaacaaatgttccccactaaaaaaggaatccagaattcctagtctcactctacaaaatcaagacctacaatcaataatatccgtatgtgcaagtaaaattctaacttgaaaagattaaaaagaacaaaattcagtagcatgcaacagaagatagcatcccctactgatgattctttcaaaaattactgttttctaagagacataattgtaggaatacaacaagataatgttgcataccaatgtagtgcatctcttcgtacaagtgaaaccgcaagaacacaagcaaataaaaggaatgggcaagcaatattaaaatctcaaaaagcatctatttccaaatgcaaatatcaaatcataaattctaaactagagtttggtaccccccatattcagatatattcaaattgtataaaaacatattcagatatatctatttaagcaagaactaaactcaccatgcagccactgtaaagctggagatgacgatgtagtaataatagtgaaagtgtaaattatctcccctgcagaaaagcatgcaataaatgtattagcaccaagaactgacaatacttctcttaattgtattgactcaattaaagtttttctctgtacatttctttctattctcctttttttagaggaaagggatacaagtaagttggctatgaaaagggaggaggtgtggggaagcaagaagaaagtaccttcagagttttcccaggaatcataaagagcagcaaaaacaagaggctggccatccttcaaatgaatgtaatagggctgctttttcgacccatcttttttccattcatagaatctgaagggaaaaatgatgtaaaattatgaatggaagactgaaggtgacaatcatgtaaacttagacaaattaaaaactaaaataaaacaatccataaacttttccttaacttctggccacatatgaactcaactaagaaagaaaatcggccacaagataaaatatggtaaaactatgtttgtatccacacgtattacacataatatgtaaagtaaaaggagattaagacaaccgataaactacatcgaataaaagcttcacaagaaccaagcagaagctatgagtcgatccaagaaatgaaatgtgttataatgcagaacctaaggctaaggcagtcttgaaaaaaccaacttttcattcaatcttaagaactataaaggtgtatgaagtttcataaaaccacatcaaattggcacctttgaatttgtagagtaacaacaactgataataactcaaaaaacagtcagtaatcacaatatcatatttgtctatagcacattccaaattcatagaacagctaggaaattaggagaagcacagcagcaaccatttcaatgaatcatcaactaaattaggagaatctaacatacccttcaactgaaacaaggcaccgacttttaggaattagacgacggaaagaagccttttcactaatagactcagatcgagcattaaactgaaattttcaaaacagaacaagaaattataatatctataaataaataaaaaccatattgaacaaagtgaaagttaaggtttttaccatcttataatgatcaggtttgtcagttttcttagtgaaactgggaataagtccccatttcatacattggaggacaaccccaccatcagaaccgtcttctctgcgaataacaggtatgtttgacccaggcgaaacattgtacgaaggacgatacctgtatgtacttaaagccaagaatgtaagaaacccttgttttgatttaggttgatagaccaaaaggaggttgctttacttaacttaccggtctatgtgaagagtacgaacaggaccatcgttacgacgacaagccctggggatgtcgtcggctctcatggtacaacgggctctaccacacatttcgagtactctatttggcgcgctttccacactctacactttgcttctattgaatgggactcaaaccaaagatgggcgggatgggaatgatgcgactgccctaaccgttggattttcaacaatatttttgtctttgagataccactttcccatttcatctggtctcttcttttgtttttttttttttttttttatgctaattagaatttttgccttgaattttgacatgtaccaaattatgtcaggccattgaaaatactcctgaactattgagattgttnnntttaaggacttctgtctaattttattcaattttattatttcaatgattatttatgtactaaaccatgttccccaaactttgatatctaccaaatcatgcccttcgaactttgacatgtcccctgaactttcgtccaagttagacttttttactaaaattagaaaaaaatccttaaatctaacaatctcaatagttcatgggcattttcaatgaccttaaaagttcaggggcannnnnnnnnnnnnnnnnnnnnnnnnnnnnnnnnnntcctaattagccttttttttttatgtttttatcttccatttaatttaattgtcaccccttaaaaaaagtattgatctacatgtttagacattcagactaattttttttttacgttataattatataaggtattttataaaattttaagaaatttagaataatttataacataaaaaa

SEQ ID NO: 107259 - DNA, 2094 bp, Cannabis sativa
  modified_base (2063)..(2069): a, c, t, g, unknown or other
ggtaaaataaattccaacacagacccatagacttaataagagtagcccacctagctttcgaaagagattttttgctttctaaacctgaagcttagcggtcaggttatccaaaataaagttatagtctgcatcctactgtcgggactaaactaaaggaagtcccaggtatttagtattagctactaggtctccaattcgcagagtttctttgatctctcttcttccccatcgggagtgttcttactaagtctccaattcccagagtttctttgatctctcttcttaccccatcgagagtgttcttactgaagaacattgaagtttaaagcttgttgaccagttggcgtgaccaagagtagaaatcttccaggcacttctagtagcctttagcttcttctaagtttgccttacctaccaaaattagatcctccgcaaagaatatgtgagatagaatcggccccctttggcttagtctaatccccttaataattcccttccccaaggcgtcttcccacaatcttgacaaaacttctaccgccaaaataaacagataaggagaaagtgggtcgcactggcgtaatctgcacgagggcctaatcttgccgacctggcctccattaagacaaacattcagagtggtggtagagctacactgctttatcgatttgcataatttctccggagcttcatagcaatcaagcacatactttataaatttctaactcagcatatcatatgctttcataaggtcaatcttaatggcaaaaatccttctttccctttctttctattgaaagtatggataatttcttgaactatcacattgttgtcttgaatacttctcccatgcacaaacactgcttgcatcgggcagattagtctaggaagaataggctttattcaatttgcaatgattttagaaatgaccttatacgtcacattgcaaagtgaaataagcctaaagtggttcattctctttgggttctgagtcttggggatgagcactaaattagtagcattaaaacccttatgcatatatcccgttacgaaaaaatcatgtatagcctcacaaaagtcattccccacaaaataccaatagtgcttatagaagatgaccaacattccatcagggccaggagccttatcactccccatagcaaacaacgtcctacagatttcatcatgcgtcgaaatctgaactaattcctccttctccacttaagagagcctatcttgaataaggtagccacaattaagatcctgagcagaactattaccagagaaaatttcacccaagaaataagtaaactctttccaaattaaatctcgtctgcttaacaacacattatccttgctcaaaatactttcaatagcatttttccttcctctaatagtagttgagaggaaaaagaacttagagcatttgtccccattcttaacccacgatacctgggatctctgtttccagaacaacgctcttttttccaaataaacattcagagtacgccggatgtcactctcctccttccaatctctagaaccagtgggtagtttttgtaagttgtcaagttttctttcaagatcttctatggtgatgtgaatcttcccaaattgagatctattccaatttaaaagatctacccgagtcgcaccaattttcttgaaaattctcactgggcccaatggtgcatatcgacttccaagcatggtcaaaaaccaatttactcctagcatctctagtccatccttcttcaaacttgaagctccttctgaatttagcatccatatcaccaaagtataaacataggggtctatgatcagagttcttagtctggtaggaacaaagaattgccttaggaaaaatattaatctagccaatgttgaccaaagccttatcaagagctgatttaacatggttcctaccagagcgatggtttgttggaatatattttaccaggacctagatttactaacaagtatgtttttaacatcctaaacatgaacttctaaaatgacataaaataaatacataaaaggcatgagaaaccttacattggttgcannnnnnntaaatgactccttccgctcagatct

SEQ ID NO: 107260 - DNA, 1347 bp, Cannabis sativa
acagattgggcggtttgtaattttttcggattatttcggtttgtaagttttattaattttttcgatttggtttgggcgggttattcggttggacggtttacgaaattttttgtataaccctacatcttactgtggccaacttcgaaaatgagcctcattatcctctcgaattagcctaaaaaaatcccgatgattagaagtgcaaatttttggggttaacacaaacatttgttattacacgataatttgtgtacatcagaactaaggagtaataagactagcataaaatataggaaattttacataaaatattattcgttttttttaaattgacacaatatgtactagtagatattgacatattaaaattatattgttgtctagttggtttttagttgttttaattatctattactcattatcttatatatatatatgtattctattttgaaattataagattttattattcttattattaatgtaattatttatttaattctaaaaataaattattatttcaactgttactataatccaaaaggaagagagaaaaaatatttgaaaagtatgaaattgtaacaaataaattttatgaaaaaaaataacgtaatagtttacacataatcaaattgccaaactaagtaaaaaacgaatttcataataataaaaaacaaagttgatgagttgatattaatttacatattgcaatgagtttaatatcttgttatttatttatttttattttatagttgtatacttgttgttttacaattattttgttgttgttatcaagatattttatatttatttttttaactactttagttattttttgttgtacaaaatacaatatttgtataattttgaaattttaatacattattttgtaaaatttaattttgtaaacaactattgtaataataaagtgtattggtgtacattttctcagaaagaaaagacccaagctcaaattccctctacccaagaagaaaaaaagaaaaaagacattaaaacctctctaattaagtgacaagtgtatacatcatcatatgtatggggtactcaatatcaacagtgtttactgaagaaaacaaagcaacattaaattttaagagtcccgagaacatttatatataaataatatatattattatttcaaataatatcaattaacattttttacattatataataaaaaattgttgaaaaatattattggtattgttattggtgttaattaaatatcatatcttatatacagtagaatttctatttaacaatacaaatctatttaattttgaccagttataaataagaataacttctaaattgtaattagttata

SEQ ID NO: 107261 - DNA, 4908 bp, Cannabis sativa
  modified_base (1488)..(1490): a, c, t, g, unknown or other
actcagaaattctcattcactttctctttctctcttcattttcttcttctttcttctcatctactttatattattttataacataaagaatttttttggtgaaatttttttagaatgtaaagagtttttgaatccaaaattagtataggtgtaagacgaaatttgatgtcaagttgaagatgctctaatgtgtaataatctttcatattttaacataataaaaaaatgtaggttaataagtgagtatacaattttatcttaataggatgtgacctcactttaatattagaattatagaaatattatatacaaatattgtcacagatgatcctagaagacaaagagtcaagtaaattaaatatgttatatatgaatgtaaatgaaatgtgattaagaaagaaagaaaaaataatggataaaggtgatggagctgtcgagggaatgggagtagagtcaagtaaaggagcccacactcattcatttcctttcattaatcagttaggagtgcctacattatttatctacttttgatcacatgcacccaatcccatcacaagcttggtgtacccctcctcaatggattgtattgggccatgtaattgaattctactactcctcaccttgctctactacaaactaatatgactaatgtgtatggatggaaattgggtagatacgctcttccaattctgctctcctttcccatttctgctttctattcctgctctcgtcccgcttagtcttccatgatttggagtgggaaaatctctattggctatcagaactcattagatacctacttagattaaaataataataaaataatgtaatataattcaaaataaaaaaaaaaaattgaatttaaaataagtaaacattgtgcttattaaaaaacttttattacacagtaaattaagaagagcaatatttaactttataagtataaccaataactttaatacatactaattaaaaaccaaatgaaaatttaaaaactatatatctcgattgagtatagggtgggtagtatcattcccaattctattgttgctctattacttattaagtcaggtaatcctcgccccatttagagtgagtatccgtaagtcaaatgtccatcactactaatatgattaggggatttttaaaaaatatatgataatttaaccttttttttttcctatgattttctttttatttgaaagatgattttttaatgaatttttcttctcttagatttttttcctttcattaactttttctttttattttctcattacttttttcttttttattttctctcccactatttttcttttttttttttctttcttttctatctatttttttctctcataaatttacttcattttgtttatttatttatttatttctttttattgttttcttatattttcccgttttctaattactatgaatacttattacccattaatgggtaataaataaatttaactataaatattnnntttaaaaatattaaacaattagattttggtccgataacgaataataaaagagaaatttgaatttatatgcttaatttagctacttaattaaaaaataaataaaaaaaatacatctttttacactatatcaaaaaatatttatataaaaaatatttaagtcaaattaactttttttaatcacttttttgccgaaaactttttttttattatttttttcaactgatggaccaatcacagcacatataatgtaaaaatgagaattttttctaattcaataaacaaattaatcgtaaaaactcaaaattctctaatattactcattcatgggtaatacctattaagagtgcacccatatatatatatttcatatatatattttttattgggaaaaaaaaaaaaaaataaataaaaaaatacaaaaaataaaaaataaaaaattactaaaatacactgggctgaccatttaaattattatacatcccacaaacaaataattacaaaaatatcatctcctctaaaccttctgccgcacgaaacagaatgatgaacaacaacaatcttcgatcgttcaaaccagcaacacaatcgaaatgaaaccaaatcaagaggaagaccaccattaattttggcaaatttcactggaaaagaagacacggaacgatctaaacgaaaattgacgaaaaaaaaagattagaaaaaatgggacgaaactgaatttaaacattgtttttaggttttattcgatcaaaacaactcctcctaatatcgaaattcagattcatataatgtaaatctctaacaaacagatctggagctcccccgtgaatccaaaccatgtataaatgtaaaaaaaaaaaaaaactcatgaataatagatctaaagtatatacagtttgcattttcgttgatttctgatttccaatatggaatatattaatttataaacacaataagaaaagaaaattcgaattaatctatagccagttacgtataagtatgtttcatttttttggttgctttgtagttgcattatcgtttcattatggtatttataaatattgtaagaatttcatttgacggtaaaaatgaaagattagttcaaaaaatactacttcaacatggttagttttatgaaaatagttgcatgttcgttttataatagttgcaaaaatattttgatacaaacaaaatattgtaaaaatacagggttcacaattggcaacaaatgacttgaaataacaaatagatctggacctctcaatcaatccaaatcaggtataatgtaaaatacaagaaaaaaagcataaataatatagctaaggtatattcagttgcattgtggttgttttctgatttccaatattgaatatattgatttataaacaaaaaagaaaaagaaaaattctaatgaatctacaaccatgttacgtggaattatgttccaagttttttcaaggtcatttgtagttgcattatcgtttcattatggtgttaattattattgcatgaatttcatttgacagcaaaaaaagagaaacacttcgacaaaatagttagtttgtataaaattattgaactcgttgctaattagttgaatgttagctttttaatagttgcataacaatagtgaaacaaacaaacaaaaaaatgaaaaatacagcgttcagaattaacaatacaagacttgaactataaaaaaccaaattgaagtaagtttcttttctattcataaagattatttgaattttttattttataaatttgtatcaaaaatgttcggaaacattaataacaaaagcatttatagatttaatatagtttcaaattagttgacttacactaataataatttcatattcacaggaaaaagacgacattccattcctagtcttttgcaatggacaatttgatgatcgaatgaactataaaaattatgaagctagtggacaatacatttcaatcgattgtaaatatgatgaactaatacacaagatgaaagaagtccttcaatgcaaccaagaaaacactgtcttgcaactgaaatattaagtgaaagaaggataccaaccgttgaggataaatgatgatcaaagcctacatttctacatacaactaaaactgaaggaacctgacttcacaatatatccattgtgtgtgaacgtgatcaacagcacaacaacaaccatcaatccatcgttcttggaaatgagtaacacattagttgcataaacaaatgcaatagaaccaatggaagacaatgcaccaacaacagaagaatcaacaactcaacaacatacaatgcaagggacaatgctggaagatggtgaaattttttttgacttcatgcactatgcaaaacttgtggcagaggaaatagttgagcaactagaaaacaaccaaaacaaagagacagaaatcaaagattatgacaaactactaatcatggatccgcaacatccggaaatagaagaagcacaaatatacaaggacaaagaaacactacaaagtgtgcttagtttctatgcaattagaaacaacttccaattcaaggtcaaaaagtcttgcgcaagaacatacaaaatttgttgcttggatccaaaatgcaagtgggcactcacggcatctagaaacagaccaaccaagtcattcataattcgtaaatatgacagaaaggtgattcacacttgtggtataaacataagatttgcagacaaagacatcctacaacaaagttgattgtttttacatcaagccaaggtttactaacataaaaacaactcaaacgccataagacatcagaggagaatgaaacataagtatggcgtaagaatgaactacatgaaagcatgaagaagcaaagagtacacgcaagaagaattacgagaaaaagccaacgaatcatacaagctactgccaagttttttgcacatgctgcagaaaactaatccaggaacaattatacacatacaaacagaagaagataacagcttcaattcaataaaaggatgaaagaagtacaaacccataatagttattgatggaactttccttaaattaacatatggaggtacattgctctctacttgtacacaggatgcaaatagacatatttttcccctagctttttctgtggtggattcagaaaacaacaactcatggcaatggtttttcacaaaactaagggaaacatatgggatcagagaagaatagtgcttgatctcagacagacatgagagcataataaaggcagctgctcatgtatttctagaaataatgcatggctattgtgtataccacctgttaagcaacctgaaagcaaccttcaaaaagaatgcaagcaagctggataaaccattctttgcagcaacaaaagcatacacagagaggaaatttgaataccatatgagcgagcttgaca

SEQ ID NO: 107262 - DNA, 3255 bp, Cannabis sativa
ggtaaaataattccaacagttagttgttaacttggtcaaaaagttgtactttatattttgaaaaggaaatatgagatatttatgcttcaaaatgataaagatgagaattttcccataggctcaatgaaattgacttgataccaaccctaagatgacgatcaattgtcaaagagttttatcgtggaataacttaaaataaaattttatgtattttacttgtatgcgctcatgcatcacatttatagtaattctaaaataatatttattaatcaaatgtaatcaatatgtcacattatttatttcaatcatgtctaccatgctgaatttcctaactactttactaccacgtaaaaaactgaatggtgatataacttttatatatgaaaatcgaatataaatttaatgttagtttgtgagaatagcaaatttgtcctaactgaggagcatcctgaggagaccgctgctaatgccccaaaaaatattcgaacagatatgaatcttggattcaaaccaacaacaaggctaaatattacatgcttgtaagtatgaacaatattcttagtaagatgcatgaagatatggagaatgcatctcaaataatgaattctctacaagtaatgtttgggtagcaatctaatcaaacaagacatcatactactcgtagctacatgaattataagattaagaggggggtccttgttagaactcatgtattgcacatgattgaatattgcatgaggcagagacacacaggtccatcactgatgagaggacttaagtgagtatgattcttgagtcgttatctccttgctttaaggctttcaccacaaactatatgatgactaagcaagagttcaacatgactcaattgttgaacgagttgaccgtatttgaaaaccctaacaaggataagtccaaggaaggtgaataaaatattgttgaaaaaaaatcgaactctccttcttctttgataagaaaaggaagtggaacagtaaggacaacagtggtggcaagcccaaaggcaaaaattcacccaagtttacgaagaacaaagccacccccaagtccaaggatgaaaaagcaaacaacgtgtgtttctattgtggcataatgggacactgtaagagaaactataacaaatatctctccgagcttaagaaaggtaaatgtgatttatttattctttaagctaacttagtggaggatgataagtcctaatggattattgattctagagccactaatcaaaatctggaacgatacttaatgaattaatgaatttaaatgggaacaatatgataaatctagaggatgataaatcttgaagtagactaataactttgcaaaataaaaatttgtttaagttataacatacttaatgaatttaaatgggaacaatatgataaatatagttattcaaatctctagagatacgaaggcaaaatgttttcatatcaaaatagctcccgcggtaagggtaccataatattgtctctacacaaataaaaaggggacccttatcccccaaaatcaaagaaaacaagataaagccaattcatggctggatagacgtgtttgtaagtgtggaagtatttgtaattggatctgcattgaaacctggaagagaagcttccgtgagctattcattagctggaagggtaatttggatctagactttttagctccatcgacagaagaatttttcgtcctttcaagctctataatttgggcaagaaattcatcttttttctcgtcaagaagttgtacaacattgtgatcccttttccataagaaatgaagggtagcacaaaggcactgctcgattcttgttcccttacaactttggtcgcagtaaccttctcttcaaccttctctaggcttccaactccacatgcaattttttcctagcttccagctccatttttcttttggcttcttgctttattgggatgctacatttggcctctgcctagtcacgttccacatgggtaagtttggtagtcagatcaacttctacttcagctaggttagcagaaagttgattttgggcatcaacaacagtagcccagaaactagtcaacaacctaagctcctgctccaggttgtgaattttaataattttcttgttaacctcttcatttaacatggttgcctcaagagtagcacttttggccttgtcgcaaattactcttcaaaaaataaaacacattctaacatcgctaacacacattgcacaacgtgatctatttcattgaaactgtatacataacttttagtcgatgaacttttagctctaataaatttaactattaacaaaatagctttagcatcatatataatatttgatagcaatattctttttgtttaattccaatgcatcgaaatactctccaaaaaataaaacacattctaacatcgctgacacacattgcatgacgtgatctattttgctgaaactgtatacataacttttagtcgatgaacttttagctccaataaatttaactattaacaaaatagcattagaatcatatataatatctaatagtaatattctttttgtttcagtacaatatatcaaaatactctccaaaaaatacaatgcattctaatatcgttgacacacattatataacgtgatctattttgctgaaactacactactacaatgtaggcctttagcttccattttttcaacccattttataaaaaaggaaagataaagggtgtgaaaagatccgcattcacatttagaggcggttttttggtaaaaaccgtaggtataaaatatatatatctatgtcgttggttgggggttggggaaaaatcaaggtttttttaataaccctatggtatcggttatttttgtatgaatcgacgccataggtgctgcctttagtcgacacgtggcacctatggcgtccgttaatacaaaataactgatgccatagggttatttatttgatccccctgtatatcgtcttcttcatttcacaccctcaaacccacgaagaacacccaccacataacagccccaaacccacaaaaaaactctcgccaaccacaactaaaacaacctcattctccctcatttcttaaccattttaccccatttttgtcttaaaatcttctattttcaatacctaaaccaatattgtaaaaaagtttggtttttttcccctctatatatcaaactgaacctattataaaaaaaggtggttgtataactctggccaccaattttagcggagaaaa

SEQ ID NO: 107263 - DNA, 2532 bp, Cannabis sativa
ttagttaaactaatagaaaaaaaataggggaaaatatatattttttatcttttttttatattcctgacagtttaaaaccatcgggaagtccacattagcgacggtttttaatcgtcacctattttgcccattttgcgacgatcttataggcaacggttatagaaactgactaaacgactatttaaaaacatcagaaaaaattatttttgtagtaatgctccttccccatctctccccaagtaaccatcactcttcccttctctcttatctattagcctatcttggtcttggccttgtctttggccatggccgaatggccctgggtgcgtgcatcgtcactccattgtcaaattttggagtcggtctctctaacttcttggattaatcgtcgactaatttttaggttagctttgctaatataaaaatgtaacggtcaccttcaaataacatataccaatattaatatcattgatatattaataattaatgttgtgcaagttatagtcttgtcttttgacatgttgtgaattttatcctttggcttagtatctttatttttccattattgttggctggttgtttctgtttgtttcttttgacatggcatctagtctagtaagttgcaaagtgattcagacacaaagatcactctcgattttgaagaatttggtgggctatcattggacgtggaggaggatgaagaagaatatgacgttcgttggtgtcttgtcagacatttcttaaatgctagtatcattgatgttcaagctatgcaacacatgatggcttttctatggaagccagggaagggattatatgtgaaagagttggcacaaaatcgtttcttgttccagttctaccatgaaattgatatcaaaagagttataagcggaagtccatggacgttcgaacggaagcagcttatttttgaaagattgaaagtcagagataacccaaggtcgatccttctaaaatgattggatttgttggttcagatccatgatttacaacacggagtccgaacagagcgtatgttgtagatgataggaaactatattggtaagtttatcaagtccgatgagaacaatttctccggtgttttgcgtgagtattttaagatccgagttaccattaatcttgatcaccctttgaaatgtcgaatgaagatttgtcgtctggatagttcagactggttctgggtgaatttcaagtatgaacatgctccaacattcttttttatctgtggtcctataggccatgcttataaatcatgtcaaaaaatatttgaaattcttgaagaagaaatcattaaaccttaaagagattttatgagagccacggttcaaagacataacaatttaatcgattcacaatggcttcgatcaggcagaatagatagagttgattgtcatgagggtgctcaatcttaccccactggaaaaaatggatacccaaccaccgttgctggtacatagggcgttaatgggtagttaatgttaagtaatgagaggaatcatagaaagggagttgattgtgggattcatgagccaatcatggtgcgaaaattgggtccagattttgaggagaatattggggggaatttagatattaatatggtcaaccgcgttaatgtggaaatacaaggaggttttaatgaggatttgacaatatttgaattaaaaagaaaaagactcaattcggttgggcctgggagtttgggctcacatattaatggtattactgtaaatgaagatgatatggtaacaaaaaacttgtttggggggcaggtttggatgcacagactcgccaagaattatgagtactatgagttggaactgccaggggcttgggaaccctcgggctttatagttccttaaggatcttgtgtaccaaaagaatcctaagtttatttttctttgtgaaactttgtgtggaaaagctactttagagagagtccgtttgtcattgggctatgaggatctgtttgtggttgaggcccgtgggcatagtggtgggcttgccatgttatggaaaaatagtgaagaaggggagattattgatttttctaaaaatccacatcaatattctcacgtacgttcctaatacgcctacttagacttattgaaatttatggtgaagctaatagaagttaaagagagaacacttgggttcttatccgtcagctttcagaagatgttcgttggccttgtgtgttcatcaaggatcttatgtaaactttgatacaagtggacaagtgaattctacgagaggaataaaattatcaaaagcttctcgtcagtatctaggcctcaggcaaatggacaagtgaaagccgttaataaaaccctaaaggatactataaagaagaagctagacactgccaaaggcagatgggttgacgagctacctcgggtgctatgggcccttgaaactaccgagaagacagctacgggacacactcctttctcgctagcatttagctcgaaagcaatgctgtctgttgaagtgaacatatcgactcacataagagag

SEQ ID NO: 107264 - DNA, 2271 bp, Cannabis sativa
aagaatactacaactgaaccccatttgaaaaggaaagaaaagaaaagaaaaatggtgaagaagagccttcatttacactccactcacaaaacaatcttagctcttcttcttcttcttcttgtctattcactcagtagctatggccacgccatcaaagctcacatcttcatctacgcagggtgctctgaagagaagtaccaaccagggtcaccatttgagggaaacctcaactcattcctttcatcaatagttagctcatcctctcaagccttgtacaacagcttttccatggggaatggaagctcaacaccacctgaggctgccacttatggattataccagtgcaggggtgatttgaagatcattgattgctctaaatgcatagagagtgcagttaaccaaattggtttggtctgtccatattcctatggagctgctttacagttagaaggttgttatgttagatatgagcattctgacttcttgggaaagattgatacaggtgttaggtacaagaagtgtagcaaaagtgtgaataatgatgtcgagttctttaggcgaagagacgatgtcttagctgatttggaaagtgccattagttttagagttagtagttctggtttggttgaaggttttgctcagtgttttggtgatttgagcccaaatgattgctcttcttgccttgctgaggctgttggaaagttaaaaactttgtgtggttctgcagcagcagctgatgtcttcttggcacaatgttatgctcgttattgggcttctggctactatgagttatcctcaggtttgttcattattctttagatcaattacttgagttatttttgtttactttgtgtctttttaatgaattctaaaacttaaaaggaacatgtatttacttaagatttaaaggggtcagataatgaatatcaatactttagttctttctagatagaaaagagaaacaaagtggttcaaattctcttcaatcaaggtcaacaaagtaaaccattaaggtggataatagtactttaccaacttgcttttaagtacctcatttctttgtgccattccctcctttgctttcttttaatcttttctttaattcttatgtgttctgctttggtaaaaaaattcttgccctttattttgctcaattaaaatagttatatttaaatcttttttgagtcttaaaatattacctgaggtcacattcagataacaacatttattctccttacacagaattttaaaaagaataaaaggacagtcaaatcaactaaaacaaattccctacttgttaaattttgtgtattaatttttatgttaattgtgtttaaaattgtattagactccactagtgaagacgacgtgggaaaaacagtggccattatagtgggtgtacttgcaggagtagcagttctgattgtgctcctttcaatttgtcggaaaacaatgagtaataattgctcttcctaatctatattaaaagttttaggcattattattactattggatcataaagtaataattaattatgtataatgctgcaggttaagagattagggggctgtgagggagtctttcaaaatgtatgaagattggattggagagagtaatgattgtgaaggatcacattttgttttgttttgttttttttatatatattcttgtgacaactttgtcttcaatttcttttgtttaatttaattaataccatataataatatgtatggtatagttttccacaaaagaagaaggtgggtgttatcttgtggtataaagtaacattctattaatctccatcaactttgaaagagctgctgattctcttccctccattcatgctgtccaacaaaaatccatcactttattttttttaatatatgttaattaatttaaaaagcctaattattaaagcaacatgtaaattattggtagactatattattttaggtgttagtttttttaaaaacaaactagaaagctaataattattctctcttattctatattggcttttctcttagtgaccatttcttttttgtcttatcatttaagtatttgtgtttttcatttttagtctttgagctgaatatatatgctaatttcagggaaaaacattttagtaaaaaataaatttgcaaaaaagaaagagcatacctctgaatatatataatatactaggtgaatttagatgccgagccacgtattgctagtttcatttaagattttggtttttttaagattttgaatgtattttatttttaaag

SEQ ID NO: 107265 - DNA, 2783 bp, Cannabis sativa
  modified_base (2714)..(2733): a, c, t, g, unknown or other
cagagaaaatgacttgagagatcacaaatccttgtttttttttttttttaattttaaaaaaaacaaaaaaatatatatgctaattacttttgctttctttttaaatataatttttttaatgaaaattcagctatattaacaatcaaattcggttaataaagaagttttagcaaaactatgaactactttattgctagcttaacaaaatagataacaatattactgagtttagaaattttaaatataattaatgctaattacctcataggggtatgttgaaaaatacttcttttatttatcaatgaactaaatctacctccaattttatatttaattgaaacatacttcttgacataaaagagttatatagaaagtatattgaggtgacagaggtaaaatcggtaaagtatttaaaaaacgaggtaaaaatagtagatgctttaaaaaaaaaaaaaaatgaaagaggacaatatgaaaagggtatagagtctaatttcctcaaagtgttttaatagtaataactagtggttgtgtatttttgtgaaaaatttccgtatggtagtaaaattataaaattttgtccaaatccaatatttttataaaaattctttttattaatgggcagcccaaaatatgaccacttgggcctaggatcgaggccctttgagctaaggctccatttttttttcttttttttttatatctaaatgagcatattttgacttatttatttcatagttctttctcttagaaagaaagataaaagatgcactttatctcttgataaacgtgtatggacatttgatatttaataaaaggccaaattgactaatcaaaaaaagattcaactaggaattatgaaggaattgatgattggttacttggaggaattggatgtggtgtgaaaacattaacattttactaaaatggaaaagaacttataataaaattgtactctaagcttagcttttaacatttttttaatatatttaacttaaaaaaatttttgtaatacgaacaaaaaatataatcagttttatcataatacctctaaattaagtttttatttgatttgagaaaaaattagttcagtatactattttgtaccgttttaaaaagtataaagtcaaatttatcacttaacaaaataaatagaccaatagtaactttgtaaaatacaaaatcaatgatcgatcgaaaacttttgtaaaacacataattaaaaatggtatttatacatatatgagagaaaattaaggcactattggtggttggtacacctgtaattaagcctcattttaatcatatacattttgaccataaagagattataaaagcatgttcattagtacactttacaatcaattgaaccaagcccaattttccaaaaataagcacaagaaagaagaaaattaaacaacacacacaagtaagttagtgtcttctttaaagctatatagaacatgccttcatccattgtccctaaagagaagaaaaatccaaaaacatgttttacttgtgctccaaaatatcatgtgctttaagcatatatggtaattaattagtgatttgtaaagtatattgttgttaaagacaaaaattaaccaagcacttaatttacttgacctttctaacatatattaccattaatataaattttattccacttttattgtataataatatgaataagaatttgaatatgccttttgattatggtattgctaattatagtttaaactcattttccacataagtagtttttcttagctctctcattttgatttgaccaatagtaagatttcatcttttgatttgctttaaatgtttgagcaacaatataaagtgagaaaaactaaaaaatattaatagtatttttcaatgtcactacaagatattatatcagcgctacacatctcgataaattatcatgaattaatattttaatttggtaatatacttatgtttaaaatattgatccatctaaaaatttttaaaatataaattaataaaataataaccataacatttatgatatatattgactaattattcagaacacattatctcatgatactgagtactactgatacgtaataacaatatgcaaattaatttaagttcaagcttgcaaatgggacaaatatcaagttccaactattttatttagctttgataagaagaaaaggattttcttttttcttttttgacccataaatcttgggattgttgatgttgatataataagagtagctatagtctttatgatggatgggcttatggtcgccaaaacagtctacagtctacacctttaagctttcttggcatgggctttgcaacatttgttcatgacaaagacaaacacaaattctattctatataattatatatatatataaatattgatctatgcaataaaaatattattttattggtttttccaatagaattgagaggacaattccaagtttgaattttgaaatattatccggtactcatgatactacaatgtgattaattaacaaattaattatttgagatctaattaagttcacatattcacacatgcatgaaaacaaatgaaaagatataatatgtattctatataaaatgtggttatataatagaatttttagtttaacgttggtttttagttttctacgttaagaaactaaaaattattaatatcgtattctttattaattttataatannnnnnnnnnnnnnnnnnnntaaaaattatatagatattttattattaaaaaattttaattttaatttaa

SEQ ID NO: 107266 - DNA, 1628 bp, Cannabis sativa
  modified_base (51)..(73): a, c, t, g, unknown or other
taaatgctatgttttagtcacaattttgttatgactaaaagtcacatttannnnnnnnnnnnnnnnnnnnnnnctaaaaagttgtcactaaaagtatcaattgtttatagtgattgtgattagttcatagatgttttgacaaactttaatttatgagtttgcccaactttattaagtataattctattagcaattgaatcaatgttccaaaacacataatattacaaaatatgcaaattcaattatatatatttaggagctagctagggagatgtggtccactaccacaccacagaccaccaaaatctcagcaacgactactattaaagagtaagacaagcatccattgtcgaaaagtacacgcacacacatacatgataatccatatatgtattagtaacagttgaatcttatatagaatgacaaaattttacttaatatattgaccaaccaccagtaccatccatgtcttttttatgtggtttcaatttttatgagcagtacgtacgtggcttagttacagcttattaattagttcttctcttaagctatatatatatatgaatgagatttttgtcatgttttgtgtaatgattatttagaactatgcacacagcttattatagccttacgtaattgtaaggcacaaattggtagaaaacgaaaaccctaccttctagagagtttacacacgtttcccttgagaggtacgtactttgataattaattctatttttgtttttaagaaagagattggagtacacgtatatatatgtatattatttttattataatattttatcactcataaatatagaataataaaatttaaatttataaacaaacatattatatattattataaaagtataaacataaatctaaagaatacatttgtaaatttaaaataatagctcaaatagtaaaagcgtactttaattcataaataatcactaggtaacaatcttttaagaaaacaagacttagagttctctaattttctctctaaaaaaataaggacaaagtgactcttatttctttgggaccactatacatatatacctaataagttattaatttttactatttttaatttagcccctcaataaattagaaatatcacttaaggtatctacacacatttagttcatgacactttaatactcaatcattcacaattaccaaatgattcattactttatttagatccaagtttatagggtaaataacattttggatcttgtattttgtaaaagttaccaattggaccctctattttgttaaatgacaaaatagattctatattttctaaaatgataaaaataagaccctgagctcaattttaaataattttattttttaatataatcaactaagataatttttaacacaaacagatacagaaaatgcaaccagcttttgtcataacatctctagatcagattattattaagttttattttgacaaaaatcagttcagggtcttatttgtacatttttagaaaatacagagttcatttagtcatttaacaaaaacagagggtccaattaatcacttttgtaaaatacaggatctaaaatggtatttacccaattttatatagcaataggaaaatttacatggtata

SEQ ID NO: 107267 - DNA, 3069 bp, Cannabis sativa
tggaactcaagatcaaagccaaggcctagggaaactaggaagtgtcattactgtggtaaagttggacacttgatcagaagttgttgggacttaaaagataaaagaaagaagaagaaggataaagaagaagatgacaacagcaatgactcgaatgcagtaattgatgattttgatggagatgtatttgtagttattaacaatgaaaataaagatgcaattaagacaaatggagatgtttgtaccagttcttatttgaaagatcaagatgattggatcttggacagtgggtgcacctatcacatgagtcccaatagagattggttcatagattactcagagataaatggtggtagtgttgtaatgggaaatgaccacaagtatagttttgttggcattggttcaatcgtcatcaaaagttttgatgggactttcaaaactttacacaaggttagacacattccagatttgaaaagaaatttaatttctttaggaaccttagatgatgaaggatgtgattacaagacaagtaaatgagtaatcataattactaagggttcactgctagtactgaaaggaaccaagagacatggattatattatcttgatggtaaaactataacactagctcaagcatctgatgttgacaagggcaatgcagaatcgaaattgcggcatgccagattaggacacattggtgaacaaggtttagttgagctatctaaacaaggtttgctaaaagattataatcatgctaatctgcctttctgtgagatttgtgtttagggaaaacaacataggatcaagttctcaaatagcaactacagagccaaagcagttctggaatacatccatgcagatttatggggagcaagcatggtaaaaactcagggaggtaaacaatatttcttgtccgttgtagataataatttccatcttgctattaactatggaaatctcactcgtcttgaccactctgataatattttcacttgtaacaatagagcacttggtactttaaatatcaaggagtatcttgattatggatttgttaatctcacttggaagcaaactttcctttctacttgtcttcatcacctagactattattcctcagatcatagagctcttaaagttgaactctctaccacccatgctactgctccgaatccaaaacaaagatctagattcagatatgaagccttgtggttaaatgatctcgaatgtaaagatatcgttactcgccactggaattcctctgaacaacatctgctccaccaggttgttaacaatgttcagacgatttcttcccatcttcaatcttggcacactaaaaaatataggaatatgaagaggaatataaccaaagctcaaaaacaagttactgatcttagaaacttggatctttcaaatgctattttttttttggagctccaccaatctgggaaaattttggacgatcttcttgagaaagaagagacatactggcaccaacgatctcacattaattggttgaaagtcggcgatgcttatacaaagttttttcattctcgagcctctggatgcaaagttaataatcatataaaaaagatacagactagcaatgggaattttgtctcaaatcttcaaggtatcactgaccaaatccattcctatttcaccaacatgtttgacagtaatggtgttaacacttctactattgatcttactttggataccatccctgcaaccatatcgcctgcaatgaacaacttgctacatcaacctttcactagtgaggaggtccttactgcccttcatagtatgggaagcgaaaaaagtcttggacccgatggcatgcttgtcatgttcttcactaataattggagtactatactccgattgaagccttttctgcacttagttatttatgaatttcagagtgcattcatctctgatcgtttgatcactgataatattttggttgcttttgagttactccactgtcttcgaaacaaaataagaggcagaataagttatgtagcttttaaacttgatataagcaaagcttttgacagagttgaatggcattttgtggagcgagttttgttaaagatgggtttcggtcatggtgttattgagcttattatgtgttgcatctgttcatccaattactctttccttatcaatggccatgttactggaaatctccaaccaaagagaggtattagacagagaaaccctctttctccatatatctttctcatatgtgctgaagcgttttctctgcttctccaatcttaagaacagtggggtatgctcactagtttaggtattaccaagcacgctcttaaggtttctcatctcctctttgtagatgataacctcctcttctctcgtacggatgcccgctcacttgctgctattaaaaatactttagatctttataacagagctttgggtcaactcattaactatgacaaatctgtcatgttcttctctcccagtacctctattgctgatcaaaatgcttttcacctccttttgggaatgcctatccaatcttgtcatgagaaatacttgggtttgccctcatttacaagccattataagaatgaagccttcaatgttatcaaaagtcgaatatggaagcttcttacagcctgacaagagaagctcttctctattggggaaaagaaatccttcctcaaggttgaggtctaatcaattccaacatatgctatgagttgtttcaaacttcttacttctttttgcaccagtgttgaaagtatgatggctcgcttttggtgaggattcaaagctaagggtcattgtatccattagaagagatgaaattatctttgtcgcagcaagcaagcgagaggtcttggtttcaaatcttttgttaattttaaccaggctctcttcgctaaacatgcttgacgtatgtttgataaacccgactcccttttatatcatattctctctcactgttattttagccgtacaggctttcttcatgctcaattgggtaataacccctcgtgtacatggcgttgtattcatgctcaatccttagcaccttgggtatac

SEQ ID NO: 107268 - DNA, 1441 bp, Cannabis sativa
ttttttttttttttttgtgttcaacacaagtttaattttgttttgaaaagaagtggcctgtgttcaaaatgtgttcaaaaaaaaaaaaaaagaaaaaagaaaagaagtgacccttccaaccttatagagtcgtattcaaatctctatttttagtacaacctataatattttcaagaaaaagtagaagaaaaggtgtttgtaaaggagatgtcccaagctacaacctttttctagtattcttgttctttttttgtagaaaaacaatagataattaaatacagtattctagagtcgagacaagtattcctacctatagttttgtaagcatttatcatatacatgtcaatgagggtcagatatccaattgattatatatcaaactcacccttgtatcaattatataggaggaatgtgcatggatttagatcgagccctattataaacacacatagtttagtttgccaagccttgcagtatgattcataacaagctccaggatgttacagttcttcaatttccacatgtccaaacatctgaaagcactaaaagttactatacatcctctctaaaagacaatttattacaacagagattaaaatagttaagtgtcaaagaaaaaaagttaaaaaatcaaaacaaggtttcgttttctctaaactaaacaatttctttcttaccattacacatgctgaaattttatacttttgtcggtctcaacatatacatattacatgtcttttcatgaggacagcgaaatttcaccaattatattagataagtctgctacatatatattcactatttcaattatcttactggagataaaatgtcattatttagattaaatcaatctatatagactaatggacaacatatgcttattaattagaaataagtttcggtgatgttaatgccaaattcaatgatttgttggaagagaaaacacattgatgatattgtttcgataaataagataatgaagaaagaaattgaaagctcatattcattcaatagaattctgcttgcaaacaagaggtaattcccaaaccttttagtatgtttgcaaggctgttactccagaaacacttgaatacgatcgccaattgtgtcattaaaatctatcaagagtttccctcctggttcataagctgcatcatccaacagctctttgaggtttactccccccaaagctgtataacagaatgagttctgagatttaaagacttaacaacatcaacaatccttttacaacaagcaataaaataggaaatacctgggactatactggtgactccttccaagaatccagcctgtttgaaacaaaataaataattacattatttgttgatgaaatactgaaattcaggtggcatttggttgaaggtaatgaaatggaatggaaaggaaacaattttcattttattcctttatttggttgcat

SEQ ID NO: 107269 - DNA, 2098 bp, Cannabis sativa
aatatttaattaatattgttttaatgagtatggaaatttattaagaatttttaaaattgtatttttgaaaaaaaaaaacttgaaatcatattttgaaaatttaaaattgtattaaaaaaatataatatatgtactttattgtattctcaagagaagaaagagactagtgtgtgttgcaaaatccatataattaattaaaatttaaataaatgattgatttgcatggttctaatttaaaggtaaagagtaattgtggtaataatgatatgctttcttttatgtatataattaactttaaaattatatttgagttatatgagtctcaaaaattcaattaatcaaaagaagaaagatattattctaaaaatgaagaaagtgcatagtagaatatatataatcaagacatcattatcaactttttatatctcataacaattatttaataaaaaaaacaattaaaaatcataatccaagttcattttttgcatttaagatgtgtttggaaagttattgtgtaactgaagctaattatttaatttaacatgtttgtcatgtacttatgttatattcgtataattgaaggtaattaaggggttccaattatactctgatgatcccaatgaaaatcgaatataattacattgtgtaattactaaaaaaaatttattttaaatatccaaataacttattaagtgtcaatatcattaaatcgtttacgaagaatatgtatgtattacttgcgtatttgttttgacatttggagaaacttttagttcgttttttttcataataattatttaagattatttatatattttttttaaaaaaaaatctaaatagtttaaaatgtcgaaaataaaatttaaacaattacttaccacgtgtataaaataaaaagtcacccatgttataaaatgttttaattttattttcagcattgtaaattatatgaattttttaacatttttacagataattctaaataattacaatgtatataattataaacaaaaaatcgattaaaaaactcttataaatgccgaactagatagagatttgtcgagttctataaactttaccaataatttatgagaataaatgatttcattggtgtctgttacgaaataatataatatttttatttagtaacctacaaatatattaatttaaattaaaaaaatatgttaaataatacgtctacatattttaatttaataattattatatatatatataaaaaaaaaataataaccatttgctattacatgctattttgatcagtgtgcaattgtattcgtatttttgtaactaagaagattttgtttgaaaactaaaataaattatttgctatataacatttgtttgttttccaaatttagctattttaacttgaataagtaagaaactaacaaattattgttttatgaatttcccttgaatgtttatggctgaagttgataagaaataattatattatatagagaaataagactataaaaaggaataacttatgagtaagatcattgtaaagtttaagataaaactaaaagcatattaatttgttttgccatattgaaggaaagtgttgcttttgatttgtattttgttttctaaatttactaataattcatatatgagtttattcaaaaaaaaaaaaaaaatcatatttgtgtttatcacaaaatttatgatttataattataaattacattgataatattcaataatttgaaaaataaggtaataataattatgaaagttagatcatgacaaatgggctcttaaaactaacacacacctctaaagctaagattgacatgtttaagttaggattctaactctgatttttatcttttattttttatgttttccattttattatattacaaaaagtgaaaaataaaaaagcaataattaaatgtctagaagacaaaaatactaattatttaaattttcaatgatcattttagtatacatttttagggatatgattttgtcccttgattgcactttcacggaatgcattccgtgatgtacgacagccgtcagatgaaggacttatttgatctgacggctgagattgatctagaagtaatta

SEQ ID NO: 107270 - DNA, 2932 bp, Cannabis sativa
gagttttatttagggctcaaagcccaacagtgtattgtggaagcttgctccaatccatatgagtagacatgtggaggttaaaagtaaaattcttattgctttccaagtgctagtagatcgtggaaggtggacttccatcttcagctttgggaagcaggcgtggcagtcctctagtggtggaggagtacgtttacaaaagagttgctttcctgaaaagcttttattttgatagttgtttattattggcgcaaaaattaagaaaagtactttcatcattgatttatgcctcggttctaggggcattaaatgcttgacatgcttggttgctggactttcgagccacatgatatatttgtgcttttggatacacgatctgaatcgttcatttttcttcacatgaattgttcttgatttcctatttggaacaaatgagccctgaaagtttttgtttctagatagtgaatctggtaaggacctcttcaagcactttatgggggaggattccccttctccctctctatattaggtagtttgggtagctaactgcttgattttctttccacagaaatcacgtccaagaaggtccagcgagaagaggttgaactagaatacaaggtaatggagcaggagaatgcaccaaaattgatgttgaacgacagtccatgggaaatggactagtacattaataaattcaagatttatggtaacctccagaaatacgagaccttgcgggggcttgaaagtgttccggggttgtactggaatagggtctccgtcaacagagaaactaaacaaatgtgttgattgggggtttcgacatttagagttgggcccatgtggagatgggtgcacaccttctgccaaggtgttactttgccaacttctgtgcggtagctggagttgcacccttccagtttataccacatatgtaccatctcctatctggatggtacattttgtgttcgtggcacaagaaaacagtaccaacacctaaggagatttatatttctacaagattaaatctccacccatgaggggtcacaaggagaagactgtcttctacaagttggaaagatactccaaaaaagtgcactgcccaatcagttctgtgaagtatacacacgatgtaacaccctaatccctagggacgccacgtatgtacttttggaacatagtttagggataataggttaattatttaataaaatttgtgataataataaaaacttcaccaacataaaaccataataatgaacaggatgacattgctaaaaacttgtttcggggatcccctattacaaaagttttacaaaaaggctatatacaacagtaagtcaaaatacacattaggtacatcccaaaacaacctttgacaacttgaccatacaagtcggataagtcaatatgtatgtttgccgaagaagactgtcgtctcatagttgccctagtttccccttacccttacctgcaccacaaagcacttgtgagtcacaaagacttagtagaaaagtaaacaatgaaagtatataatagccagatatctaaatcaggataaataacataattaaacagtaatactcaagcacttgtataataagactaagtcgtatatgttactttataaaataactatttatgttgttgcctaataagacaaccctgatgtcctaacccaacatccacatatctcattgcctaataaggcaacattgccctaccttgacatccacatatgtcattgcctaatgaggcaacgctgatgccctaccccaacatctatatatctcattgcctaataaggtaacaccgatgccctaacctggcatccatatatctcattgcctaataaggcaatgtcgatgccctaacccgataaccatatatctctgtcattgtttaataagacaatcagcaagtaggaaacctaacaatagtttcacttgatgtcatgacattggaaaatcgccccatgtttagataagtatacctattgttcctttcctaccttcatggtccacatggtggtcgtggagggcgagcagatcgattaggtatttgatcatttataccttcaccgtctctatgagatgactgttgaccccttagtcgtgcctacctcaaagtagtggcaccctgagtctgtggcccatgctcatcgatatgaattttccttgtttcccctagttgttgattctaggggcgaatggggttattttactcctgtttagtggcattgggtcttcgtgcccctctggtttgtgacccatgtagtcttcctcgtggccgtcagacaggttgttcttcttgtaccgatgatgcatcatttggggttgttttggccgcaaccatagctcgttctaactcctcattcctttgattagatttcgcgagtctttgttgaagttgtcagttttctaactccacgagtgggacatacctcatggggtcatacatatttgaatctcttctctcgggaatttcttcctcagggtcatctcttccggagttcctttcaatgggattccttccttggtttggtctattttaagtatgtgttccttggggctcttttcctgatcgatgcactgtctcttcttccatgactggttaatcatgttgagtgttttccatgacgaggaagtctgattatatcgaggagatgtgtttcgagttgttaatttttaaacaaagactctcaatgaaagcaccaaattgttagcacaaaaattcattaataataatgaagccttataaataaaattaaaatatttataataactaaatataaataagacaaaaagaaattttacatcactttatagttaaaatctacatactccaatagtcgttattatttctgattattcctttatagtatttctggattcaagatatttttgggtatttttaatacttaatttctcaagagttt

SEQ ID NO: 107271 - DNA, 2433 bp, Cannabis sativa
  modified_base (70)..(77): a, c, t, g, unknown or other
  modified_base (453)..(453): a, c, t, g, unknown or other
tatgtgtttattttatatcgttttcgaagttcatatttaggatgttaaataacatacttgttagtaaatnnnnnnnnctggtaaaataattccaacaatacatctatttgttctcttctcaattctctcattattctaattttttttaggtttgtaaatattctactaaaatataaaataaaaaaatatttatttttctattttttacacgctaaaatatatttttttattttctaatttataataataataataatagtaaattaaaacaagggataatttcacaaatacacaaaaacaacaaaaataaataacaaaaataaggtttcacagaattttaaatatttttaggaattttttaattttatttacagaaaatacgatatttttttgttgtattcatgttaatttgctgttaattttttgttatttatatgttattttttgttgttnttttgatgttatttttatgttacttttatattaaaaaaaattcatcaaacgtaaaaatgtaattattttacaaaaaatattaccttatgtaattatctcctaaaataatatcctaggccggtatgatgtacaatttcctacttttattaaactttacaaaattattaataattaatttaaacgctaaaaaaattggaatccgtatatcttctcacaatttgtttaatataacttttttttttcattctttattattgtattttctttaaaaatttgagatttgaagattttctttttcatgatttaatctaatctattttcttcatgcatattgtttgggagtaaaaaatattgtatgatatagagccaaataacaattagtaaatatgttattcatattattaaaaaattataaaaatatcataatttgtaccctatcactcttgcttagttctttgttaaggaaaaagtttgggggagagattaaaagcggtgcaataaataattcaaacagcatgaaatttactacaattgtgtgacttagttattattaattaaacaagttacaaccacaacaaagtgcggtttgttttctagttatatcataaaactaatgtaatgatgattatattattaaaaaatatttcttttgcctttttttattactttttttttaaaaaaattttaaatattacaaataataaaactaaatgtatttttgtcaatatacaacttattttatttgaatataatattcattacaaagttaaactaaatatgataatatcatacttattataacttttattccattacattaccatttatattacaattactattatcattatattaccatttatattacaattactattctcattacattacattacataatatcaaagcaaacacaaccttaattttgagccccttacaacaaagtattattcaagaggtagttactagttagctattaatatattaaaaggaacaataaacaaataaatataaataaaagcaaagacaagagggaccatgtatgaaggggcaaaaaggtaaatatgtataggacttttgtaagagaagcgtttagagacaacatattatgggaacaatagaggaagacggttattgtgaaagtgagattttcttagtcaaaaatctattaaagcttttcaattacatcaatcccaattgattctaatggtcaagatctttctaactccttgatttgcggacactaattaagaatcaaaacttcactcaaactcttacaccattttttctatttttttttttctatttagaataatgggtgagagtagcttattatttataggccattttgaatactcgctcaattgcaaagggggaatgtaaaacaaagtgaatggtggttattgggattgactattcaaaaacgtatattttaataatatcatttcaatttaaaggtacgggtgttcatcaaaccgttcaaattattcaaattgcccgcaccacaaaaaaaatacgatttgaaattctttgcagtgcggtcgcggtttaaattttcttaaactgcgcggtgcgatgcagtttgcggttttgaatcgttaatatgcggttcaatacaaataataatttttatatttatttaggtccaatatgtgaagtaaaaattacccaaaatatgggaaaattttaagagtttatttttttatggcataaataattaaagctaagtggttatgagtttttttgtttttttacatttaaatagtttttttttatgccatatttttgtaaaaaaaagtacaaatcccatatttgtaaaacaacaataagttttgccggaaaagtcacccgcactggaaaagtcgtcggaataatcatggtcgccggaaaagtcaccagaaaagtcaacgtggccggaaagtcaacggaaaagtcaacatcaccggaaaagtcaatgttgctggaaaagtcaccaaagta

SEQ ID NO: 107272 - DNA, 2112 bp, Cannabis sativa
ttttgctttcatcaattgagacaattaaatactgatccttctttaaaacaatgaacatcctatcagagatacaacaaaaattttgtagcacattgtaaaataaataagaccaaatatttttactatcaaactattttgtaggcaaatgtcttatttatctactaagtttttgttagctaaatatttgtgtgtagttattaaactacattgtttcttaagtagcaaaatatttttttattcttagataccaattgtgcttaataacaaaataatatttcatttactgttttatgtcacacaatattaattgttagctacctatttcgctgccatttgttttaagttgatattttctatatgaatcaattcttagctccttattaaaaaaataaaataaaatcttagctgttattctgtagaaagataattttcttaacacttttagcttccatatttagtaaatataatatttgttagctgctactactaatttattgtagtataaacataattattctttctataatattttttaaaataaatagtaaaaatgtagtagtaattaactttttttttaccaaaaccataattattatttgtaatgattctgtaataacttatcttatttatatagttttgtaacgaattttagtgaggttatttttatcgtttctaatttatatatgtcacatacattcatcaatttggtgaataataaaaaaaaattgatgtctctcgcattaatttttctagagcacagtgtcccttcttgatgctttttatggctaacccaaaagttgtacaaaaacttttggagatttttgggtttgcttgggaactcttattatggaccttggttgtgtggtggtattttaaatgcgattctttatgcccatgaaaaagagggggcgggagtgagatcatcttattttatgaataattttcacaatgctctgacgagtgtaattttagatttgggtttttctattccaaagtttacatggtgtaaccgtgtaaccatgacaaagatgcttcctttacctaattgagacttaatcgtatgcttgctagtaatgagtggatggatatttttcttagtttttttgtttctcatttgaattatgggggctctgatcatcgacctcttcatgtcaagtttgaccgtgagatatgtggttcgatccctagactgattactgaatgtagtgacattgtgtgccactcttggaatgcgtgccactcttgcactactataatatctattaatatgggcctttagctatttcccttttttcaacccattttataaaaagcgaagctaaagagtgtgaaaatactcgcctgattcgaaattgacatttagaggcagtttttttagtaaaaactgtagatatagatattaataaaccttatgtcgtcggttgggggttggaaaattttgaggccttttaataaaccctatatgccgtcggttgctatataaccgatataggtgcacactttattgacacgttcgtgtgcatctatgccgtcggttatttcataggaaccaacgacatagggtttataaaaataacctggcctcgtcttcttctttcccacttcttttccccacgataaccagcagccatcacaccccatgaaaatccacgaaaccctcgcccaccaccactaaaaaccccctatctctctcatttctttaccatttcatcccatttttattttaaaattttctattttcaatatctaatcaaatacactgaaaaagttttgttttttcacccatttgcactgtacccgaacctattttaagagaaggtggtggtataactccggccaccgatttttagcggagaaaacgttgaatctcaacgtccattaaggtataaatatgatttctattcattttattaatgtacattggtattatttcatttttgtaatttttttggggattcttttattttattaatattatattgtgtgtatgctataggtggctggatttttgttgcaatttatctccggattgcgcttataaggtaaatatttattagcttgatatataatatatatgtatatattttgtgttttattattgaatatgtgttt

SEQ ID NO: 107273 - DNA, 1031 bp, Cannabis sativa
agtatacgtgcctcgcacgtaatttttgctagtatatatataaatttctaatcatatacataaactaaggtgcatatgcacgaacattaacacaaataaaatattgctaaacattataattagaaaagataatttatctactaattcaaaaagagaaacaatgatacgtacagtatcagtacctcttatgtatatatatatgttttcttcttaaatttgtttaaatttataagcctatggcttttttgtgtgtttgaagccatttttgggtttggtactattattgttgatggggtttggctatatattatttgattatggcttttacttgttttgtttgttagtatatattgtcattatgtacctaaaggtttggctaatttggtcaatacaattttatttcttagcattatcaacctataatatcttatacgtaccttgaagagaaaaatcggaagttgcaagccgatcgagtgatgtgattttgcactatatattattcgtatacaaataaacaataatattgtatagttagatagtatgtataatcatcatattaattaacatgttcctagtatttagacgaaaggacacattcatataacatatgtgatattttgttcatcacaattattattcatttaattaattttgtcatacacacttgccaagtctaaatggtcaagagctaaattagattcaattaattgagttttaaatgaaaattagaatttcattaaacaaccaatcggttgttataatagactgctagaattatatatttggttactagtgtttgagttcttcaattttctatcaattaattgtgtattccaccttcttaatttttttttaaaaaagatcacgtggtggagattttctctacttatttgattattctgacaatttaaaaaattacatatcaactagatgagccttatatatatatatatatatgaggatatgattttttctcgtgatgtactttcacggaatgtattccgtggtacgtttctatttttttaacccta

SEQ ID NO: 107274 - DNA, 4005 bp, Cannabis sativa
aaaaaaaaaaaaaaaacccttttcccccctattgctgccgctttcaggagaggaccttctagatccgacccgattgttacattcggatccggttttacccacttatgcttcccatcttcgttatctgctacccaaaaactcactttctctaggtaaaaccctagctttggttacgatcgcttcgccatgggagacttaaacgatgctttcctacgcaaccaaaacgccgccgttcaggcccggaccaaggcgcagaaccgtgcgaacgttcttcaactcaaactggttcgtttctatcccgattatttatttatttgttttagggtctgcagttttctcttattcgattttgtaaccctatctttggatttagaacacgaatctgtaatttgattctggtatgaaatgcaagggcttgacctgttatagatgtattaagggtttttgttataattttgttgatcgaggtttgaattattattttttgggtgcagattggccagagtcatcccactggtcttactaacaatcttttgaagctctttgagcctcgaccgccattggagtttaagccacctccagagaaaaggaagtgcccgccattaacaggttttcaaaattttatacagcttgttgcttacgtttgagttttaatttaatttttgttgaagttaatttttattattttcggtcatgaagggattgcacaattcgtcagtaagtttgcagagcctgaagatcctgagtacgctccgcctgttaaagagggtgaaactccggtaagatattcacttgatcaatttagtttgttgtctttcgaatattttggtgttaatttattctgcaactgtaccagaaatctggaaaaacacaactcatagccttcaatttaacttatgagctcagtcaacgattagaaacaatgataaacaaggatcactaattgtacttttttcttttcttttttttctgacatgtttggatcaattcagactcaaagaagggctagaatacaccagctaagacttgaaaagggtgcagcaaaggctgctgaggagctagagaaatgtaatggaaccaccttcttttacttctagtaatgatatagatccttaatgatattttgatattgttgttcttgtttctgatctgtttcttttatgcagatgatccaaataatgacccgaacatttctggagatccatacaagactttgtttgtggccaggcttgtaagaatactaagaaactttattttttagacttgtgttttccactagtggagtatgctgaagatgagtgttgcttgtttgcccttgcagaattatgagtcaactgagagcagaatcaaaagggagtttgacgtttatgggcctatcaagcgggtaggtattttgagcatccccacggggttcggtaagaggttcagttgtgttaagcctgctccctttttggctattaaaaaatcccttaatattcattaaattaaaaatttaaccacaacaaataaaaagtttcaaagatcccaaattctttagcgtctgtttttactccaaatgagaaccacattattgttgctgtagcattggtatggtacttataaaattatgtgaaaatatggatttcaagctgatatgtgttggattttgaaattgttaaactttggatggaagatagttaagtatctttgacatagttctaccataagtggagtgtcgatatgagattctaatacaggtgtcaatgccaatatgctgatatttccttgcgggcttgtctcaattaaccttctccttccttagcctctctcgtaagttttgtttagagatattggaatgagtgtttctaggacttgtgttggttttaagttttaaactttaagaaatatccctggtaaggggggaactattctgtaaatggtcttttggttttctacgaacacaattccaaagatggtggatcatcctgcgcaagcaaagctgaaaccttttaagttgagaagagcagtgatgcattgtgccatttggccttgtttcaagcaacaaaaagagatcgacaacttctattatttttcctgcactgggtaaaacatctagggagtactagtttcttctcctctttttgaattttaatacatacatttttttgctgctaaaagttttacttttgacctcaaaggctcacaaataatatcagccatcaagattacctggtatttcttatagcctctacatttttaaattatttgaaaacaaaaattccctggtaaggggaggttaattgttcaacaactggtaaattggccacattaaagccagtttttctacaactctacccggtgatgatgcatcttgcgatgggaagcctatgatttaaaggtgagcacggctaatgaggcatagtgcctgtctgccgtgccatttaggatttaacttttcaagcttctgtaggatgttgcttagttttagatgttcgattagtatataggtatagattttgtttcctagtctgttttattttgggtcttacgaatttctcttttctggtttattcattattttcttcttgagtgttcaggttcgtttagttaatgacacagagacaaataagccaaaaggttatggctttattgagtacatgcatacaagggacatgaaaggtttgtttattttttttacatttcttgattttttttaatctgatatatattgtacgtgacatcaaattcttgcaatacacagctgcttataaacaagctgatggaaggaagattgaaggtagaagagtgcttgttgatgtagaacgtggtagaactgtaccaaactggcgacctcgccgattgggtggtgggcttggaactacaagggttggaggtgaagaagtaaatcagagatattctgggaggtaaacaaataaatatacaatagtatctgcagccacactccatgttgttgtccatagccttttttcttttaattcaagtaaaattcaattttttatgtagttgttggacttctttctgttgatcaatgtgtatttttaatatattttcacatagaccctgttatacttcccacttataatatattgctcagagaacctgttatgtttgccacttataaaattttatattgcacagagagcaaggtcaaccaggaggaggacgacctaggtctgaggagcctagggttagagaagatcgccatggagaccggtaagtacattttcgcaggtttttttttcttctataattatccttgagctttatcatttgctcatagttcatatgtaacatcaagctcccagaaatcttgtgcttttttacagaatcttttaacaatattattccagggatagagaaaaatctcgtgaaagggtaagggataaagagagagaacgggagaagtcccgtgaccgctcccctgaacgtgctcatgaaagatctagggatcgtgatcacagagaggatagacatcacagagaccgtgataggaatagggacaaggatagagataaagaaagagaacgtggtcgcgatcgtgatcgaacccgtgatcgtgaaagaggacgagaccgtggccgtgactacgagcgtgatcgtgatagagaacgcgatcgtccccgagaaagggagagggattacgaagttgtggaccctgaccatgaccgtggtcattctcgtgatagggagcctgaatatgatcgcgtcgagtcaaagcatgacagagatcgacatggtgaaaaagatagggactatgacaccacagcaccagatgaagatgggggctggtatgaacaaccagagcatggcagtaggctctcaagccgtgatcgtgaccgatcacgtgaccgtgatcctgagcagtatgatcattatgataataaccgtgggcagtatgaccggatggatgtccagggggaacacgatcgttatgagcaatatcttgatcatgatcatgaccgatacggtcgagtggaggattatgaacgagctgcatctgagtca

SEQ ID NO: 107275 - DNA, 4088 bp, Cannabis sativa
tcatcaccaaaataagaaacaatttctgtaaaatataatcacacatttatataaaaagatcttctattcttcaattctttaaatatttaaatattttccaaaacattaattttatataaaaattaatgcaaatattctaattaaggtaaacaaaagtaataacaatactattattagatgcaattaaaccttttcaaaattatgatatatagcattaggtttaggccaggttggagatgaaaattgaaaatattaatgaatgaaatattcaatggtctttaataaagggatcaaaatgttaataattttagaaagacccttccaaaaatacaatttaatatttttcatttggggtaatttttttgatattcaataacttgaggacttttctgcaatatcagaaagagagtggagaaggactataaagcaaataaaagagttgaaaagtgcgttgcagaggatcaaatctcggcattagcgaagttcgagttgatttcgtacatttctacgacctttcttcttcatcatcatcatcataatctctcgcctggtttttacaactcttttgttttttgtctgtgaaatttctaggctttacaaataacccccttttttggatttcaattttgattgggattggattggattggattcgcctatcccaatcgtgttgctacttttttcaggccaatattttgggaaagaaaacaaaccccagaaataaaattttaatttttagggttcttttcgtgtgttgccacctatcataacaaaccccagcaagaaagtttgaacttttaggtttttcaaattgagggtccttcttcaattaatgggtggatttgaacaagctgctgctgctgctgatactgggtaagttatatatatatatatataaatatatatcttatatttaattgatttaagctactttttctggggaattatttagaatagaatacacaatccttttatgttgtaatttatttgatttttattcaactttcataagagggctcttcttaagtgcttttgattcatgaattcagtatttaatttcatgtctcttgtagttgagtgtgtgtttgattatattttagtcatttgttgtaacatattcatgtctgtatagataatgactgttttgaatttgttgactcccattaatgttgttgttctgagaattggtatgatggatggttattgtagagactaggagaatgttacttctttttttgactgagagcctaataagagtatttggtttgtttaaggtgactgttgtgtgatttggagttagcaactcaagggtcaattagagtgttattgtgaattggaattgagacttccaatggcttatgatggtgatagttcggacatagaagttgatgacttaaggtgcgatgatatagcagacaaggatgtcagtgatgaagagattgagccggaggaattggaaaggcgaatgtggaaggatcgtatcaagctcaaaagacttaaggaaagacagaagcttgcagctcagcaagctgcagagaagcaaaagccgaagcagacttctgatcaggcacggagaaagaaaatgtctagagcacaggatggaattctcaagtatatgttgaagcttatggaagtgtgcaaagctcgtggtttcgtttatggtatcattcctgagaagggaaagccggtgagtggtgcttcagacaatattagagcttggtggaaagaaaaagtgaagtttgataagaatggaccggctgccatagctaagtatgaagcggagtgtcttgccatgtgtgaggcagacaataatcgaaatggaaattcacagagcattctccaggacttgcaagatgcaactcttggatcacttttgtcttctttgatgcaacactgtgaacctcctcaaaggaagtttccattagaaaagaaagttccacctccttggtggccatctgggaaggaagattggtgggtgaagctcgggctaccccatgctcaaactcccccgtataagaagccacacgacttgaagaagatgtggaaagttggagttttaacagctgtgataaagcacatgtctccggatattgcaaagataaggagacacgttcgccagtcgaagtgtttacaggataagatgacagcgaaggagagtgcaatctggttaggagttttgagccgagaggaagctctcattcggcaacctagtagcgataatgggatgtctggagtaaccgagattccaccaggccgtggtgaaaaacaagtcactgctaatagtgatagtaactatgatgtcgatggtgctgatgatggtttaggttctgtttcgtctagggatgagaggagaagtcaatctatggatgtagaaccttcaggtagccaacagaacaatacttctcaacctggccaagataaagagaaaccggataagccaccaaagagaaaaagacctcggttaagatcaaaacctaccgatgaattgcctcagccatctcaaaatgaggttatgcctatcgaaccaataaacaacatacctgacataaattacactgaagaggtacacttaattggataccaaaatgatcaaaatcaacaggaagacgagacagtaacaggtttacggtcactagacaaggatattgatatcgaatctcaattaccagtttctgatttcaacagcttatatgcattacctaataatgaagtttcaactcagagcaggcatgaaggcagtgtagcagcaatgcatttccatggaattccgaacactggaatgcatcatagcgatacatataatttctataatccatcagttgattatgatcctaaacatgaacgacagcgggctccaattgcaatgaatgaaagttatgttaggccagcagatggagttcatctcccaacagtacatagaaacagtagcgagattagtggaggagacttgccatactacgtaaataatgaacaagacagacctgttgatactcacttcggttctccactcgacagtttgtcacttgattttggaggattcaacagccctctcaattttggaatcgacgggacaagtgtgctcgacgaccttttgcttgacgatgatttgatacagtactttggcgcataacatgttcgaatattgcttaaaattgtaagtagccatctttcttacttccattgctttattatgtgtaattgtctgttgttaacagttgatgattttataatgatatgtttatgcaggattgttaaatacagattagttgttgactggggcagtaatcttgaggtaattagcagactaagtatgtgtgattatgggcatatcatatcatatcatcatcagataaaggtctgcaaaggcacaaacttgatttctcaaaattcatgattttgcaacaaacaattgagcaaagttatatatagtttttgggtttaagtagttttgtcccaatgcaattatgggttcatgtaaataagtcaaattcttaaattgggttaatgggaaaaagtcttgataattggacagggtggtatttttttttctttaataaaaattttcattgcagttcttctcttccaatctccaaacccaactattctataaatattctaaatttagtaagcaaattttaacaatatgttaaatctgtttttacttatacttgattaagtgcttaaatttgaaatttaagcagttctgtcacatttaaaaaaaaaaaaaattattaattaaatttgagtttagaatactaagtctttatttttataaaaatataagtactattattgtaaacataaggtattaagattatgtttgaaattacataatattgagagtagttgttaaaattttgttgattaaattttagtttaattttgagggtgaatctctcttaatttcagatctgtttttgtcttcactttttcatctattttgaactttcaaagtatacataaatatacgcatagcaaatttttattaatttacttaatattaatgatttaaatattacaaaaaattaaattaaaattagaaaaatgaatgataaaatagtttcaaaataaaataaaaactatttttt

SEQ ID NO: 107276 - DNA, 3340 bp, Cannabis sativa
  modified_base (3139)..(3145): a, c, t, g, unknown or other
attatattttaaatattatgaacaaaaaaattaaaataaaaaattatataaaattttcttaagaaaaataaaaaaaaatatttatatacatgagttacaaaaaaaattatgaaaataaaattaaaataactattgaaattaacataaaataatgtgagaaaaaaattatgaaaataaaattaaaataaccattgaaattaacataaaataatttgaaaaaaaaaattaaaaaatattaagaataatttttaaaaattatttacgtttatattttttttaataatagagtgtatttttttaagtttatggaatgcaaatagaatttatttttaataataaggattaaagatggaaggataaataggaaattagttattaaaattattataatatctttgttattataaatatttattattattttaaaggacagttttagtatttggtatatttattttgtcttttttcaaatccttttaaatttggtgagattggatttttaaagtttggattttgacacatctcctctttcttcctttctctcccctaccaaacaaagattattctatctttcctttccagtctctcacccgtctccattattcctaccaaacatagtgtaagtcaccataatagattttacatatagagtttctaagttatagggcaatgattttaaaaaaattactaagtttgtttaaaagattgaagttattaagtattgtcacatgttttgtaatgatttattttttataagacaatagattttatcaaaacaagtttcatatatatctttgttgtaaatagttatgtggagtattaaaatagtaatattattggagagcataataatattttctgttatgtgacttatctgttaggttacagacactctattttgaatttgaaccaaagtcaagcctcatgacatatataaaaaaacgaattattattatgttttaatatttatatgatatagtaatagtatacgtagtatggggtcattatgtgtactaatacatgaatttagtttaatgatatagagagagctgcaaaagagactatttcacttttgagttttgatccctctaattattataagtctataactttgtttcaggttcaattgcaggtgatacgatcaagggaaaagcacaatgttcacccgtagaagtcagtctcggaaggtcttgagaaatagtagttgagtacgaaaagatatttccaaatgactatcatgtctacttcgggtccagcctagctagcttcactccgggttggacttctagtattggctagttgttactcctagctagatagtagattcggattgtcaactccagtagactcaatcctattcggaaattaacatcatcaacgagtgtctttagtccgtaaatctagaaactcatatatgttcccggaagctcaaatacttaaactgacgtggagttcgttctataaggagttgctttttaactaatttaacaacctcgcttcttgcagccactgactttaagatcttgatcctaaagctataaagacaaccctgacgagttattttgaggaaggaagaattcacgagattaagaggtaaagggaaaggtactgcagagaaaagagagagattgagtttaagttttgtaagaggcatcttctgtaaatgaagaagatatttaggtgtaagtgggggagttaaaacacttagtgaagagtactctacagtgaatctattgtacttatattcttgcccaatcaataaaaaaggatttcggtagtgttcgagaactggagtaaagttataaatcacatcgatctataggacttaaaacagtatatatatcttggtgttaaatttgtttaacttctatattttggtttttattattttgttcgcccctatttttatttgattgttgttttcgatttgtactattaatcataattttctccaaataagtacacaataataaaaaaaagttttatatattttaaaaaaaatgatatctaacattctgacttaaattttgattacagtttcagtcaaaacaaactattaaagctcgtttaggaaactgcgcatgatttttagccattctccatttattaaaaaaaaatatattattttctctatttaacatcctcaaaattttagtgaacccaaaactgaacatggtctaaccttggaattaaccgccgctaagccaattcctgcggtttggaacaatctatgaccaaccccacttgaaagattggataagatgtaaactttcttttcttttttttttggtgctgtatatctatctatttataaatctatttttattataattggattggcaggatttggaacatatgcaaaaatgagttttctcacatagtgcacaacaaaacaaaaaaatcaaagtactgtccccaactcaacttatccacaccatacctaagaaaaaggagcatataattaaacaaatatataatcttagatattaccccctaacctaataaattattatttttttttaaaaaaaaaaaggggaaaatcatacccatttgccaattgggaccacacacgtgttcatatgcatgaatcgatcgagtcaaaggaggcaatcatatattttccctcactttctcatattcagccaaaaaaaaaaaaaaaagaagaaagggccatggagtcgtcatagtaacattgccaaatccgtagttttgtcgtaagcataggcctttttcacaatgatcatccactaataatcaaatatccaattattattatagtaatcgatgatctattgagcaggtgaggtggctcaccatcactagtcgctcattattgttatttgccgacatcttgttctttactagctaggtctagcattgtttgtcaccatcttcgatggagctagggagagccctgtgccccccgcctaatattttactattttcttatgggcccgtttggtacgcaggactggattggattagacagattaatttgtccaatccagtgtttgggcatgttagaagtcagaataactaatccagttaacctcatctgtctgggattatttatcccatctagcatggtgagataaataatctcatgcagtgagatttttttttttttttatcgtttttnnnnnnnaatgttattaatatattttaaatttaataagaatttaaaggaaataattatcgcacgtttatttatacattttttcctatcaaaaacttattcattaaaattagtaaaaatgtataattttgaattattatacataagtttttaaaatttagaatattattaattaaataatagttaaattgattctaagaaaaa

SEQ ID NO: 107277 - DNA, 2172 bp, Cannabis sativa
ccatgcatcgatcttcgtttttgtaatattataatgtgtgaaaagttgcacagttcccaattgtagtcatctttaggcgttactttcgtttttatttgttctttgaaatgagtctgttggcaccacaaagggaccccacttgaaccgattcggcttttagtttgtgggggccctagtctctctcaggttgtagtgcagaaggagatggtgtgtaattcagtgagggtgtcctcatcattcttttatcatggggtgacagtatttgagtagatgggctataaaactaggataaggatttgtggatttggtgatttctttgccattttgtgtacgtaatccttaaaaaagtattgggggaaaaaactgggcaaaagtgagtatttcacatgcttttccttgttgtttgatttattgtaaccaaatccaggctttatttagaacatagttttggttagactctagactctagttgtgtgtcaactcgtacaatctctctaacaaaacatagtgacttaataaagccaaaccttttggctaataggggtagttgtcctgatgtgtatagcattgacattttgttttcctttccctctttctcttaattgggagtattgggttcattgtactttcatattattaacactttttgctaataaaagtttcgtttacattgagctatgtatttatttaaaaagattaacttaatggagtatgatctagtagctagaatatcttcctatgatatcagcagtagttggggttattgcatgaacttagctcatcaacaattaacatgtatattattgtttaatattataaaattaaaattaaagaattaggggttattgattcagtgagactcttttttagtgcttaattaaaacgaatattgtttttggaaaagatggtgtgaaactatctgactcattttttatcatgtaacattttatagtgtgaactagttgcgtttggccctattattacctttgaaagagatatagggaaaattaatttcccttttttgggttttgtattacaaaattgctctcaataaaggctaaattagaagtattttggatttaaagtatactttgtgaggtgcaatcatagcagccttaaagttcataatctttggattgtatcaatttctttttcaagtgccttgttctctatttctcttcctcaaaaaagctataattgtcattatttttaattagtggtccatgttggtccaaccatcttcttgcaagataatccttggggttgcagccattatcgaaagtgaccctttacctctcaaggtcatgtgtcaaggtcccaaataaatggcaaggccactactacaagggtaattggattgtttttggtaaacagagcaatccactcaaatagatagatgtatcttgtgtggagtttatttcattcctattgcctgagatttatatgcttttagatttgtggggtgcccttgagttcccaccattccttgtttttatccataaaaaatacatatgcacgccttgggagaaaaagaatactataataacaaaaaagaaaaagaaaaaaatgtagtccttttgtccatatgcacttgaactaacttggctcatgattcctcatattatatggtgctatactttttttttcaggtatctttacggctttgattgcccttttcactgatctaaatgtacttctcaatcttgtctcaattggcactctctttgtcttttacatggtggccaatgctgtgatttataggcgttatgttgctgtggggactaccaatccttggcctacattgtctttcctctgctcgttttccttaacatccattttgttcaccctcatatggcaattcgccccgccgggcaaacccaaagccatcatgctagtcttcagcgccttggttgcccttgctatgttgcaaattttccattgtatggttccacaagcgagaaaacccgagttttggggtgtccctttcatgccatggattccatccacatccattttcttgaacattttcttgttgggttctctcgatggtccttcctatgtgagattcgccttcttttccgccttggcagtgcttgtttacgtgttctatagtgttcacgcaagctttgatgccgagggagatggcgctcttagtgtgaagaacgtagaaat

SEQ ID NO: 107278 - DNA, 1862 bp, Cannabis sativa
atacctccatgtgtccaaaagcacgaggcttccaagggaagggtcgaactcctttagagttaagttcatgagagaaactcttaatgtcaggtgctcgcttcttgcgaccgcttgtaacacgcagtattgcctggaaacgaggtgactgaatttctttggaagaagctgcataattacccttcaaagcacattgaaaaccatattatcatcaagcttatgagataccaacatcttctctaacaaaccaatcatatttcagaaaaaagggatgtttagttgtaatgatattttcttttttactttttcaaatgctaaatatcaaaatcacttaaattgttaagttggaaaagaaatattcgggccataaattattaatttaatgcttaattatacaagtaaattgttggttgcctaatatcaaattattaagtcttgggagttgagaggaatccattggttctgcctcagcaattctcaaatgattatcattcttagataaatattaatatcaaatgcattatcaaaaggaataaaaaaaaaaaagagaaataatcaatctcaaatttaaaacagtaaaaagtaaattaaaaaaattgcagcagtaaaaatttgaaaaacaaataaaacagagtttcatgaaaattaaatatatatttaccttcattcatactttattggtagtaaaaattaaaaacaaatcattcttctaaaaaatcgtgaaatgtaatattatatatacctccaacgctggattgagtggtgatggatttttcaaagactttgattgactccaacaaacctttttccctacaaaacaaatcaataagagcttctcattttcaagaacgtagaatttgatgattatgtgattaaaatttaccgatcaaatcaataaaacagaattcaaatcgtatgaataagatttaaaaagacatgtatctatgtaccttgttctttattttctgtagtaaatttgggaagtggctcggccgagctattagccttattagaatcatcaaccgcatgattatttttattattattattattattatttgaagtgtcgtgatcatcagccgacgatgaaaaccgaagaggagatggaatggaacgagttcgaatgcgattgagctggaacgatggtgtgacgatagaaggatcattggattcgttattagctttgtcatgaacatcctcatcctcatcttcatctacgtcttcttcctcctcctcttcttcttctgtgtcctcatcttcttcttcttcgtcgtcgctttcctctgtttcacttctaggatttccacgaaatgcgaagggagggattttgaagagcttggctctggaggaagatgagccagtcggcgtcggtggatgcgacggcgttttcgccgggtctccgacgtcgggtggtttctcggatgatggagggttggacatgtgagagtgggttcgggtggggattcagactcttcatggcattgtaggggaatgtaagagagagagagagaaagaagttatattttcacgagaaatggggaggtttggaaggagacaagaagaccacgcgtgttgttagtatggttgagatttcattcaccatttctaatttctcacaccaccatttttctttttctcttgtttttttctaattaatttgctaaaacgtgctaaccatgtatgtaatgtaagaagaatggaaaacaacatatatatatatatatagggtgggactatggtacaacatgccattatgtccctatgggtaaggaaggtttttgagcctttgattgtgcatcagacgatcataatgggctaaggtatatattagtattatgaatgttagggcactagataatttgcta

SEQ ID NO: 107279 - DNA, 1587 bp, Cannabis sativa
ggtggcagttaaccgaatttattactagttcagtagtttaaaggactttaatgccagaatttaaacttagaaggttaaataaaagtaaaatgataattgagagggtttagcaaccaaaagctcaaaaaaatttatagggtagggttgtggaataggcgtaccttacccataccccacctgttgccatccctacctcaaactttaacatgtaccgaataacgtctactgaactttcatccacgttagacgtctattaataaaattggacataaatccttaaatccaataattccaagagtatttacagtgcgggtggtgtgagatgtcactttttttcaaacaaaactgtatatgctgtttttgtaatttctcaaactgaaactacaccttgagatcttaaaattgcaaaaaccatattataaaaatacgatatagtgcaatacaatttgaacaatttatacttttattattatttgtatcgttcgactatcttctgtatagtaatatagttttggtttgtatatcgtttttataataagcctttgttattttattactcaccctttaaaattagattagtttatgtacttatcaaagctattacccaaattaattaacatcacaatctcaatttcttctttctttttaaaggaattatgcaaaagatatcaacaatagctcatcaacaaaatgatgaaccctaaacttaatacttttgcatgtagtttaaatcaatatcaagtttaaaatatcgattgctcgttaaaccctctcgtataattaactaaccatgaagtcaattacctaattaaacaaattacaccaaacttagtatttaatcattgaaaaaggattttccaaacacaccataataatcatactaaaatcttggaggaatgttaactaattaagacaatgaattttacatattttttcttcagtgtcacaatagcaatctcatgtcggcttttgtcaacaatcacttctgcaaatttgtctttgaaactaaaaaaaaaataaaaaataccccccaaaaaaataaacatgaaagaaaatttctaataatggttttacttctacacccaaaaacagtaaattggaacatatctcataataatttggggggccaagtttgatccattctaaaaaacacccttcttcacctacaagaagaggaagataaaaataataataatactaataataattaaggcttccatttaaaggagatcagcaacatttgcaggcagctcttcgacaaccacattgtaaaacttctgaatatcaaacagcattctttcatcgtctttggtcacaaagttaatggcaacaccctttctcccaaatcgtccactacgaccgatacgatggaggtagttttcgggctgtgttggaagatcaaagtttataacaagagaaacctgttgcacatcaataccacgagctaagagatcggtggtgatgaggactctagaggaacctgatcggaattccctcatgatgatgtccctagtgttctggtccatgtctccgtgggtagcggaaactgtgtgatctctgctgcgcatcttgtctgtgagccaatcg

SEQ ID NO: 107280 - DNA, 4282 bp, Cannabis sativa
aaatttacaacatcatgatattgaatgaaatcctaattagggttattttagtatcttttttgttttagtttaattatagttgcatatataaattaagttttcttattaattagttgtattcttttacttttgattttataggaatgaaactctaattttttttttcatctcttctttattgattattcttaattactttataaatatttatcacaatttacaaaactataaataatttaaaaattatttttaacgagttaaaaagttcgaaagaacaataatatataagccataattcaagagtaaaaatatatatatgaccatgcacaataatgatgattatgataaaaacaaaacaccatagattttgcattacattattaattataacagaaaaaactgtaagtaataaaaggtccttttctttttcaattttaaaaaaaaaattaaaaataaaagtattaattatctcatccaaaaagtaagaaaatatttcatgatgatatagacaataaagtttttttagcaatagtactatgatcaatatttatatcatgatcatctgcacccatccaatgttgcaattttcaaaaagtgtaaaataataaagtgagatgaataatagattaatacaactttttctaaaagttgattttggatgtaaagcaataaaagcaaagccaaattttatttcccctcatttatttattattatttttaaaaaagctaaattatattaaaggaagaaatttgatcgaaagatcatatatatattggtgatgagtatatttttctaaattgagcattatttggggtattatagattctcattaatagacaaccaaactttttgtgctactattttggaagcagcttaggaccaaaaaatatataaaaataaataaatatttatactaacagataatttctctctctctttcacagagaatatttttttttaatttaaaaaaaaatatatatatataaaaaaaaagtggaaaaaaaaaggttccatatgtctgatttcattgtttattcaaatttgttaatttctaagaaaattcacaagtgggaataatactcaaaagcatcttgaaaatataatatatatttatatatatataaaaaattaagttaataatattaaaagaaatggcaatatatatggagataatcatggccaagatctacggttccttttattaaattaattactatagttttgtacgtacttgagtgattatatatataagctataatatataattaatatatactaattacgattaataagggtggtgtaataataaaaaagtttaatttgttgtgtatggagcttccaaaaatcttaggatggatatcttaatgattgagataatataattaaatatatatgaccactagtgtacaatatattaaaatgtacagtagtgaagtaaattaatattttataatataatagaatgatatacaccccatcatataattaattatatatatatatatacgaaagacatttatataaacaagtattattattgttgtgtttgtatgcatcagcaaatatatattattacactacaaatatatatacacacactaagcaccgatctggaactgatgtcgatttatttggatatatatatatatattatatacatgtccacatgtacatatatatatacacaatatatatatatttgaatacgtactactgttactactactgttcatgaatatatactctttgagaatgcaaaataatttaattagagcaataatattatgtacactaaaaatctataataataataatgatcttttaatatcataaaacataaaataggattggttcgaaaaaaaataaatataatattttgttatatatattctcgatgaacgtatcaatattattgttaatattttaaatttataaccagacgattttttgaattacataattattatttgagtttctttaaaatatataaaattttagtaaaatgattattagatttattacgtggattattagaaactcaattatataataatgaagggtgtgtgtgtcaaatacgtatagatgatgtattgataggtatatatatataagtgtaacaacaatacatacatacgtgtgattgtgtgtgaaggtccaaatttgaatcatacaaattaatggatgtgtgtatatatatatatatacataacttatagaagtttatattatgattatatttatataaaaggacatataattataggggtatgtatgtatagtgtgggggtgagtagggcataaattaaattattggttccaaaacagagagagagagaggaatattaagccgtcactcattctccaacgtcatcatcctcctcacctaacaaaaattccctcacattatataaactatcattattattattacacaaccctaattaattattattattattaaatgaaatctcaatcattaatttttatttttattgtttttactttggctactaattaatatcattttagatactcggttttgttaaataaaattcaaatatgtttttaaaaatggtacaaaataatacatatcagttacttagtactatcttttacgtgttaatattattattggtataattaaataccgaattttatataattaaatgtaataacttttaaaggtgacacatctaaaaaaaaaaacattagttaggcaacactgatactcaatgctcaaaatagtatacgctctgaatttaatttttattaaaataaaacttaatattaataacctgacaaaaaaatgttataactttttgtatcttagaaattaggttaaatattatattaaaaagaacgaaaaattaaattcaagaaattattttgtactcttttaaaaaatataaaatctaatttattatttaattaaataaaaaagattaattaataatttttacaaaaacacaaaatatgaaataatatttatcttaagatatatatagatttaattaattcagcatgtaattatatacacgtcaactcttctaatttgacgtgtactaatctatgtggttctccttattctcctccgctgcatacgtgtctaattacccgtaattttagggtttaatcaatatataatctatatacacaaatacatattaaaaataataattatgataatgcaaattttgccctagctagcctcacgtgactcctattcatgtcaatcttaataatcactattggtgggttaattaatgctattgaaaactatttatatatgtatattgacttagtatatagtcttaatcatgtttttaatatgcaagtagttaaattaagaccaccttaattacattataattatatttatttatatatatataggacttggcacgtgactatacatacgtcccttttggtccccaatgagtgtgactagtacaaaaattggattgtactctcaatactaattaataaaattttaagatagagaacatgaacaatattaattatatcgatatctgtatttaatttggtaattattacaaaaaataaaaaaaaattatttatttaattttggggtcaattactatttttatgactctcaacactgaatttgggtgactgtcaatatctcctttgtgcttcttctaagaagccatacaaggcaaaattgacctaatatatatacattttattttttatttttattttttaaaataatatttttattattaagttgtagtttaatttccactttgctgatcaggtcatataattcgttaaataataaatgcaaattattcttctcaacaatggagagagagggtataattgtcttcttacctttactacttaaataatatggaatttatttagtcccacgcatcaaattcatagttagtattttttattatccattttatttttcaaatagttataaatagcatgtttaaatcatattttcttgtatgtgaggataagaattttcaaattaataggaatgacgtttaattgaaaaaaataagaatttttattttattgtatcctatttaattggggtcttttcaatattatacctaaaattgattttatttataaaaatacatttaagaaaattatttgcacaaataccgattgccacgtcagcataaatatcgaaatataaaataattatcgaaaattgaaaaaaataaaaaaatctcgcttccagaaattttagtgttttgcaaattttaaaaaaagtaaccttttggttgcttttgatgtaaa

SEQ ID NO: 107281 - DNA, 1636 bp, Cannabis sativa
  modified_base (1609)..(1610): a, c, t, g, unknown or other
cttaatttgtttttggcattttgacaccccctaattggtgaaggtgtcgtcgttgatgagagggatggagggagaggtaccaatgatcaattgtttgatagtaaggataatatgggagggagagaaaaaattaatggagggaaagtaaatttctctaaattaaaaaaattcaatccttcccttaattaatttggaaggatcatgagaggatctatgcttaaaacatcataaagaaatactttacaattaatagttttttttcttttttaatttgtaaaaagaaatccattttatttttgtctaatattttttcccattatatcacttctttttatatatataactattgctttaaaaaaaatagaatttgttcaagttacatacaaattttaaaattaatcatataaatacagagcaaatggtattctcactcttatgtgttcattcttccttcatccttcttaaatcataataccaaacatagcctaaaagtacttaaaacacattagaaatctaaccagctattgagttctttctgctttttttggtatggatggaaaatggtaaagatggattgatataataaggtgtggaaaaggaaaagtagtggatggatttgttgtatccttagaagtttgataattgagaagaaagaaaggtgtgctccattttttacaatccctcgaaatgagggaaaactaaattttgtgggcccttgtggatttccctttggaatccacacccccgtccttccgacaatactttctttcttccatatcaaacaaacataaaccatggatggataagcccaatccatcatatttaatccttccctccttgaatacctcctaccaaacatactgttcgtgtccaattgtgatgatcaactaatttaaagcaatgtgttgggctactaggaatctcactgtacaaaagaaggaaagaaaaaagggggggaggagacaaaattggatattcaggtcttgacaatacggatatgcaagttgtagtgggtcattttcataacagcttgctatttcatctacctagctataatgtgtatgcgtccattatcatcaacaataaatagactactactactagtagtagtagtaattgtaattaagaaccttccctttctccccaaccccagttgacaccccctaatgtgtttggcttccaacaaaatccaattaactacgtgtcatttcttcgaaaatcaaatgtcatgaaaagacactgattagatgaattgatttgaggagaaaagttgattattcttaattgttgtaacttgtaactaaaagggtttaaggtcaatgctatatagctttaagcaataattgtagtttggcatggcacgttcacaacttcatcatcatcatcatcatcatgaatcgtgaatcgtgatatatataaagttgtaggaataatggaggtaacctatatatataagagcctacaattatatataaatagatatagatatagacatattttgggtgatggtttatcatatattaaattgtttttgcctttaattgaaagacatcctccttactttctttaaggatacccaccaattattttagggataatttcacaaatnnacaaaaacaataaaaaaattacaaaa

SEQ ID NO: 107282 - DNA, 6435 bp, Cannabis sativa
tggtttaatctccaagaagactcgaagataatttttgaagttcaacaattttcaagaacctgttttctggctaggaacaagttcttatcaacacggcaacttcaaaatttgaggtggagaagttagatgggaagaatgactattgtctatgggaggtaaagatgatggcacacatggggaatcttggactcgaagaagccctgaaagaatcaagcaagattctagagaaactgaagaacaaagatcagatactcaagaaggccaagaatacaattattcttagcttaagtgattaagtactaaggaaggtgatcaatgaagagactacacatgagatgtgggtcaaactcaaacaattgtacatgacaaagactctgccttattggatttatctaaagtaaagattctatggattcaagatggatgaatcaaagtccatagataaaaacatagatgagtttacaaaattggtatcaaatttggaatccataaagataaagattgaggaagaggatcaaacaatcttcctactgaattctcttcctaaagcctatgagaacttgagggatacactcaagtatggttgagaaacattatctctggaagaggtgattggagctgcatactccaaggaattggacttgaaggattcaatgtcagaggaagatcaaaaaagatagaaaacaacagtaaaagtggtaaaagaagaggaaagtttagatccaaatctagaggaagagcatgatggacctgcaatcaaggacactttagaaagaattgtccttaaaggaaaaataatggacagaaactaaatgcaaactccaatattgattctgcaaatatttatgattattttgataatgttgatgttttaaatatttcctataattgtgctaatgctctaactatttctatgacaaattctcaagatgagtgggttatggattcaagtagcacatgtcacatgtcaccaagaaaagagttgttctttgatcttcaagaagaaagatcttgacaaattatgatgggaaacaacaattattgtagaattcaaagaattggttcaatgaagattaaaatgagagatggcacttttaaggtattgactaatgtaagatttattcctgagctaaaataaatttgttgtctcttggtgtgttagattcaaaaggttacaactacaaggaagaaggtagagtcttgaagatgagaaaaggttccatggtgttcttgagaggtgaactcaagcaaggctctacattctgcgaggagaaactgtaactagtctagccaagtctcaacaaaaaattacaaatgcaattgaattgtggcatagaaggcttggacatatgagtcacaagggacccataaaactcaacaaggaagtcacatatatgtaattttatgaaacatgtgtgattggtaaggcacacaagttgaaattcacaaattcattacatacattcaaaggaactttagattatgtacactcagatctatgggaatctccacatgtacttctctcactcaataatgcttaatatttcctttctgtagtaaatgaattctttagaaaagtttagatctatcttctgaaaactaaaaatgaggctttggtaaattcaaagaatggttgatagtgattgagaaacaaacttctaggatggttaaaaatcttatgacaaataatggtcttgagttttgtaactctaattttgatggtttatatactgaagttggaatgattaggcacaaaactgttaagaacaaaccataacagaatggcttagctgaaagaatgaataaaactataatgaataaagttaggtgcatgctatatgattctggtttgcctaagtctttttgggcaaaagttgctgctaatgcatgttatctcataaatttatctacatcatctgcattgaattttaaagtccctgagcatgtttggtctagttatgaacctaaatatcatcacttgaagccatttggttgcattggttatgttcacattaatcaagaaaaactaaatcctagggttgtgaaagatatttttattggttacactagtggtgttaaaggttacaaattatggctaattgatggtaagaaatgtgttattagtagagatattattttcaatgagaaagtattttataaatctaacctaaaatctagtaatgaagccagatctaaacaagctgagcaaaaaattacaagggtagaattagaaacaacatcacaagtacttgattaaggtggaggtcaaaacctagatctaaatgacactcaaccaggtgatactaaagaggaaatatatgaaaccaaaggtgaagatttgcaagattatctgttggatcgagacaaagtaagaagagaaatcaggccacctacaaggtttgcataagcttaacatttgccttaaatgctagagacctagttgatcttcatgaacccgaaagctatcaaaaaactagaagttgggataagtggaacaaatctatgaaagaagaaatgaaatcgttgatagataacatgactttgatacttgttaaaagacccaagaacaagagaatcataggctccaaatgggtgtgtaaatggaaacttggtattgaaggtgttgagaagtctagatttaaagcaagactagtagccaaaggtttttcacaagtagagggtatcgactacaatgaagtgttttcacctactgtcaatcacacttctataagagtcacacttgcaaacactacaatatgtgatatggaattggactaattagatgttaaaactgcatttttacatggatgaagagataccgatgcatcaaccagaaggttttgtacataaaggagaagaagataaagtctgtttactaaagaattctctctatggcttgaagcactctcccaactagtggtatttcagatttaatgagttcatgttgaaatatgatagtttcctgcaagcacaaggttcaaaccatggccttgttagaagataataatttcatctacttgctaatttatgtagatgatatgttaattgcctgtaaacacaagcacgagatagaaaacttaagagaaatgttgagtactgaatttgacaagaagtatcttggggaagcatcaaagatacttggaatggaaatcaaaagagatagaaatattttcactctataattgacacaagcttcctatgtcagaaaggtggtgaagttgtttgagaagaaataagccaaagctgtaaatactctcattggtgcacttcaaactaagatccttgagtgaagaagaagttgtagtggaagagaagaaaatggttggcattccttactctaatgttgtaggaagcatcatgtatgctatggtttgaacaaggctagatttggcctatggtattggtttggttagtaaattcatgagtaggctgggacttgagcattggaaagttgtcaagtggctgttgaggtacatgacgagatctataaacctatttattagctacaaaagacatgagcatggaaactgtgattgggtactgtggatcatattttgctagagatcttgataagagaagatctctaactggttatttttttttacagttcgaggaaatgtggttagttggaaatcaaacttgcaatatgttgttgtactttaaaatactgaagctaaatacatttctcttagtgaggttgctaaagaggctttatggctaaaggaatcatgacagagctaagatttgaacagaaagaagtgaatgtgcgttatgactctcaaagtgcaattcatttatccaagaatactatgtttcatgaaaggacaaagcccatcgacatcaagcttcttttcctaagggacattgtcaataaaggagactgatcaaggtggtgaaaatccacactgatgtaaaccatatttatcccattgactaaggtgatacctgttagtaagttcaatgatgtattggacttacttggtatcaagacatgattcctagcaccctaaggcaagtgcctaaatccactaagtgctacaattgaagaaatcaaaaaccaatgtggagaaatgtgaagtctggtccctatttctcaacttatcaatctcattccctcagattgctgacatggcatcaagaagttaaaacagttaggccaactattttaactgtgtccaagactctaaataacagaattggttaattctattgctcattccttctctctcccatgctaccaacttaaaagcctatataaactcacctagaccaatcaactagagagttagccaaattgatgtacaaagctagttatgaaactatgctgagagtcgatgagttgagagaattgtagatttgttgcttaagtgagggaaaaccaaattgtctcatctatgttggagcatgtaaccttgttcaaaacttattagattgattctcaggcattactgacccttggagtaagactatcccacattgagatcagaacttaaccgagtaattttagtgtttattatttttacttttttgctttttgttttgatcattaattgttcatgtttttgtttatctttaaatctttgttttcacattgcttgatctttgtttaaatttaaatttgtgtagtttagattctaacattaattttttgttattttgtaggatactgtacagaaattgactttataaagttaatttggatgtaaattctttgacaattctataatttcattttaaataataaatttttgagtaattcttatcttgcattatagaataaaaattgttcaaatttgtagttgaaattaatgaatagtaatctaatttgcttctttctaatttcaataaacttcaaatctaggtcttatttatttttttttttcttctttctaatttgcttcatgaacaagatcaactaagatagaaaaggaggaaagcctaaaaaacaatgctaaaaaagcataacattgatcaagagagagagagagggctttttttatagaccaagattacaagagagaaaagattcagctcattggatctgttacaagaagtaaaagcagagcacaaactaatttgaagacaactaataactaattaactaactagatattacaactaactaacaactataagtagttaactaattacattagttatcatcccccctcaaacgaaaaagggtgtttataacttttagtttggccttgaaataatgaaatctatccttgggaagagatttagtaagtaaatctgtcacttgatcaattgaaggaacatatcagactgaaacttcattattaaggatctgatctctcacaaaatgttggtctatttcaatgtgcttgcatctaacatgaaatatgggatttgcagctagagcagctgctctttgattgtcaacccaaataataggcacatcagcaaagtgaagatgcagtttagatgataatgaagtgatccattttttttttctgtagcagcatttgctaaagctctaaattcaaactcagtggaggattgagcaacaacctattgcttctttgctagccaagagatgaggcttggagtaagaaatactacatagcctcctattgattatttgtcatcgatgcaacttgtccagtcaacatctgaatatgcggtaatggacattctagtagcaggttttagcagcaagccttcagatattgtgccttttaagtacctaagtagtctcttacaagcttgccaatgaacataagtgggagcatgaagaaactaagataacttgtttattatacaagtcacatcaggccttgtaagagtgagatactgcagagcacctaaagtgcttatgtataaggttttgtcatcaaatggaactccttcagatagagataatttatgagcaacacttgtaagatttgaataagctttgacaccttctaactgaaccttgactaataagtaagtaatatattttctttgagataaaaatatgctattaatattgactaataagtaagtaatatattttctttgagataaaaatatgctattaatattgtctctgcacatttcaacacctaaaaaataatgcagttgaccaagatcacaagagaaaaaagattcagctaactcaatttattacaagaagtaaaaatagaacacaaactaacttgaagacaactaataactaataaactaattagatgttacaactaactaacaactaagtagttaactaattacaaatttgtatggtattcaaatagtctattttacatatatttttctaaagaaaaaacatataagtatacaataaattatttgttactattaattatttaaaatttcacaaaaaatcatgaaatactcatagaccatactttgtttaccaaccaaatgattttctatgttttatatattagaatatttctaattaaggaaata

SEQ ID NO: 107283 - DNA, 625 bp, Cannabis sativa
tgtacgtattgatttaaaataatttatttgaataattatcatacaaattgtgaattatgtgagtttatcatatgtgatatttagacaaaaataaataaatacatagatactttataattaaaagcaaactattacaacaaggaagataaaactaataataaattcatatttggagggtttagaaaaaatcatatttgaaaaataataatattgaaatgttttagattttaaattttggcaggtaatgtaaaaagtaactaaaatgtaggaatcaaataataaaaaaataatttcgtatatgcaaacttgatttaattaaattttatatagcgaacataaaaaaaaattattttatgtttctttcacaaattttccatctttcttttactttttttcctcacaaaaattcaactttcgtttaaagaacctctaaacaatacaaacaataagttttcaacaaagatcataataagctaaaattatgaggaatttaatgctattttttttaattttagaatcaaatatgtatttgaaaataacgatactaataggggtaagttgaaaaataccccttttattaattaattaatcaaatttgcctctaattttatatttatttaaaaca

SEQ ID NO: 107284 - DNA, 1043 bp, Cannabis sativa
  modified_base (904)..(905): a, c, t, g, unknown or other
  modified_base (994)..(998): a, c, t, g, unknown or other
ctaaattaagtacaaactataaggttggcaaagataattcaaatttgattgatttcctctaccacaaaaattattcctaattttagcagaattgactacatgataagtcattttattagactataataaggcttgacaaacgtaattcaaatatataatttacttttccacagaagttatttctaattatagagtttatgatatcaattttcttgagtagttcttctgatggcttcattttctccacaagattttgttcatggagacactacagtatttatctaaaataaaacataaaaaggtctttttggatacactgaattaaattgtattatattgcttaatattatacaattatgttgaattcgaaacaaaaataaaaatatataaaagtaattttaaatacgtgacatttaaaataattttatatatattgttttttttttaatcgagaaaagaaaattttcattaatcacaaccaattaaaaaatcacacagccaaaataaaaaactcaaacacatgccattacaccacacatgatctttgtcaaaaaattcctctccttcattttcctgtgtataagacaatagaccctatatcgtatatctctttttatcatatttacaatatacttcacgagtaacaatcaaatatacaagtatgttccaattatgccaaaaatgatatattactgttgttattattacaaccacaaatagtcacttttttgatctccttctttaagccttcaagccactcagtccacaaacctttgagaccaaccacaaccataacaaagccaactttgaatctgtttaagaaacagcgggcagaaagagaagcagaaaaatagatgaccaagatcctccttgttaattctatttttggcatatttaattgacnnaaatattttattatttattgtatattttggctggtatgtgtttttttatggtttcctattttgtgtattcaaacttggaaggaaagttnnnnngctttcctatttttggaaaaaaaaggtaaaaatggtaagtttggt

SEQ ID NO: 107285 - DNA, 2700 bp, Cannabis sativa
aactctacctcttctgcaaatctagtaatgttggtattgtttgtactcctgtgctaatagtaaacctgtcttttatttccaacaatccactttgcacggaaactattatatatccggcatttccagtgctcgcagaacatccttgaactcaaattcacgggtatctttgttgaatctttcgaccagtttgtatctcgtgtcattcaaataaaaagattgtgttgtctccagaagccattcggcttcagaatcactgagcttgctggtgaataccacatctcctcgaataagaaccaggtccttggtttctgcaaactctttgtagtaagtaatggtgaagtagggagctgcttgggttcctcttgccttgtaatcttcaagaccagtgaaaattatatgtggcatctgtactgcaaaatatattttaacactagagtaaatattatacaagtcttgattgagttcatgatgaaaaatagttcacaataaaatttgttaaatgacattatccttccttttaatgttaaaataaaaggaatgaaccacatcctttgttgcttttggatgcctaagttaggcaattggcaatgaaaagtgcataatcattgggtgaattccaccaccctttttatttgtctacagcctatataaatcttttacttgtcattttgtaacgtataccaaaaaaaccaaaaggaaaaacttaatgaaagaagctttgaaagaaaaattattggggtgggttgtgagttacaagtgttgtaagcactttgtatatttttatctttctagtaaaagatttgcattagatttaaaaacataaccacctaccgaactctttcgtcaaatttgtgcatgttgttgttttctctattattttttttttattctcactaatctaattcatcaggaaattgcttaattttcctaacaactggtattagagcatttgatgaactatgtaaaaactgaatcgatctaaagaaggtagatttgagagggaacaatggctacagatgaaggatatgtgaaagtcgagaagtttgatggtgcagatttcagattctgaaagatgcaaatcttaaattacctatatcagaaaaaacttcactcaaaaaagaagtcagaaggtataaaagactataattgtaatcttcttcacaaacaagttcttagagttattcgattgacgatatcgatcaatattacttttaaaacatagcaaaagaaaagatcatgatgggtcctgtggcagctctctccaatatatatgagaagccatcagtctctaacaaagttcatttgatgaggtgtgcagttattcaatttggggatggaaagcgcatcaataactcaacatctcaatacaatgaaccaaattgacttcggttggaaatgaatttgatgatgatgaagtacaagcattgatacttttgttttttctactagatagttgaaatgttgctgtcacgtgagtagctacattgagaagcaataagttaaaatttgatgatgttcgtaatataattctaagtgaagagatctaactaacagagtcaataaacaacctctcttcaattttacacacagagtcaaaaagaaaaaattcaaccaaaagaatagatgcagaaagtcaaactattgaggtagatcaagagataggaggtcaaattaacgtaccccaataattcactgaactcaaagaccatcaagtgttgaaactaagagaaaaatgtacactacaaaaatagtgcaagtttgaccttgaattacacttgatggtcaaactacactagatatttgtagtgcccggtcttccaacaattccaacactcttatggttttcgagttcgagaaattattggaattccatgattttgaccttctatctctggatagtttgaccttccgcaccattccctatggtcgagtttctttctctcgactttgtatgtaaaaaagaagaggttgatgatccacccaactctcttcgttggatttcttcactaagaacaaattatgaagatcatcaaattttaactgaattattttcgatgagctactaacaggcgtggcaagcatttcaactatcttcgtgaagtccatttccaaccgaattcaatttggttaattttattaagatgttgaattaacgaagcgctttctaccatctgcaaattgaataactgtctcatcaaatgaactttgttagaggatggatggcttctcatatactggagagagctgccataaaacccgttttgctatgttaaaagtaatgttgagcgataacatcaatcaaataactctaagggcttgtaggaaaagaagattccagttttcttctttcataccttgtgatttcttttttgagagaagttgataaacctttttctgatataggtaatcttcaaattgcatctcttccaaaaattttaatctgcaccattgaacttctcaagtttcactacctacaaccattattctgatgattctgctttgaatacttacaaaatttaccaaatggtttgataattacgcaacatttcccatgaatcatattagtgagaatgaaaaataatagcgcaaattacacacatgcacaaatttgataaaaaatttctctgtctctaaatatgcagcaaatcttttactacaaatatataaaaaaaaaaaaaaaaaaaaaaaaaaaataaaaaa

SEQ ID NO: 107286 - DNA, 3432 bp, Cannabis sativa
  modified_base (3068)..(3069): a, c, t, g, unknown or other
ggtaaaacatattccaacactttgtctactgctcgattatttttaacgctcgtagcagaatgctctgatcaacaccccctggcatgacggtgttgttttgagttgtctctggtaaggcaacaaccacagctatgttagttgggatcactacctcagtagtcgcaattggtgcgttaggcgagttgacaacgttagttgggttatttccattttttaaaccttgatcgcccaccggggtatcccagggctcaacttgattttggggcgtttgggatcgtgccctgaaagtttcattgaggcgatcacgaagatcgcccctatgaacatggtatctctttcctcgtggtgtctccatgaagccagacttggtataaacactaggagtacgactataagaggaagaagaatgggattcgacatcatttacctcgttttgcggttgggcttttcttcgagggttgcgtctctcggtatcctcctcctgtggcaccttgcggtcagtgtttcatgcgacttgttccccatgcgtgggctggtttaggtcgagtccctcttgtcaattttgtagctctctgcgagtacaattattagttcgtcacctggtagttattacctgagggttatccaaacccgtgtttggtactcgaggaggacatcgggtcctaactcttccgtcgaattcaacttgtaaagcctgcattttttcctatagtgctatatatttcgtcgtggtttgttaaataattccttcagataccatagccggggtaataggcaagaagtgtcccacagttgctgctggtgttgatgtttctccaccatgaccggtggtctcatgaaataagttaaggggagtaacagtggtacctcccactcctccattgattatgtcgacaagtgttgttccattacctgggagtggaatgttcattgttccaacactgaaagaacctttgttgttatctccattcgtctggcttccagccattatgatttttctctgaaatcaacagtaagattgttcccacagacggcgccaaatgttgttagaggaatttagacaacaccgaataaaatattataattaaaatataaacgagaatatgtgattactctacccaaaatggcgagtattcaaactatggacacacagatgtactggaaatataaataacacaaagggaatatagtggttcagtcaaatcagggtctgcttagtccactgttgcaagggtttttctatcttgtttatttcatgttggatcattcccttatatagaaagcaagtgtcctttaattacacaaagattgatttaattatcaatccatttttacattgaatatcaacatttaaattaactaaaacgtaaatataataaatgaagagcagtttcggcccaattcactaattgcaacaacgtatgcgacctttgtggtgggcgttgtctgttcatattctcacataagctcgcaggctcaagatgtgtacaagactaatcgagtctcacatgcataagatatatgcgtcctattcgagtcgaatatacagatatcttgcaaaaggttgatcacttaggacatgtgagtccttatcgggttatcgagctcatttggtcatccagaccaactcactaagtaaagaattgatctttactatctcacagggagacctttatagttatcgcatatatcttggtatatgcgagtctttaaatttgatctccggtcctgcattgcgcaaggcattataatgcgactagaccttgtcaaggtcaaatcatcctgctgagtctggttcaggcaaggtttacactcaagaggtctccttctaacatttgagcccttctcgaggagagtgagtccacgtatgattttcataggagcctggtctcgagtttctaggtgataatatctcactaaaacaggtgatatcatggatagtagcaccaactattaagaacgttcttacttatctggtaagccttataaatgggtgtatgggcgcctagatacaagtcgatattatattatctgttatatgcttttcttactgagtatgttggctgacaaatgctacttccatgtgtaggtaaaggaaagtcaaaggctgaacaagagtgagctccgggcttggatggtgattgtacatgtcgagacaatgcgacctgaagtgtttggtctcaaaacatctagggttgtattttatagtcgttgtgccaccaggttataaatgtatttttttaacatttataaaagtttaactagggatcccgactatgtaaatatataaacatataagtttataaagttttacaattaaatcaaaagttttaatttggcacgattttcaaggaaaaccctttgattgcacattaattagaaaattactgtagtgcagctaagtattagggcattacacaattctccaacttttggcatatgctcaaaacatctctctcctgactaccattgaaaatctccttgagtattgatttatctgtccaaagaggtacaagaaaatgatcaagtagctaagaatcttagtcctgagcaggaggttccgaagaagaagaagaagatgatcccaaccaagccaagcaggggccaatagaatgacctattcaaattaatgatgacattgaggcagttgctcctccttctgtccaggcatttactagaaaaggaaatgcaatggtcgaggtgcaagatgatggagtgaaacacccctttccaacagggacgccaagtgtgtgcaatttaataaaattcttattttatatactatataattatactaaaagtgtggttaattaaattttgataattaaaagtttgacatataaactatatgataaaagaaaagtggtattaacaaccgggtccacctgttttcaaaatattcacaaactggtttaatagtgtttttacaacataaactttgtaatcccaaaatacattcaaaatagaacatcgtgtttactgggccatgccactgtggctgatatgtacattgctactacgacctcgcactcatggctgttcaactttagccttccctttacctgcannataaagcacctgtgagtcacagagactcagtaagaaaagtgaaataaacattaaatgataataaccatcaatttaaatttcatatcaacacgcttacacatttacacattatcataaacataatattctggtactttataaagtaccccttttaccactagttaactacgagctgaatatgtcactatcgttgcccggtgaagcaaatgataagtaaaaaacctaaccgcggtttcaagagtaattactcataacggtattaaccgtttctcaccctaggtcataacctagctcaactaacatttaatcaaagtcttgataataatcaaggccataaccattcaatcattaatatttaaccac

SEQ ID NO: 107287 - DNA, 2725 bp, Cannabis sativa
ctaaccaactgagctacgggacctcacattatgtaaaatcttaatataatttaaatagattatcaaatgatatgattcattattgctgtttctttttcctttttgacacagatttttgctgttaaaaaaatggtttattgcgaaaatgactaacaagtttccatgttgtgatgatgcttaatattattttaataattgtttttcttttcaaataaaatatttttataataacatagaggacaacaatttcgttccagggctgtgaaacgacaaaaatctataaagaaattaaattgttgacggagatttattactgttacaatactaaaatagtattatttttagtaatttttactacgtaaacgacaacaatctgtttccatgaataacaaacgacaacaatttcgttccagggctgcgacgcgtctgtactactggactcaacaccgggaagcccatctgagaaagaaagcccagtaaataacccaagcctaagaggcttcgaagtcatcgatgacgccaaggcccaaatcgaagcccaatgtccacaaaccgtttcctgcgccgacatcctcgcattcgccgctcgcgactgcgtcaccgctctcggcggccccgattactgcgttcccgccgggcgccgcgacggcactatctcactcaaagacgaaccattacaacacctgccaagccctttctccaacgccacccaactccgagacagtttcgccctaaaaggcctcaccttggccgagatggtcactctctccggtgcccactcggtcgggtcaactcactgttcttcgttctccactcggctctactcgttcaactcttcacagcctctggacccttcgatgaatcctgggtttgctcgggagatgaaggagaagtgccccgttggttcggagcgtggaaacgacgcgccgctggttgtgcctcttgaaggggtgacgccgaataggcttgataataattattacgtgggtttgaagaaaggtcgtggggttttgagttcggatcagagtttgatgagtagttatgtgactgcgaaaatggtgaggaacagagctagggatggcgatggttgggggaagaagtttgctgaggctatggtgaaaatgggttccattgatgtgcttactggtaactcaggggagataaggaagaactgtaggtttgtgaattgattatcattatctatgatcattcactatattataaataacctcaaattgtatgattgtgtaattattattgagaagttccggttagagataatttaataataatttttaagaaatatcgaaatattaagtagcactgatactccgtattaatagaattttcaagtttaatagattgattaatgtgattttcatttttcaagtataagatgtatttgcttacaattagataacagggccaaagaacagacagtagtaactttttgttgttctcgaattcagctgttaaaaatttaatttttctaaaattaaaaactagttttttttagttatgttgacaaatactctctatatttttgagatggggtgaattcaaagcttttgttttgcaaagggtacaagggtttgagtgttcttgtattgttataaacactctgtaggcttactttttctctatgcaatgtcctttgaaattgaagtttttctctttcattaatgggagtattgctccaaacaaaacgacgaccagcataagaacgtgcagctctcgccatatggtgagcttgagctgcacaattcgtagaccgttttacataagattgtagccaattcagactggcataagctctttacaatcattaacaagaaaactaaacagaaaatacatatttgtaaagaaggctatctaattttactgtaacactatgccctttgaagttttaattgaatatactttttatattaaaaagagtttcattttgaaggttgtttgataaaagctttgatggccatcgaataatgctttgacaactccaatatttttcaaagttttgtgtagtttttttggaactctcattttgatgattgtttgtttggtggaacttcagtaatcgatcgtggctgatgttcaatagtttttaatgatttatcaatgaataaagcaactgttatgaaaataacaacaaaatcagttgtatcaaaacagatcaaattgacaaaatgaacgcaatgaatttacttggttcaactatccattccaaggatctgaacagcctattaaggctgacttgctttattaatcagttgagaacttaacaaaattacagactaaacaatggaaacttgttccaagattaaagagacaaaactttctttacaatgttctcaaaagtgtttcacaccaaaaatctcactaagataagtagacacgtgagccttatatagcctagcaaccttaactgtataacggcctctggatgagtcagctgccacgcaagcactctttcttgttgagtgttttaagttagggtaaatagtgagataagtacttaaaattttaaagtttgtaagtggcataaactcaatatttatttttagagacataagtacttaatatttgtaaaacagtaatttttctctcggtatagattttgttatactgacaaaattagagaaaaattacagttttacaaacattaagtacttatgtcgctaaaaataaacattaaataaacatttaaatacttatttatccatta

SEQ ID NO: 107288 - DNA, 4084 bp, Cannabis sativa
gaaaccagaacgctccttgtgtgcccttccctgaaaaagagaaaatataggtcagtcaaaacaaagttaaaacaaacaagcgtatccaaaaacgagagtacaagaacgggaacaaaccagggtgtgtccaccagaaagagcaacaatgtccacatcactgaggcccattgtgccaaaaacttgacgcaaatggtcagatcctgaaaaggccaaagtataatatgagcaccaaatcaattctacccttcatgtactcttgtaattgtaatatactgatgaggaattggatgtatatgcttacccttggtggcatcaggaagacggccttctggtggaggctcaggcttgtcctgagatcaaaatgagtctaaatatcagtaaagaatgatgcagaagaaaaaaagggctaacgaatactatctaaatttccaaacagtataaatgaattctctctaaaagtaaaacaaagacattatgtaatacaatgttataaatttaacaacacaaaagaaaagttagtacgattacaaaaatgaaatatagggaatacaacattgaaagagataataattacatgaatttgacccaattataaataaaacgaaatatatcaaatacttccaacatttcttaaaatcccaccaaaagtaatagaatgagcaaaatgaaaaaattacactcactcaaataggaaaagtggtaaagacaaaaaaaaaaaatcgaacgaaacattaattctaaatcgtataattaactattaataatattttttaaaaaagtaaaaaaagaaaatttgaaatacagacctgtcttcctgggtggaaaggaacttcgggtccaccggtgacttcaactgcgacaacaccggccaactatatttccaaagaaaaccaaaagccaaaaaaacatgaaaatcagatagatctaacgacgatgtttttaagattatgaatattcgactggtagtgatttcaatacctgatagaaatcagcgtaagaaagaatggggaactgttccttgattggctccaaaagcctaacagcaatatcaagaccattgttggcagcgtgagcaagctcagccgggttcttcatggttccaaaaggaccaccggtcttggttttcacatcaaaagttccagcagaatgccatctaaagaacaacacaaaggaatctcaccataaacctcatcaacaaaacacattcacactacaaacacaaacaaagatttaaataaacgtacgcgagacgaagaatgagaggagcaatgttcttctcagcgatgagtcctctaagcttcctcttcgccttgtcaacagccttcttgtactcttcactaacaactggatagcatttcgccatgatcacgactctgcatcaaaaaaaaaaaactcagatcgaagaaaatcaacatcaaaatcaagcttatgaaatgaaaaacatcgatcgaaggagtaactaactaacctgagcaaaaaaaattgagtggagagattgaatcggattgaaaccctaacagagaactggactggcacgaggagaccacaagctcggttcgaagcttttgcgaatgataatggattacttggttgggataatataggaggaaggaaatgagaaggttctagtaattctctctcagccgttggattttttcgatcgtgtggctaatattgaattaaaattaaacggcttggattggattagagaatggtgacgtacggtcaagaatttgttaggtgacaagtttgaaatatttatgtgaaatttttaaaaataaataaataaaaagactgtctgaataatggtcaaataaaaataaaattatgggacggccctaaaagttggatgggcccactgagaacgatgtataaagagaaagtgtggatcgtgttagtgtctgaagttactaatttgcccttattgttttggtcaaatcaaacctttattatctctcaatatccttattattttaagaatgaagttattctttttttttatttttggcattttgttgttcttgagatcaattttatagtatggaaaattagtgagatttgatttattcactaaaaaggaaagaacatatcatgaattaatgaaaaaaaaaatcttacatatgaatttcttagtttctttcttttattgtaaaagaatatcttgttttctttttataaaaggaaataaatcatggttttggataggctcgaaaaatatgtaattagacatactataaaaaatgtgtaataattcttttccaaataaaaatggttaagatatctaattttattgccgagatttggttattaatttttatgataaaatcattctattatctttatttaattttatatattatttgaatggtgtgaagaagaacgtttatttatatatttaagtcaaatgcaataaattcttaatttgcatgacatgggaaggaaaaaccgccgtataaggtggaggcaatgtaaggataaaaatgtaatttaagggtattaaactggtttaagaataatggaagaaatgattaaaaggaataataaagctaaaattatagtgtgaacgtgacaaagctttggaagattccattcgggcaaataattaagtcacctatcttaattaataacatatctctctcagtctcacacatataaaactccttcggtggacacctgcaattccgctagttttttttttattattttttttcttttttatttaaactatattgatctgcaatattttttttgaatcaaagctattagattcaaacattaaattaaatttcatggtcattacataaaatattatttaagatttcagttaattgttattgttaaatatcaattagataatcattttgtatacgtaaaagtaaaacattaaaattaataaagtaataactcaattggtatttaacggtgatatcgagcttacactttaaatttaaggaaattatctcatatactatttttttaattttttttcaaattaatagaggtttccatacgattttttgttagcgctagttgcaatatgagtttctatgtagaattccgtaaaaatacaaaaaaactattttgaagtgtgaaaataaaaaaatctcttaaatttacaaagaaaagtgagttaattgcaacataatctccaaaactttcattttacttgcatttaatctccaaaatctaaattttaacagcaaaacaactaactgtctatcatgttggactgtccacgcgtacatatggtttatcgatgtggacatggttaacacatgaaacaatttaattggctcacataattaattattaaaaaattaattgaattaaaaataaatcagaaaaaaaataattaattttttttcttccaccatctctatttttctcatctcatattttctttttctatttttttcttcattcttcttaaaaaatatcaccactaccaccatcaccatcatccaccacaaacgaactgcccaccaccaccaaaaccacgtctccacaccacaaccatcactagaacctctttttcagatccaaacaaaatctcacatctcaaatccaaacacatcaaagaaacctaaacacctgccaaaattcaaattccgattacacaaaaacaaacaaacccaaattaaatctacaagaaaaaaatttaagatttaaagataaagagagaaaatctcgaaggtgagacaaagagagcttactcagcactagtgtcatcgtcggagaacatgtgtggtgctgcccaggtttgacagtgataaaaggggcagtgaaatgtgggatcgagaagcccattccaaggagaacatggatctggagcctatttttcgacacgaggttcagaagcgactagattggagtcgaatatctggaaactccatgaattatgacgatcttaacggccaaacttttgaagggttctgttctcttagagcttccaaggtccatcatactgctccctgtatgaaacagtgtcaaaatcacgcccgataattgattaaaagtttttggactttgtcaatctcctccttggcagctcgtgttagatagggctcgcgagggtggaggtgtc

SEQ ID NO: 107289 - DNA, 2136 bp, Cannabis sativa
cttgtactgacaaagcgggtattaaaattttgtaataaaaaattaattaatattttaattaaatataagctagtttgtcattttatgatgatataaatctggcaaagaaaatatatatgataataaaaaattaattaatattttaattaaatataagctagtttgtcattttatgatgatataaatctggcaaagaaaatatatatgatgatgatgagatttggaaattaaaaaggattaataatattaattaaagagataagatcgagtttgaattggaaattaataataatcttacttccaaggaacgtctccaactaacatcaagtcgccatctttgtcctcataggttggcacatattcagtactagttcctttcactgctttagcaaccttataatcaatattgcttcttgatatttgatcctccacattagtactactactacatgctgtgttcaacgttcctaattataattaatttaaatatcaatgaattaacatttatattataaattaaaagaaaaatattaaaaatgagatcaattaagtgcgtatatatatagggtaggtaggtatacgtaccttggatattggtgatgaggcaatagttattgttagtagtagtgggagtgggattaaacatgttgtgtaaggctgtcaatagttggtgataagtattgtagttttctaggtccactttgcgtaggtatggtgctccgtctgcgcctacttttacgtacttgttattcatagccttctttcggaacgatctaactggtggccacccaattacttcacccctatacatacacatacatatattatatcttgaccaaaatattcaaacccccgccccttcaattactttcatcatcactaataataacatatacacatgcattcaatatgccaatgtcaatgtgtgtgaatattgtttaatatatgctgtttaatttcttttaaagtggtaataaataagtacatacacacactagacatattacgttaatcaatgtggtggatatgtatagcatgaagttaggtacatatacaaacacagtatatatatgctataatgtacgcacaaggctgcaggtgatcatatcatttcaacagctttaagtaatatataaatggtgttaaattgagggtctatttataatcatatagtaactttccacccgcgaaactgttagacatgcgtggtatttacctcaacaaattcccatgcatatatatattctcatcccaagaaagatatatatttgcttttatattaatattgttaagtcagatcgattctttgtatcattcctcttatcgcgcgcctattaagtataactaaactagttaaattatacaagatattgaatttaatttcaccaaaacataaagtatagtgtgtatattatcgatctttaaagaataaacataaattttaatatcataaatgttaattatataatgtggtttctatttatagacagttgatagtttttccaatataaactatacattttattatatatatgtgtagatgtagtatatgaaaaacgagtattactaacttactatacatacatgtaacaagttaaccacataatcaatataaaagacaataattaagtttgtaaagttatttttttggtaagttagatgtgaaaatattttttatttatggtgagatttatttgtattattaatccaattttatcaccttttattatttggttttattgttctttctatcttaagaaagaattattttttagttgaacttttctttatatggaaacttcttgtaagagaagaaattctcttatggaaaatttgttttttaaagaaattttgactattattattttttatcgaatgcactgtttatggcaggtatcaagacccaatacatgatcagacacgtttttggcaagtttcattttctggtatgatttgctgggacagaatctagttctgatgctgcaaattagggttttatttaggaaagtttttgtaagctgtagattcgactttatggctgtctctaggatttctatgttctataaatagaacctagagagcagccattcgaattaactcttctaactttcattttttttgtatttttctcatttt

SEQ ID NO: 107290 - DNA, 3507 bp, Cannabis sativa
aaaagaaatttaaggaaatttggtttaagctgattcattccgtttctcgttttgacttgtgctttgcttaggtttttctcaaggcgaggaaagggaatttgttgttgaaagacttgaactttcgttacggagtaatggctcacaggttgcttcgagatgttgaggccgatggttgggaacgatcggatttccccataatctgcgagtcatgtctcggtgataatccttacgttcgtatggtatgtgtatctttgattttactacgagctttagggtttcttttttttttcttcatattcatatctttgatgtttgatgttaaatgagaccattggctcagaattaaagaagtacaagtttagaattctgactaagctattttgtaaattgattatccaaacactttacacagcaattttcatcaagcaaaataagctaaatcttttacttattctatgtttttagctatctcacattcaattacttgttttatgttatgtgagtcatagtttctttgttccttattatatgtgattgtggcaatgcccaataagattcgtgattgtccttgccggagcagaatggatttctttagaatgagttagatttaagccaatatctgttaaatctttatatagttatgtaatttttactaatgctgttggttacataattcttgaaatgcagacaaaagcaaattatgacaaggagtgcaagatttgtacacgaccgttcacagttttcagatggagaccgggtcgggatgcaagatttaagaaatcagagatttgccagacttgcagtaaagtgaaaaatgtttgtcaagtttgccttttggatttggagtacggtttaccagttcaagttcgagatactgcactttctattaattctaatgaggccattcccaagagtgatgtaaatagagagttttttgctgaagagcacgatcgcaaggtttgtttaaatttacttttatttaattgcagtaaacaacaatgttgaaactaagaaagaaatatgaagtaaatttacacacttatgatatccattttcttttttctttcttttcactttttaatcatggttttcttaagcactatattgttccagaagatttgattcctgagatcatctggattgttcctatttatgtatgttttgatgagaggattaagctgattaatgcaatctcgttgataattgtagcttgaagagagaaacaaactatatgtgtactgtttagtctattttattgcttgtggtatctttgttggaattgctaatcatgaagatggatgcagccacttatgtaccttttttcattaattgttgattggttcttaaatgcaggctagagctggtttagattatgaatcttcttatgggaaggtgcgagcaaatgacactattttgaagcttcaaagaacaacaccttattacaagaggaatcgagcccatgtctgcagtttctacattcgtggtgaatgcactaggggtgctgagtgtccttacaggcacgagatgccgataactggggagctgtcgcagcaaaatataaaagatcgatactatgggtatgtccaatagtaaataattttcaattcaattattaatgactaatttttgtgatgcctttctctccttttttctacttgtctacctctgtgttttttttggtgccaagaacttttttgctatagctaatctactaggtaattcatgttttgaatgccaaaaatgtttgtctatctctgttgctgatattattcctcattcggttattggtctttcatgtcaaaagcaagagagtgtttctagttaatctcttatctgcatggtgaagggatcacttatgttaattgctattcctattagtttaccgcaagacaatttgctcttttttcatcttctattgaaatcattgtattagaaagtcataagttgatgtgtgctagttgctagtttctttgcttggtgcagtcaaggtttaatagctcaatgatgcacagcttctaataagcctgaggtggcaatcctagacctgaactttgataaaagaaaacttgttaaaagtcatccagaaattataaagaaatagcaaatacattagaataaaagacttaatgattaccattcataaaaacacagtttcagaacaagaaaattgcctaccagtagttcatactacaaactaaagttaacaaaaccaaaaatcctaattgtagagtagaacttataaatgttgcagataatttgtaacttgatagtttgtctacatgttatttatctaaactacttttagttgatgattgtaatgttaacttgtaacttatttttcaatgtgaacagagtcaatgatcctgtagcacagaagcttctcaacaaggctggagagatgccgtctttggaaccaccacaggatgagagcatcagaactctctatgtgggcgggcttgatgcaagagtcactgagcaggatttaagagacaacttttatgctcatggggagatcgaatccgttcggatggtactacaacgagcatgtgcctttgtgacctacacaactagagaaggcgcagagaaggctgctgatgagctctctaacaaactggtaattaagggtttgaggttgaagcttatgtggggtaggccacaagcacccaaaccagagaacgatgcctccgacgaagcaagacaacaggcagcagtagctcacagtgggttattacctcgagctgtgatatcacaacagcagtttcaatctcaagaccaaactgcaccaatgtactacaacatccctcccccttctcagccagagcgaaacttttatccatcaatggaccctcagagaatgggtgctgttgtttcctctcaagagggtggtcctagtggatcctcaggttcaggtgaaaacaaatcacaagaaaaggcgccgcaacatgggcaacattttgcttaccatcctaggcctccgcaacatggccagtatcctcagcaatattatccaccatatggtgggtatatgcatccaccaccaccgtcaggtccaccaccaccgtatcagcagtaccctgcaccacctcatcattccgcaatgccaccacgacaaccccctcctccagggaaccagcagcagtatcagcattctgccgcttcagcctctgctccagcaggatctgtagcgtcgggttccaaccctccagggtcatctgttagtgctcctcctccgacatcatcatctgagcaataaaacttacatcttctttttctggattgttgttttatagcatactctatttttgcttattagctcactcttaattggctttgtcttttaaattgtgaaggtctatgtattcaatttcttacttactacatccacaaatcttaatgattatggtgtttagctgattatatcaattagatgatgttcatttctttttttaatataaataattttaccaaactccttgaacttataatagtctcaaaactatactgtct

SEQ ID NO: 107291 - DNA, 3020 bp, Cannabis sativa
attctactaaaatgatgaaaaactcattccattaaaataacattctaatattttaaaatacaaccaaataaataaatgaataaaaattattttcttttccgttccatttcactttattatctctaaccaaaggccaaattaaattgtattcttatgttacatattctcatgtacaaaatgcaaccaaataaaactaatcagacctggaagtgtaactcctactcaaagagtgtcccaattgaacccaattacaagttcaggaatttcgaatgctaaagttgtgtgtgaggtttctcgaagttcttattctttctaacagatgttgactagacactagtagagctacagagttcgattaaaaagatcattagctccatggtcgacttctcacatgcctgatcatggtacttctctgtcaccattcattcaatcatggtgaaatttccatttgcaatagaatcctatgttggtatcaaatccctctttgagctatgttcccacatatggaatgtgctaaaggaattctttggctaggagcaattttgacaggaatatttcaagcattcgacctagacaccaggcacatggcatgggatgcacctactgcaacagatagcacttgctgagggcccaacccatcttcctccattagaaagttgaccataactggacttggttgcacctccggcaatccaggaactcctaactgggaatccttggaatttccccacatgaacaacttcccatcatctatcaaatcagaaacagaagcttcagtgcttactattatagttgttaaaaaatgcgtaaattgtgagctccaattaacaagaactgttctatcaaataaataaataactagagctgccaatgttccaatcaaatccagccccttgcaacagtaatttatgaatctacgttgcttccaaatgattctttcaagagtttcaaccagcaaaggcatatcaaatcaagctataatagaagatgataaatgactaccatctaaaagctttcacttttaactgttcttcaacatgatttgaactaaatattcctgcattttctccttgcattgtcaaagacctataataaattggagaacagagagacataaatcagctcacctgtaactgctgcagaagaggaacctccacaagcaatatagacaacacgctcgttagctaatgcttcgatcacttcaggtgttttacaacttgaaatagaagaatgtcccagttgaccatgaccaccatgaccccacgacagcacctttccgtcatcttaatgttgtagcatcaagattgaaacacaaagatcaaagaattaggcaacttcaaaagaatacctgaaaacacataacatataaacatatatcgctgcctttgcattcaccgtaccagttaaagcaagagagtgatatccaccactcgctatctgtatgatgcgaaaatcttcaagactagtaactagcgttggcttccaaccaccaatgttatcacctcttccaagttcgtagttagagttcgctgagaaaaataaaatcaaacaaaagttaatcaatacctgttggctttaagaaaattgtcacaagtagataaatcttttgtttgtcttagtatcacactatcattgatggcaaaacctgtctagtgttagccagataagacccatagtttagcacaaaatatagtaatattcttgtttgtctcataaggtctacgattgattagtatatcatcctcagttcaatctcctcgtgtttttcttttttgtatgctgaatggtagattcagtttcaaacaacattatcatcaccaaggaaaattttattttcactatccatcaccttgatgttgaagatcccatatcttaatagtatatatccataattgctctatgactgttcaagttcactaaccccaaaagattaaaaaaaaaaagaaaaagatcgactttataaagaagacagacgaatgaaaagcatttattaaagaaaaaaaaactgatgtccacacctccccagttccaaatttttccatcttcagtaagtgccgttgtgaaaaatcccccacaagaaacagcagccacaggaacaggtaataagttcactttggaaggcacactatatccaccaccctcatttggaccacgatttgggccaagtcccaatctaccttctccttcatcacggccccaaatatagagttcacctacattccaagaagtaaacaccaatatgaaaataaaactgaatggataagaagacattaaaaacctaaggagacacataacacaaaggcataaattaaaccacgcttagactaaatttaacaaaataaagaacatatttgcattctcattcagctctagtcaattagattgttgcatgattccatactcccctctctaatttccgacacagttcatatactcattttccctttaaaacaagcaaaactacacaagaacttcgaagattctttgaaatttcaaatttgaacgattctaaagaagtcatcaagactaaaactttgcacacacctgaatccgtaatggcagcagtatgagtaccactagttgcaatatggtgtatttttccactccatgaaccttccaccaatctaggcagtaattctctagtataaacagaatgcccaagagcaccaaaaccaccataacccctgcaaacttcattttttatgataaaccatgaccttatgtgaaccaaaaataaagaatcttcacattgaataacagcacaaccataagtagtaacacatacatacatatattagacacaagggaaaatcactacgtttagtttacaacatgatttgatatcaaaacaacccttttatcatttgtaatgcaaaaagacacgaaatggggtatgctctattgaaagtaaggagtggcatactgaccaagtgaatacctgaccgtccgtggtgagaacgacggagtggattccaccaagagccactgaccgtacggtatccaaatgggggttcagtgta

SEQ ID NO: 107292 - DNA, 2468 bp, Cannabis sativa
  modified_base (2243)..(2249): a, c, t, g, unknown or other
gattagattgaaatgggttttatttagggcatataatcccaacatatcccacgtcaagttgttccctttaatgggaatgtccatcaaagcatgacacttaatcagctcagtagtgagagaaattggtctttcccttttgacccgacacgctcagagctactcaaaacaaaattcacatctcccaagataaccagggcccgacaaatttgctaccaacttccataatatttgactagaatttcttcttctcttggaagtaggtggcccgtaaacacaagacaataaccaaggatcatgctcaaggtcagagtacacaatgccaaaaatatggtttttagatatacaaatgctttcaaaaataaaacccgctttccaagctaaaataatatcccccgtactatcgacaataggcactataatattaaaataaaaatgtaagttcttaaaagaacgtaccaaaaaggtagcatcagttcggtaataaagataaagtgaggagagcacgaccgagtgagggcttttaatgccaaaactgtagagggtggtctaccccaatcctctacagttccaagcaacgcctctcatggctcctgtggaggagggacaccatcctcctccaaaagggtcaaaccaccaactgacacaccaatcgcggatccctcatcctcaatcacaatatcctccttgatatggattataatgtccataaaccgagctttggttttccatgctatcagtctagttgactgtcccaaagagatcggtttgtcaacttactgagaacatactgtattaacctcagtgtaattaatcttctccacttcatcactggccataggttcatctgaaaaaatcagtagaaacccgaataacattagcatcatcatctccatacaccagaccaactccacatgggaaatctttgaccacacgcttcactcttctaatgaacaggtttggctttctcccaggagaaaaagtttcaaaatccaaatttcgcttcttaataggtgtagttctctcattgatttcagaagatgcttggacaccaatatccacaaaggaggctttccgtttattttggctcgacgtcccaatagcatcaggttcttggatatatccctcttgggtctgaaaaaatttggacaatgatctcttttcatcaagatgggcaaagacatcttggccctttaaggagctattcgagtcctaacaaagtagaccattatccaaattaaaatgatggcccatagtagctctattctcatcgcacgacccctcaaataaaattcctttaattagcccagatgccttgcctgagatgttaagacatggactagtcatcacaccctccaattgatccacacggcccacatcatcaataaaagtcttttgaattggcctgaaagccttactcgagaaagagcttttgttaatatccacctccccatttgaaatgtacccacaaccgaaatcattctcaggcccacaaatatcacaaacaagtttaggttgagtagggtcaaccttactttgacctttcacattcagacagatagcaagactccccctaaaacttaaatcatcacctaccttcggcaaaattgtatagccattttcaaagtgcaataaaggctttgaggaaaacttaccaaattcagccaaaccctgcgttactctaaatggcacaatcaacgattccttgggccttcacactttgccaagtctaaaacttaatcaactcgttgctattaacctaggctcaaagctcaagctgtgtgtacgaatccttggtgcagcctcgacattcacgacttgaagctcttccaccgttgctggtggtgttggccccagacctctcaactttggcttagcacaacctctacctttgccaaaactagacccaccaattttccctgagaaagaactcgcatacagagacgatacattcatccatgatccaaacaatgggaaaggaatgttgggaatattttactaggatctagatttactaataagtatgttgaattaacatcctaaatatgaacaatgaaatcaaacacataagagtctagaaaaccttatattgattgcagcaaaataatatgactccttccgctcagatctctaactcttgttcctttctgtcgtcgagtattatcaagatttgagtctggatctctttctctccttcgggttggtgaccaccgtctttcgctttatgattgagtacttgacttgcnnnnnnngggcatggtactctatcactatgggcaaattggttgaagaacaatgaaggagggtttgaatcactataaaaggtgtctctcatctactagttgtcagagaatgaaaactaggtttaagtttggttaaagtgaatcgttggatgagatgagagcatcatattctttttatagtgtttcaactaggacttaggtttgaattatatggattacaaaagaata

SEQ ID NO: 107293 - DNA, 2943 bp, Cannabis sativa
attgtaatttaattggacatccttcctataaaaagagagctcccctacctcattagtcacaatttacatattctctacaaagtcataggttctctctcttcacactttctgtctctagaaattgtgaagtgaagctagactattcattttttcttgagttctcttgtaagacaattagctttttgtgataataaaagctctaagtagacatagttctattaccttagtgataaggagaatgaactactataattgtagtgttctctttttactttatgttcatacattcatttgccgctaccgcttatgtcagacgatgcagagttaatttttcagcgtcaacactacgaaagtttcaaaattgtaagagaaagtatttttactgtaaaaaatttaaagctaaatttagatattatggccacaaataactcttttattaatgatgtaatctagctctagtagtagaactacgtactagctactaacaagtaacaacaaaaaacgagtcccaggctttacttactcacgacttgaaaacaaaaatacaaaaggaagcatagaaaaagggtggataccaacaatttttttcgtcaaccctttggtatgaaatatatggcctctttttttacacatgagctgcacgttgtcaaacgttttgacgctaatcaaactacatcgattcatgtgatataccaatattagtggggtttctacacattttatttatatgatttttatataaagtttgtaatgacaaaattaagtgtcaaacaatgaagcatgatgctttctctcttctactcaattaaattcaatactgtatataacataacataatcaagaaaaaagaaaagaaagaactttagtaaaagaagaatacacttcaatctataagactatatctccataataaaatgagcatcgaggttattatatacacgtgtcctaaattctaataatatttatgagaggagggttgatattccattagatttatttgattaatatatatatagttttattctaatccagtctctccttgaaagatatatttaataattaattagtagtgttttaacaaatataactaaaatataccataatacagactttatatttaaaattttatggttaaatattatttatgcaattaaatattttatctttctatttgaaatttgaaattggctgagagtcccacattgctaatgtgtggaaagataatagaaaatataagaacaataggttactcttcaaaatggagccaccaaaaattcaaaaaaattgatccaagagccaaaagtcaaaaaaataaaacatcattcactttattctaaattctaacaggttttgttacatgtttatttttttcttgctttatctagcttaaattctgttaattttatgtatgatggagcctttattatcatgaccgaaccttatatgttcgacttcaagtttttcttttttgttcgtagtttcgaccatcaacaatcatatcttttggtttattcattatttcgcatcacattcccctaatagatttattagaaatttaattatgatcgaaacctcctcaaactaccatcagaatctcgcaatttttgagctggagggaggttgaagaaggctcctggagacgaagccccctgagtggcgagtgcgatggtccgtaaataaataaagggccagggcagcataatcttgatttttttttttttttgagtgtaacttaatgatattttctaattaaataatagcttaaaagtctttagttcgaactcatgatctctttttttctatccctccttcaccgctaacctaatcttagtggcttcagcatagtcttgaaatagtcaaatagaagcctccctcctttcctaataggaggactttagggtttaaaaagggcgtcaccatcaacccccttcacctttcttggggcaaattttttatttaaaaaaatatgttacaaaaaatattgatattggtggggaaagtttggttaccagctcctttttctgacctatcaaagcagcttagcttgacccccacctctcatatatatgtatatgatgaataaacaaggatatatacaaaattagtaaagctaggaaataactaattaatttccatgtttttgttaataattaataattggactgcttcaaaactttagtctatgcttaacacatgaactgcacatgcagacattcttcaagtcaaagatgagtactatgagctttcattaaataaactatctcatgttttggttgggtttgtcaaacaagaaatgatagctcttgcaatttactactttattttttgtctttaataagatatgtatataattaatacacagactagctatagctagtagtaacgaattaatatcttgcttataaaatttttaagtggacgaaatattctattgacatgaaattatatcttattagcaatataaatgtccacttaacattatttactccgcactatttttaagtctgagtaaattaagggaacaatatgccaactttatttagtttcacaaagctcgaagtaaaaagacaaaaaagaaaaaaaaaaaaacatataagcataaactatatagtacgattgaaagtcaaggtctcttcatatctattagtttatttatctaccgttaaaatcattacatgatcaatggccacttttatccgagcagttggttaaacgcgtttgtaaaggttgcaggcaaaagaagtagcttcctagccctgattttgttaggtttagtttttgttggcatatattttggccggtaaatcacggttttcccaacatatttatctaattgtgctggcaaaaggcttagtaggaaccgctaaaaagcatatcacatagtccttgtgtaatcgacccttacttacgattatactaaaataattaaataaacatagtcct

SEQ ID NO: 107294 - DNA, 1302 bp, Cannabis sativa
tcacttaacaagcataaaagaaaataatggggatctaacaattgtataaaatgaagatgaagtaataggtttagtactaatttctttggtcaaaccataatgttttacttacctcaagtcccaatctcgggttacatcccagtagaacgagtacagagagtttagaacacttgaaagaagccacagaggccgatagaaacttatccacttttcatgtaaaacatgatattttagggctgaaagaaagataactggtactgcagtcgagtattttaatgctgaaaatgcaagcaaagaaagtaattataaatttaaccctactccctgaataaaagagcaataataatcgaattgcaaaaaaagaaagaggcaaaacagaaacatttgatttcatcggagtgcttgcagagaagctattcatggaaacaaacccttctaattattcaaccaaaattttgcaggaattctttatctataaaatatcataactaaagaagctttagttttagatatgaaaaaaattccatgttcatcatttgtttccctagtcacttgacaaggaaatgtgaaatggttgaacctgtaaggttcagaagttatttcaagtacccttgatcttacttggcatctaatacataatacctactatacctcatgtcatgagacaccatcaaaataatccattcaatacaatgtaatttataaggcacacatcaacagccagattttttaatgtttcagaatatatgaaaattatattagaaatggcaacattagaagtcatcgatcaatagagattaccattaagaagggttgttttctctccagtatccttgtattgtcgtaaacattggaagagacgaaaaaggtaaggcaaaacaagaactattggaattgcaacagagtggctgccgcaaacagagtcagcttcaaaccatgcaatggtagcaacctgcaaatcaaacatacatcttaaacaatacgaaaaggaagatcaaatctacatcttaaacaatacaaaaagaatgattaaatctgaaagcaacaaacatgtttaaatgatatacggataaacccaatatatcttaagcatgctttcaaactctagttaataggtcttatgcagcaagtcatgattcctccgaaaaaggatctctcctattacagaatcatcctatcatcgtcttgcaatttcctttctctaaaatacctaatataggtaagagggtgaagaataaacatattagcaggccgtatcctagctgaatttgatctcacacaccattgaattcttggatggca

SEQ ID NO: 107295 - DNA, 3142 bp, Cannabis sativa
ctaatggttcgccacaaatgcatgagtctcatgtggtgtctatggttttgacgtgtaatgtataatcatatcatttatccatgaatttctacgtttgagaagcttaatttgactagaaaattcaacatacataaagcgtatttctttcgattccttcactcttcttttccaacctttgaatgtttcctgtacgtactttcttagagaaagacattattggcttagatatatagcctgcgcgtcacattcaaatatcttaaaattaaaatatcttattaaagttatatacactttatttttttaaaacataatattttttggaagttcaatttttcacatttaatgtctcaatgtatagtaaataagctaataaaataataattttttttgacgtggtgataaaaatcacacatgattaacgatgcaacaatttattatcgacggccgtacctcctcaaaccgggatagctcatcgtctaattaaagagcatgctttgctaaaccgtgagttacaaaattcttatcgctagccacatatgggacaaaattgcttctgaaaatttagacaataaaactatagcatcctcaaatagtacctcgagctcattaaaaacatcgttcctttgttaatagttgttgcgagagaaagcgaatctaaggaaacctctttaattggcttgaaaaaatagcattaaaaaaattaaaaaaataatatttggcttgaaaaaataaaacttatctttgaagcttcttgaaaaaataatgtcacccttaatttatcgaaaataaactattgagtctaacttttgaatctctcttttaaagcagagaaatttaaacaatgaaaccgcctttgatggttctatgacctactactaatttccaatccataaattcactcttaccaaaatgtgataagtacattctattaattgagaagaattcaataaataaataaataaactatattataaaaaaaaaacttttaaattaaaattttaatgaaagacttatctgataaattttatgtgattccaatgagatatgttaaaatgacataacatttctaccaaacatatcaaaagtaacaaaaaaaaattatttttaatatatatggagcgaataaaataaccaattatcaacatgttaatgtaaatttaaggatgaatttggagttttttttttttttgaaagtgctatattttaataatgcaattgattaataaagttttcattacatttcaaaaaaataatgcaattagaggtttgtatatctactgttcttataaaagcgaaagaaaaaatctcttaactttttcccaaaattagaatttacaaaatagaaaaaaaaaattacaataacacaaaaggttattagaaagcttataaagtaaaacaaagaagtaaaatgaaataagtaatattgtttttgatataaaataaatatttttttctaaaaaaaatagaatggcctttgtatagttttggtagatacctaataatagataatattgaaagaattagcttattatactgtatatgacatatgaaataaatagtttaaaccacaaaacatgaagaacggagaattgttttctcttactaaacctattaggtgtcaagtttttgaagacctttatcttttatttcataaaaaagaaaaattgggattttctaactattattaacagtcgggtatagtatttttgttagtctttgagatcgacatctattcgatcgtcgcaaaatcgagtagaatagacgtcgataaaacaaggttagtaaaagattttcttgacactggaaaactgtcaacaatactaggtagaattaccaacggtttttcacagtcgcctgcctacactacaggcgataattttgcaccaagtatagccgactatgcaaaaccatcggctatactattatggccgacaattttgcacagtcaactatactattattgctaacagttttgcacagtcgactatattataatcgccgatgaaccaaaaactttggctttaaaattgaagattttttttttttctacgtagtgttgcagaataaaaaatgcaaattttctaccatttttccttgcattgcttgtacatttcaattttttgcacttttatataacatggtcattggtcaacaattaatctaacaatgtttgaaaatatgcaaatatgtttaactaaattaatcaaaaaatgtacaaattataagttatattaaactaatcacttaatgaaaaatataaacataaattgagatatatacttataatccttattgctctacttttgctctcacataatctacctattaatcacgtaaaatattaatctgatcatttgtatactgagtgttgaacctgctgccctgtaaaacaaaagaaagaaattaataattattaacattaaaattattaaatcaaaagaaagaaagtacttaaaacgtacaaacttaaaattacttattaattgattgaaatcttctaatcaaagcattagatttggttcgtttatgtaaccttcaatgaacttcataacgtagaatccatattatgtaccatctcgctgttgtggacatattggagttatccatctaatggaatcgatagtgtgccatttttaagcgtgcatggttgtaacagtccattgagctacacaaatagcaaaagtataataccaaataccaaacaaaatatatattgtgacgttgattatatattttacatagtaatgatacctcgcagacccacaagcacttcttcgttgttggaatctaagaaggccactgtttgcgtagtaggttggacgaatacaagcatactgtgaaatcgagtttttgacaaacaaacatgtaagattgttaatacaatattattctaagattgttaaccaaataataccctgaaattaagaatggattagcaaaaccctaattagataattatgaataattgaggaattatattattatatagctcaatatatgtgattttgtatgaaatttaatatgttaaagacctcattggtgagccaggggtattttggtcttttgatctttattgatttacatttgattaatacaatttttggagaaaaaggaaattaatttctggtgttatctccctcat

SEQ ID NO: 107296 - DNA, 2738 bp, Cannabis sativa
gaaataatccctttaatattagctctcacatatctattttaaattaaaatataatattttttttggattagaaaaatttttattccaactattactgaacaatacacactacaaaagcagtaactaaacaattcaaaaattgtttagcctaactattacatttttctctctgaaagatagtttagacaaattataataacagattatagctttcatttactcccacccatggagagagaaaatgagagtcgcacgtgctgatttttgaatttttagtaaaaatatatataatacttacttgttataaaaataatatttgtaatattttaattagaataaataagatttatcctctcaaattatgacattagtagagttttgatcgtcaacattttttcattactaaaattctccttgaactataaaaattattgtttgtatcactcttcaattatattctgtaatagaattatgtatcttgtattcatggttgttatattggttaaatgatagtcagttaggtagttgggataggtaggttagttaattctttatcctttttttacctttagtttgttaacggcctcttctcttctccctttctgtatatatgtgtgctctttacactacttatattcattaagtaatttttaatttaatataatttttcattctctctcaaagattttcttccgcaatatggtatcaaagcagaaaattcaagctttctcttgatcgatcttgatccttccttccttaacaagtcgtgtcttcttctttgacgaaggtggtgttcttgccttcagctccgatcatcattctgttggtgattcgttcccctgtacctctagaactcgctgattctcttctctctaaaaatgtcgaacgataatcaaaccattccaaccgatgtcagaactactaatctttccataactcaattggtttctagttcgcataacaatcaaacaattcagactactactacgaaaagtcctctggaagatacaagtgatccatactatcatcaccgtggagacaatccaaaaaatatcctagtttctcagcttctcattgggcagcacaactacgcgtcttggagtcgtgctatgcaacttactatctctgttaaaaacaagattggtttcttggactccctaaactctcacctacttatttcaatatgtataatgcttagatttgtaacaactatatagtgatttcttagattcttaattttgtgtctaaagaaatctcttctagtcttcttcaatagcaacgatctggacaaacttgtaagtacattttcaccagagaaatgggcctcacatcttcaatcttagaaaagcgttgatgaatctgaagtaggacaatcaaatgatcaacatgtgctataccaaattgaaaactatttgggaaaaactgtcgaattacagacccacgtgcacatgtaatgcctgcgtttgcggtggagtcaagaagcttcaagaacattatcatatggagtacatcatgtctttcttaatgagactatcaaatcactactctcaagtcagagaaagcattctcttgatggatccactgcctgtagcaaatagagtttttcaccttgttactcaagaagaaaatcaaaaattaagggaacttagctactggtgcaaattctaactccaatatggtctttgtttttcagggtgataaaaactctaccaagtaatgtgatcctcaagatccaaagactcatcctcccaaacgcaacaaacccttttgcactcactataatgtacttggtcatacattagaaatatgttacaagatccacggatacccacctggatacaaagcaaacaagctaaagaaggctatatattgcaaaccaacttcaagcctgcagtgatgctaataccaattctgatgagactaacacccttcttcctcaactcattgttgttcagtatgagcaacttttgaacttacttgccaatcaacaaactagtattatcatttcaaaaaaaaaaaaaaaaaaaactagtatgatcattttagatcctagcacctcagggagtacaacaagtatcatcttttctcataattttgggtctttgcgttttttctaaactaaataattttaaaaaataaacatttgtgttgttattttttgtaattatgataagtttatttttataaatgtattgtataacattttgtattgtacaaaaaaaaaactatatatcatgtaaattattatttaattaaaattatactaatattagtagtttatatatatcctcattattaggagtcaaacgaacattatcaacaccatatgtacaatggacacaataatagacctataataactttgcacattgtcattaattaatatataattattgtgcaatgagatatgatcctatttatgattaagctccatttaataacattaatgatgcaattattaataataacaactatatacatacatattaaaatgatcatatatataaaacatcatgcataaacctagctaatattgttagaatatttgtaaccatatgaattatgatatgaaatgatgatcacataatatcaatgatacactatgctttacctggctattgggtcaactagcttgttataaatataaatgtacatacatgtgtatatagtatatgtatgacccatgtggatgtggacctataattatagaggggaggaaatttgattttctatactta

SEQ ID NO: 107297 - DNA, 2138 bp, Cannabis sativa
ttgggtttatttatttgttaacctttaacgttaacgtctgttaagcttaataatcgtaaagattgtttaattttttggtttaattattaggtttattttttgaaatttgaatgaagcctaatcgtgtaaaaaaatttcaaaaattggggatatacgaagatatgtggatgtgggtaagaggatttttttttaatttaaaaaaatattgtttaattttttgggtttaattattgagtttattaaaaaaagattgtttaattttttggatttaattattgagtttatttatttgtcaacctttaacattaacgtctgttaagttaatcgtgtaaggctaaataaaaaaaaaagaatcgttaaaaaaaatcgttaaaccaaaaattaccattagatagacactttttatacataaagatatttaataagatttttatatattttaataaaattgtaagcttttgatgactttttaaataattatacacgtattgtattcaaaatttagaattcaattataaaatgcagccaaattttttaaaaaatttatgcccttaattcttatttatgtgatatcaatgtgacaagttgtaattataaatttatgtgtgacaagtcttttttaacaggtgagatctatcttgaattttttttacaaaaattaatatttttaattgaatatttattaaaaatattccaacactaatatttttatatatatattattgataataattaaatataataatataaaatgaataacataatgttaataatataataataaaaataacatgaatgcgtagtattttttttttaaatggtccaagtgaaactccactttcttagagaagaaactctaagaaaagaagggtactaaatttgtattcacatcaattgcatcatgcagaaaaagagactgaatacaaagaggatagcaaggccatcaaactttgctaaaagtatccgacaaagcatacttagccaaggtgtgagcttctatattaacaattctaagacaatgcataagatttactatattaaaatatctaaaatgacaaaccagaatcatccaaaattcttaaagaagactcgaacaacacatgattattaaacttaaacaccaaattaagacaatcagactcaaaaatagtattatgaaagccaaataaataagatagtgatccagcattccttatagccaaagcttcaaaaatttcgggtgggaagcctccatcaataaaccacgaaatggaggccaagacctccttttttttcattccaaacaatcatacctaaaccacgacaacctttagacacatccaaagtggcatcggtattgactttaacatacccaaagggggcggtgatcgacggggcaccatcgcctgttgaggtagtgtagatagagattgaactgcaaagatcagcctctccccacatgaaccgatgactttttttttagtaggtaactaaaaaattaaaagcccaattaacaaccaatccaggatggattagcttattattatgcatccacttattccttcgttaccatcatctccataaaaccactaaaaccaactcaatttgatgcttgggaaggggatttataaacttatggataaaaccaaaaaaatctgtgcaagacacaagcgaatttcccaggttaaaatcacacattttcctatatggagcaagagaagaacatccccatgaaacatgatgagtcgcctctaattgatcatcgcaaacatggcatacaccatcattcaaaagaccatgactaatgagatttcttttcatgggaatccagttagaagacattatccaagcaaaagttttaatctaagagattggaatttctatataattccttgtaggacacaacctcatggtctagcttggcttgaacatgtacaactcatcttcaaaaccctcaaactcatggctgaagcgacaccgtcaaactagtgcatgcacattagagcacccatgagccaaggttcagcaagacagaataataatacaacatgaataattacaacaattacacttcatatagtacgccactgcgtatatactatgccaccgcactttatatcacattattctatatataataatatcactataattaatgt

SEQ ID NO: 107298 - DNA, 3369 bp, Cannabis sativa
tttaaatacaaaaaattatttaaagtttaaaaataaaaaaaaccctcatatttttttcttaagaaaataattttttggtagggtcataactgaataagaaaaactaagtgcatttttgtttttctaataatagttgtccgcccctggttccaagcgaataaagaacaataaagactaacaaattatatgacaataacctaactttcagttaaaaatacactcttaatgactggaagcttaaaatttaattaagcccactaaatttaaattattattcatgtttatgccaaacttgcccataacaacaaaccaatccatacgattaattaattaagattaggctttggtcattcataaatttaatataatagttaattaaggttctaaatttgggaattttttttggctcatctatttgtcctcatatataaattatacattttcttctgcaatgatatagctaataatgaataatactaattattaaaaacaactgtcaatctcgataatctaatcatgatcatatatagatttatttctctttaaagaaagaaatgaaaagagagcttttttttttttaggatgaacattaattatttttttaattattccaataaaagatatcagatgcctcacttctctatcttgaagggtatcaataattacttttttctacagatcagctatagctttatatacagaagagatttattaagttcaaagaatattattatatgatatacatatatagtcatactaaggaataattaataaggaaataataaagaccatctttctcaattccgtatggcactgaaactcgaagtacgtactttatttatatttcaataagttaaataattataagaatattccgataataatattattatcaattaatacataaacatatacacgtacataatacactataacccctatccttctacagatgaatcttttataatttgaaaaataaaataaatcagtattattgttggtcacgaatatagtaaaagagcacgttgtttcacgtgcttagagaggattgtaggtgggaagtaattacaaatcatctaaactaaaaaaacaaaaaaaaaaaaaaaaggaagaagaagtatatgtgtcaattagttagttaattaattaattaaactaagattaaaattaagcttaaattataagttttacagctgagagatgatgatatgaatcataagatcacgtgggttgacccggaatagtgggtcgacattgtccacgtcagttgagaacccagcaaccgtcaaagattttcaaaaatatcagaactttttttattcatttttatctactttattatcgtagttaattattatttacttaattatattattagatatttatatttatatataattaataaatatttatacacaatgtgaaaggttttagaaattttattaccatgtagaaaatcaagatatattataattttactataaaatatgtaatacaaaaataatataagagaaattgattaaacatatgttataatatatatatatatatacatgtttacactaaaagtagttatgatgatgtggatatcaatgtttgataagtggcaagaaagaaaacattttagaattgagtgatcccgagtcatagcagtcgacctgagagaggtccttagccttacgcacaggttgacttcgagaattctggaataggtgtttggatcccgccaagttatttttaatttactatctttcggtattatgtaccatgaagacataaagaatccaaatccaaggcctacgaaacaacatctcggaagtcaacccgggtacctagggtttcacctagcgcctgggttaacattccaactaggcttcagtatcctggaccgtcttagtgcaaatgggtcaaactttgtactgggacatgaattaaacatgtcacgatatatttgaggcatcagaattaaatttggagcacttttatttttgagcacttggagcaccaggtgcctcaggcacccaacgctcgagctaacatattgtcagcctggggcaagcattttttttgtcttcatccaaaatgagaaaataagtgcttttgggagtgaaacaaatcaacatggaggcctgaatggggaccgaacgcccaagatgacattttgtcaacttggaccatttccaaggtgcttttttgagacgccttccgggaatattccctgtttttgtcaatgattaagatataggtatttgtgggaatcaaacagagtcatctggtggtcaaaaaccgaacctagcacccaagttgacacctggtgctactcctagcgcctacattgacattttgtcaacctggatcgtttccaatcattttattgaaatagtgtttcgagcatttttcctgtcattagtaataatgaagatacaagtaacttagggagaaaacgagaatcctaaagggctaaaaattgaggctaacgcccaggttgaattggtgttgggcctagtgcctaggttgacaatcaacctggtgcgctggtttctgtcactcaaatgcaaattttaccttgggcattctctccggcatggtcaacaatggggtaggagaccttgtcctcgagttgaaagacctcagaaagttcaaaacgacatcccgaaagctttgaaaagagcacccatcacctaggttgacacatgatctggtgtgttgggttcttcttatccgattttgattccgtctcaagcattcatctagtttttcatagtaaacaagaggtatgaactcagacaagtcaaacaactttatattttcactttttcggcaaagtgacagtcgcaaataggacaattttgagttttgcaaaatagtaatatctctaagaactggagaataacctccgcaaaacaaagaaattggccaagtaatgtcaaaatatcacttaggaatcaaaaaatatatcaccagcacgttatcccactcactcaacatccaggtgttgggttttgtgccctaaatcactacaaaaaaaaatggcattttgcttcagtttttaagtgacatgtaaagaatttatgtcggtttatgtaaccaatgttataactgtagacgcaaatagtcttatcttttgcttcacttagtaacagacgctaaaagtcttttgcttcagtttataaccgaagcaaatagtaaaccactgacgcaaattatttttttgcttctgttatgaaccgaagcaaaagaattaaaaaaactaagaataatataaactttcgaaccaccacaacccttcggaccgcctcaacaacccaacaacaacaacaacaataataaatattgccaccacaacaacccatcgtaccaccaaaagca

SEQ ID NO: 107299 - DNA, 1782 bp, Cannabis sativa
aagagtgatgttcctattgagttacagtcattgactgatttagcaaattaataaaaattccaatttgcattcaaaaatttataaagaacatgggtcactttcactaatcaatctccatatcacgagccttaactctagcgagcattatttaatccaaatagtaagcccaaaaaaagaaaaaatacattataaagaacatggatgacttcactaatcactaattagcttttagatggaatcccacgacacccgctatatgaagttggatgctattgattctgattgctaaggtcctttatttcttcaaaaatcttttttcttacttttatttctcttattagggtcattacagctctagactaaaactattattgtaatatataccatgttaagtgtaagcaaaaatatcccatcattgcacgtttatttcttttagtaaaagttgattcatttactgctgttttctctttttcaagtgtaatgttgttgagtattactgacctattgtcttcaactttcacttgtagaaagccataagtgttactccacaaatggcacatcagctgatacaggtaaaattcccacattcatttaacccaccaaagatttaatttatttatttgttcaatatttttcccctcaaacttgactctggtctggtggttcactactaattcctacattgatgaacttttagattttgagatcagaaaatattgaatttgtggtggctccatatgaggctgatgcacaattagcatacttatccaatcttgagccagaacaaggtggaatttcagcagtgattacagaggatagtgatcttatagcatatggctgtgaaactgtaagaactttctctcctagacttaattttggtgttaataaatgttttgaaattagttggttattctcctgagtttgttgttaaattatttgccactacttgttatcgaaatgttaatcttgttttgctgtgatttgcaattccacattgcttggcaacagattttattcaagatggatcgatatggcaatggagaagaaatactactagataatgttttcaattctaagaagggccgtacaccttccttccaaaattttgataaggagttgttaactggttagtttggatcttctttgtacttgtatcagttgagaaaagtttcaaattcattgttaatcatattgttgtgaaacagcaagaatatgtcaaaaactaaagtatgataaagaaaaatctgttttgattttgcaagaataagagcatagctcactggtctttgtatgaacaattgacttgtactccctttgttatccattattttacaggtatgtgtgttttagctgggtgtgatttcctaccttttgttcctggaattgggattgcgaaatcgtatgctattgtatctaagtatcggaacctagaccgtgtgagtgcattctattcactcctttgaatttcagcagatttagttgattgtccaactaaaactcctttaattttttgtgcatatctccctcttagtaatgcctgcatagtttaaccttgttgtcttatctcaacttttgataagaaagttgaaatgcattagaaacttcttgttaaagttatttcgtgagaaattcataagggcattagtggtgcccaacaccaccatgaggtgtcatacttcaattgatgttattaagttttcggtcctaattattatgaaaaactgctaactactcgtaaggcactaccttgtggtattgtttagcaatactctttcattgtgt

SEQ ID NO: 107300 - DNA, 1608 bp, Cannabis sativa
  modified_base (1543)..(1565): a, c, t, g, unknown or other
tttaacacacacctattactccatattttatgaaatgtgctttaattattcataattaaattttttgagatattacaactatcccttttttatagaaattttatccttaaaatttacttgaactattcaagatacagttcctgcatctgcaactctaactcacaagtcacctttcttaaccttactattacatcacatcaatttcaacaatagaagcatcttgttctgtatatctacttcttcctatctaatatctagataggtgattcctcttgttatcctaattttttcagtacaactcaccaacaaggaggtcaactcagcatcttgaccaacaagaagtctcgactctcaaacgggacgacgagcgacagaccagccaccttaagggggctagccagccaccctcggctgaccttatggtcaaccagcttctagatggcacaaggctggctagcctgcttcctgtaggtgcatggtcggccaagataggacctaacaggaatttggtgcacaaccttacacgtggactgcaagctagactacgaattgggccttaatagcccaataaattagatagaaaatacatatgtttaaggggcattaatttaatatgtaaatatctcttattttatttgctaattagggtttaagctctcctatatataaagagaattaactcaaccctaaaaccctaagtcactctaagtctcatttattgggctaatggctttgatgaccaagtgtccaacctcatcatgaaatgtgtctctacagttccctactctgttttgatcaacaaaaatccccaaaagaaaatattcccaaaatgtggtcttagatagggagatcctctgtcccagttccttttcttactttgtcctgaaatccttgctaagtcattagctaagtaacaagaagaaggaaatcttcatggaattgaaattttaagatttagtcctatgatcagccatttaatgtttgcggatgacacgatactctttgcgcgtgccaatgtggaaaatgcaagggtgataaataggtgccttgacacctacgaatattagtcgggtcagcaatacaacaagttgaaatccagcattttgttttccctgaatatggatcataggcaaaaatatgagattatgtatgcccttgttgtccaagagtgctcaggcagggaaatgcatttgggaaatccctttgtctttaagaggaggaaaggagaagaggatcatagacttaaggaaaatatgttgaataaattggagggttggaaagtcaagctcctctcgtttgcaggaaagctacattaatccaattggttaccttgaaccttccgttctttactatgacaacttgtaaggttcccctctctacttgtagagagcttgatgttatggtcagaaatttttggtgggcaagtgatatgggaaaagagaggttcaaggaaactttgagttgggataaaattggtaggcctaagagtcttggaggattgggatatagacaactagaagacactaaggtggcgtttggttgnnnnnnnnnnnnnnnnnnnnnnnggaatgagaatgggaataggaatatgaatggaatggaataaaa

SEQ ID NO: 107301 - DNA, 1535 bp, Cannabis sativa
aactttctgcacttcccttgagtaattatccagattttctctgaaaattttagtaaaggttacaattttaattgtgtctatattagggaaatagtgaagattaagttttatatacctaaaagaaataggttgcataggccaacatctcatatttctgtgtgagagaggaagagctctaatgaataacatgtctccccaatcaagcttttggtgttcagactgaacataagcttggccatagccttcaatactatttggctgctgtgcataagcttttttagtcactaatggcagtttgaagaattcttctatgtcattcttcattttttgaatgacttcctctgaaaccccatgattgattaactgcatcatatcattatggaaactagtcatgatcaaattatgcctacaattgaattttggacaaaagttgtgtttgatgagtttattacctgaaagaatccccatcctttacaagctaaatgaagttttgccaattcatcatgatgccattggtgttgattgtcaccaatcatcaatttggtcatatcaattactggaaactcaaatgattctagtacagaaactggtttgagctcaacttcaggccggagatagcgaggtggaattttggtctggttctttgaagcaagatcttgaacacactcaactgggagagaacccccataatctacacttgaaagctgttgagtattcttcatttctgtttagttcttgataattgacaatagtatgctacttgtattctttgcataatgattgaggcaatttaaaagccaagaagataatggtatttcttgcattatgttattatattgttcgcctttggttggaaggaataaaatggaatagaatagaaatgaaataaattttattctatttttttgtttgattttattttaaagtattggaatgtgattcttattctaactataaacattctttgctagtgttttgtgcattccaggttgtgttattatagtggtaacaaattcaattaacaacattgaagcagaagagaaaatgtgatgatcatgtcataataattgtataaatagcttcttcttcttcttctttcttatttttggcttcgagtcataactttactccaacttaagatgatctactcggcttttaccatcaagcttggtactaaactgaagtctgatataatcctctgtgctaatagtcatatacttagccttacaatttcttactacatctggtaaaggacagataatgcctttggtatgtggaccatgaaatgcagcaactgaaatacgttgcttctctggattcacaacagccctgtgctctatgctcttgtactccccattgctcattatctgcatatatacattacatggtttataagtacaagcatcacttgtagaaaaaaagacaagacaaaaatacagtattatctcacctcaatgatgtcaccaatgttgactatgaatgcacctgggacaggtttcacaactatccacttcccatttttcttgatctgcaaa

SEQ ID NO: 107302 - DNA, 1823 bp, Cannabis sativa
tatttttttttaaaaaaattccatataatatttatatatatattttttttttttttgtgtataagtgaaccccaaatttgagtattgttttgtaagttttctttttcttactacatatttagattagtaccttattattattgttctcgaagtgtttttattttcctaactaacaaaccaaaattcttgcttggttgttttgcttgatgcttgcatgaactttaattgaacaacctccatggtcgcaactcaaccagtcgaaaagccaagaagatgaagactttatcacaaaacgaaaatggcaagcttttaaccaaacaagaactcctaattctcgtatccaacgccgctgccgcagctcattctttcctctctcacaacgacatcctcctccttccttctcaaactctagccctagaatcgcttatctcctcttcccttctctctctccgtcgcccgagtctcgaacccctaacgctgcactctgctcctcataatttgccggagccaaaccaatgctggttccgccgatttctctcctctgcaggtacccgtgaacacagcgttctctggtctcatgccttccgcatgtccgagccctctttcaccctcctcctcgggcttctcacccctgatctcaacgccgccgcggtccattcctcagttccacccaacttcgtcctcgccgctgcgctttaccgcctggcacacggagccggttacaaggccttggcgagacgtttcgggctcggctcctcggagaaggcttgtctcgcgttctttaccgtctgcaaggctatcaacgagaaattgggacattttttcgagcttcaatccgatgttagtagggttttgggtgaatttgggtggctttcgctgccaaattgctgtggagttttgggtatcggaaagttcagagtagatagcgggaaggtcttgggggagaatgggtcgctctatgttcaggcattggtcgattccgccggtaggttcttggacgtctctgctggttggccgagcacgttgaaacctgaagtgattttgcaccaaacgaagctctatattggcgttgaagaatcgagagacttgttgaacgggccttgtttggagctcagcaatggcgattcggttcctcagtacgtattgggtgactcttgctttcccctgctcccatggctgttgaccccttacacaaaatcaaataaggaaggcgaagatggtttaacttcaatggagaaaaatttcaactcagcgcaccaaaggacaatgcgattggtcagactagctttcgggaaagttcggaaccagtggcagcttctttccaagcagtggaaagaagagtgccttgagtttctaccttttgtgatcgttacatgttgtttgcttcacaattttctaatcaagactcgtgagcttactgttgaagacgaagaaaatgattttgataactcaagggaagaagaagaagaagaagaagaaaatgaggagaagcttcctgcttttaatggagaaatgaacgaaagtggacagaaaatcagagaggcagttgccatgaacttgagccgggtatgcttgaaaagatgaatgttttttttgatgcagactatcatggttgcttgttaaaaattttggttggaatcttaggaagatatgtgcatactgcatgtattaaataatgtattaataagtagaatttaagtcgatgtatgtaaatagagaactatcttttggctaactatgattttctatttaattcaatggatggatcacactttgacctcaaataatgtatgattatcaagtgtagatatgtagaatgtaga

SEQ ID NO: 107303 - DNA, 956 bp, Cannabis sativa
ggggccgaggccccggctgccccactctctggccggccctggcaaggaggtacaagtagtggaggcacaacacctacaaggcctgaccatccgaccaagtgtacacaacaatcactactcttgcaacctgggaccacttgacaccagacaaaggtaagtcgcaagaccatcacttgcaaactgcagcttatagaccatgggcgtctccatattccttgggactactaatgtacctcaaaccattagagcctataaatacccctttctcatatgtgagtaggagttaaaaaattattgtaatacttgatctagagaaatatacaaacttcaatctttcttcatagctattctaaacttttttttaagttttaaaatttcttgattttacatctaagtttcatttttccatccacaatttagttgacgagtttttgccgttaacattagtcattttgatgatttatatattgtttagatatttgatatgtggtttatttatatttttgctatatatatattttggtaaaaatcaagtttttgtgaaatttgtatttttttttgggattttttttttttggaatgcctgttagggtacaacaatagtgtaatttagaagttagagataaaggttccgtacgataggggttaacttcttgcttaacgtcattttaggcaaatgttgtactactatcgtttaatatcgtacctatcaactaagctattttcaaaaatatgcgaaaaattattaaggttatgataaatatggcataaaaagtaaatgccactaaatatggcattatctaaccaatcaaactaaaaatataattttttttctaaaaaaaaaccatatgaaatattaaaataaaatctgaatttaaaattcataaaaaataaaaactcaatttaattaccataaaaaatattaaaattccctttatatttattttttttaaaaa

SEQ ID NO: 107304 - DNA, 2347 bp, Cannabis sativa
aagctcatattagcaagaaagataaggtttgagacgatgattctttcttggttttcagaagccaattctcacaaaacaaatattaatacgtaggtttaaaggtttatgatcacatttattaacatataactctgaagaatgtctttttgcaacccaagtaccctaaatggtgtaactaattcttgcagcgtgatgaatacactagtatatacacattattttacatttttagaagtaacaggaaaaaacaacaaaagattccaatcttatactgcaacaactgcttgaaacaatcaatttaaatagaaaagtacacacctttacaccaaacaagctaggctcttgctgcatagatcgattacacagctgcaatatataaagttgaagtcaacaattttgacaaaagcaacagtcttattatcaagtttcctactcctactattaattctgcaactaatattattatataggcctttgcttagaaaggggtgccattaatgtaatgaaaattgttaggcttgctaacctcgtcgacaaaaacatagacggagaaaggactaggctttgtgctaaagaggaaaagcagaactttgaatgcaactagcgtaacgggatcacccaaatgtgagatcacagtgacaatgaaaaaaataggcaaccagaatctcttagcaaatgtccaaaagacatttgaatctttttctacacctgaagcaccccatggttcttgatgatgctcatacaccaaattatcaaagtctgtaatataaaagttcaaacaaaggaagattgagaagtgtatcatctataacatttcataaatacaactcaggttgcatgtgtagttgtgtattgattctcaccatctatagcatatgacacacgaggagcaaaagtcactaatccaaaaacagttgacactgcaatagcatttttcaatcttattttacctcctgaaagaatcccaaaaccagacaggacaaaaagatttgttactcagcaaaccaatgatgaacattattgaacaactgcttctttttcctgataaaaaaattaagtgcacagggcaatgcaactgagatcaatcttgtaatgtagttataatctttgttatgaaataaatccaatcaacaaacttaaaagggatttttattgatatcagtaacctaagaacctaattaaaaccattatcaagcttataatgcagttctaatccttaactattgattgatcaataaagtcatattgtaatccaaataatattcattccccttagactcttccttccaagaaaaattcacaaaatcaactgagtaaacaccattatcattataatcaaataaacaaaaacgccaacaatcaaatacattaagtttcaaagaatgtacctggtaaacagaaattctgaaaatatcttctttgggtatttaatatatactgaaatcccgagatacggctacgcagtacaggttcaaagcccttcatcaatctcttcaaaggttcccatttggtatacactgtgtagatatagagagaaatatatacaaacatacatatatgtacatgtaaataaacttttgctatcaaaatataaaactgacaaataaaaatgcaaagaagaagttatagaaagaaaaactgatttacaaaatggtcttggagaagaagtgaatgaagaataagaagaagatgtgattgcaggaagagattgcttaagtggataaagaaatattctggaagtggaataagccatgtttaagctaaaatcatctccaactgcctgtaacccttacaaatatgtaatcttgatcgattgggtgggtcttctacaatttcctcttctctgcaaattgggatgggaggaatctttgatcgaataaacctctctgtctctcccccctcataacacttctcagaattagaaatgtcatgtcgtttctacccttttcgttaacacaaaaacgacatgtagtttatttgcaaaaagtataaacacccataaaatttgtaatttctgccaacttatttttagggattatttcaaaacgaacacaaaaacaacaacaataaaaattaaaagtaatacagttgtacgaaattttaaatatttttacgattttatttatgagccttttgatatatttttatgttgtatacttgttaatttattgttgattttttgttgatattgtttggatattatttttctattattttcatgtaattttcttgttgttttgatagtttgttgttttaaaaaacatcgtaaaaaaaaaaaaaaactggaaaagtataaattttttaccaaaaaaaggtactttattgtaaatttttcttttttcaagat

SEQ ID NO: 107305 - DNA, 1898 bp, Cannabis sativa
agatcgtggtaaaataaattccaacagtataatcattacaaatgggagagtataaccgttagcacgaagatcaagatgcaactttcgaggagaagtaataaatgctcaaagatacgaagggatagccctattcacacgcctcacaatctgagcacatgtcaccccattcgcctagcacgtgggtcaagcaagtccacgtacgaccaaaaagttcccatggggacttgaggcgggggaaatgttatcctaattttggcacaaggtgacgtggtattcttctgagtgacacgtggagaacattttatgacctagatggaccgtacatttctcggtgtgctgtcttgagtgatttattatctaaaaaaactcatttaaagattaatctagaacatcaaaacagggtgaataaaactattcaagcaacttccgatctcagtgaagtcgcacactccaaccaaggtgaacgcgattgagaaacaattttagggatattatcgatttatatttttcaattaaatccctatttttgtgggatttctacatgttgtaaatgtaaaataggaaactaaataagtttccctttttattcctaattgttttgggaaaacaaaatgatataattttttctatcaatagtggaaccattccattatacagggatttgaaattatattttctatagaattcttatgctgtaaaagaattgtaagcttttcctgagaattcttaagaaactcacttgacaagcttcttgtgatcttattaatttttcaaaacaatacaacaaaaaaaggagtaggctattacaataatcgcggggtcgaacctctataaatctttgtgttcttattgctaaattacatatcattatttctaataattcttatcgctttaattaactcaacgtcgttggctaaaagcaaggtcaatatttgatctgttttaaaatatctacaaatttcccaatgtgtatacccacaaattttttgtggccttgtggaattctttcaaatgtcacgttcggctctgtagtgtcttaaatgtggttcattatacccaaactttccaagcctaaacgtgagaagggtgtattagaattagtaataagttactgctctcattgtcaattagttttgaaatggaacctcattcaccttaattctaaattctaatcgggataaggccctccaaactttctaacaatcgagtaggggatccccaaagatagctttgaagtaatccgagcattcctaccaattagagccctagaattaatccaattccaatttttatgctctcaattgcatttcataggttttgaattgtggctgaaacaaagaactttgagcacttatccctctccttccaatacaaaaattttcggaggagagcttcatttaaagtttctaatggaattctccctattctttttagggaaattgtaataaatggccctaatttaatactaatgaaagtcaatgtcccttttttaaatttttaaagtaaatggcctttttaaattttagtacccaaaatatctttgattacaatgagtgtatcattagttttacatgatatttgtactcaaaaactcaattatcacaaaccaaaccaaagcctctacactaaacgaggaatgaaggatttccatttttttttattttttaactttcttccaaattactgtgattccttccaaaaaaccattaaagcttctactctcatcaattttttttaattaatttaccgaatttcttcaaccatttcctcctaatttcttccaaactaaggcaacaatagcttttccaaacgaaattgattcgaaccaaacaaaagtaacataactggttccttcaaaaaaaaaaataataatacatctgctccaaagaatatgaaag

SEQ ID NO: 107306 - DNA, 1698 bp, Cannabis sativa
tacgtttcgagacatcagaatcatattccatttgaagttggtactcaaatgataatattgggagggaaacagaataatgcgccaaaacatactaacacgaaaaccaattcagccttataaatcgacaaagttcaacaaatcatataccaatccgaaacaaaaccacaaatttaatgcagcatttcagtcaccgctacgagtgataccaaacctaaaacagaaacgaagtaaaaagctcacgcgattgacaataaactctaaatctaaaccacgatttcctaattcaccgctagtttcaaccaccacaattgaattctcagtccaccagttcaaaacaaaaatcctagaagctcagcattccgattaaaaaaaaaaaaaatcaacaatctaaataacaaaaaacaagaacaggaagctcactccgctaggtctccgagctggcgcaagacgccgacgaggccagccatggcaacaccttcaagcagagcttctggatcatctttatcggcagctttatacagttcaggatccgccaatccatactcgctcctcacacggtacctcgtcaaaggcatattgaaagtgaaaccaacacaataccaaaccctagctccctcagctgtagtgagagaaagagaagaagaaaagaggaaaacacagtagagtacagtcagcttagcgaagctcaagctgttcgatttcacatttccgccatgaaaatgaaaattgtgaagaagaagaagaagagaagaaagaggagagagaaagtgcctttggaaattgggcaaaacaaaaagggaggaaataaatgaatattacggtggtggtcacagatataatagacgtgaagagagtgtgtgattttgtgtgactgtaacaaaaaaaaaataatatattaatttaataattaattattaatttatgcttattaagatttttatttaacaatcttaaaagtttaggaggcatgagttaatacatgttaaaattcgagtaacaaaaatcttaattaaactttactttgaggtgctttcacaatgcatactcttacctattttggcatcaagaaatcgttagtccattcttttttatgttcgtgtatattatagttatgaggagttcattttttaatttttttttatagtgatattcgttatagttacagtatcatctttgtaaatttttgaaaaattctgaatagtttccagtttactactgtgtttagaaaactttaaacgtatttttagcactctaaattatttgaaatttttcaaaaatttgtaggaatgatattgtaagcataataaatactgctataattttttttaaaaaaaaaacattctaacatgtattctaataggaggttgacagtaacactctttttatatttatttaacatattttgaaaaaaaaatgagaaattcagaataacttacattatagaatgcagtttcaaaccgcctattttatacatgtataaaataaaaataaaaaaaatcacgcattatgtattgtttgaatcttatttttgagaagtgcgttaaattttattaaattattcaaattttatagaatattttaaataattatttaagcaacaaaaatttataacatacaccaaaattaaactattttttttaaaatgtcaaaataaataaaagtgcgagtgcagtgtaaatttttttattaatttattta

SEQ ID NO: 107307 - DNA, 2266 bp, Cannabis sativa
gagataaaacctcatgattctcaataaggggtaagggtaaaatcaaacaacaggacattgaggaagaaattcctctgcattagttggttatgttatgtcttgggtgctaacccgcctttaaattttgtcgaatatggcagcaggggggaattgagaaaatgggttgcttggtgtgcttttggttcgattccaattggaagagcaacatgatatggtggtctgaatagtgatattgtgtgttttttttttggacaaaaagccattgattaaggtgccaatttagaacttaactaaaaatagggaagtctcttttagtcaatagctgccaaatgaggttttgttttattgatgaaattgatcaagatgtaatagtgactcattactatgaatggaaaccaaccttttgttcaaattgcaaaggtattggacatctcaaggaggtgtgtagggaggggaaggtgatctaagttccattatttatggagggggagatcctccattaatagatggatagaatcttatgctggaatgtccgagggattgacagtcatagtaagcaaaataaagtaggtagttttttctcgctaaatgttaggctaattttagcctactttttaagtgtcttaattcatgttttcttgatatgtttacgtgtttttggagtgaatttatacttgttttgcttgctttcaggtttcagtatatgttttggggcatttagagtggaatgtggagagaaagtgtttaaccaaactcaaaacacaagttttgaaattgtattaggatcgcagcgctgatgtgttttacaaacacaacaagaaacgatcacatattcaaaatcaaaattttactaagggcattttttgaatttggtgggaaaaaggattaggtcgttgtttaataagatgagaatcacaatttttagagggagagacttttaaaacttagagaagaggaaaaaggagattggagatttggagcaattgtgacaaccccaaatctagttttttctcttctcttttagttttctggttttattatgtttttcatagatttgattatgatcatgttgatggagattatgagctaaactccaatttaagaattttaatgagattgtttgaaactttctatggattaatattattttgatttttctcttcaattgatgtgtgatttatttatatttgtacttataacatgtgtttgattagccaccttatgcattatttatgatttcaatacaaaatcttaaaagtgagcgttaaaaatgctctaattgaatagacataggttttgacacaaaatgagagtatttgtgtagcttgtgtagcttttaaatcattgcttaatgctaattatatgtgtgttctgaaatggaggatagtatcatataatttataatcagctatcatactagatagaagaaaagtatccatttgcattattgaaataggaagtagaatcaattgaaattaatttccatatatataatttcataattaaatcttatttattgttttagttatttacattgttttcatgtaaaaattttggaagtgtctaggaaaatgattcattgtaaaattaaaccaaagcatggtgaagaattctatatcaccatcaatctatgcctttaatgaagcatcaaggaaggaaattttatgggaaaccatgagaggttttgcaaaagagtgtaaggggtcgtgggttgcacttggaaattttaatgccatcatcacatgcagatccggatgaaattttgagtgtttggaagattttgagttattgatgtaaagttttgaggctgtttttacaactctagatgatagagttgatagagttgtggctaactctagatggatggatagatatccaacccctaaggctagatttttccttaagggagatttgattactgtccttgtctctttttggtttgagtacaaggaaagaggccatttaactttttcgacatgctgtgagcatcacgagtttcaccgaagggtagatgaagcttgaaaaactaggttcatgggactccaatgtttgagattactcaaaagttgaaaaaaaaaagttactcatactcaaagcattcaataattttttttggggaaggtagctaatcatggtacattgctagaaagctattcaaagggatcctcataacattgagctggttaataaaagaggttcaagctccctagaagtataagccaagcttacaatgcttatctttcaatgctttctcaaaaagcaaagc

SEQ ID NO: 107308 - DNA, 2555 bp, Cannabis sativa
taagaacttgaactagatttcgttatagagaattgctaaaagtttctattattgtctagtaattttttttggtgttgtaccgattaagtagtgggttttatataattttaaaaaataatttttaaagaatattactagtcaatcgtaaaatgttacttggtgttggtgccgaatagcaatttccattacatattatatttggtagacagattcagaggagagttgggagcgagtggaagctgatgagattttctttcagcaagagagaaagagctttcttgctatgtatgaaaagtctacgtgaaggaatagaataatggttgggtattcattttggcttcatctactttatattgttattgattttgtttttgttttttttttttttcttttccttctctgtttttataaatgtaatcgttaaataaatatatatatttttttggcttcatatacactccagggtgacataagacctgtaatctctttcttatatatctctcatacgttaggttgccccatctccactcaactgtttctatctttaatggttttcttttaaaatctaagctacagatagtgagccacacacatttcatatatgtgttgtttttaacaaaaaaatatataataataataaataaaaatctaaataaactttgcctttggtcagtgttaaagaaggaagccagaactactacatttatccttctacaagctaagttttcccatattattatacatttacaaactaaaagctcaaccaaatagctttagatccaagcaattaagctctttttgtttttatctatgatcaaccgcatattctctctcgctctctctctctctcaccaaaactcattggtatttcttcatgttccaacttctcaattttgatttttttagcttctattctcttcttctctcttctctatagagcaatagatcttcatctctagaataactacgtcaaaaatgagaaactcattttcgagaggaatatgcatgagtcatgctgcaatgcaaagtactctactaggactaaaaaagtgaagagaggaattcaattcctttctcccaattccaaatcatataattgggctagaaaggaacaacattatatatttatatatatgattgttttatgaataataagcttcaataatagagactacagctagctcctctatcttatcataactatattctttttctaatttcttcgatatatctatacttctttatatatatttccttttaatgatgcgaatcatgcataacgcactttttgatctcactgtctgtcttattatagagtagaaaacatgacattgtgaaaagaatgaccataagtggaaaatattattaaacaataatatatatatatatagctatataggaaatgaccaggtgcaatgttgaagagcgtggtggagtactactcgaccaaacaatcattaatgcgtctgatcatcatcatcatatggatgatgatgatgatgaaggtcgcaaagatcataacctaatcatcagaacttgtccttcatgcggtcatcagatcaaatgtcaagacaaggttgttctttatatattataaattacctcttagttattaattgctcatcaatttattcatcggttcataattctctctctagatattatgtgtttatattttaacatataaaatgttatgtgcgtatatatatatatataaatatatatatatataggctggaattcatgatttgccgggtctaccagctgggggaaagtttgatccgacagatcaagagcttctacaacatttggaagggaaggtacgttctgagacatgcaaggttcaccctctcatagatgagttcatccctactattgatggcgagaatgggatttgctatactcatccacagaagctgccaggtcatcatatcatcatcatcttaattattattactctcatgcattgcacacatcaaatatataaatatatatatatatctttcattaattaaatacatttgcacatatgttgttgtgttatatatgcatgaaaagaaatgcaaaccaaatggtgtttagtagtatttaaataagattttgtgttaaagaatatgactacaattatattaataatcaacggaaatgtagaaaagataacaatactataattataagtagatctacgtcacatttacatatgtgtggaaccacttgtgttttttttttttttcatgtatgtggaatcatttttctgaatactagtattttctgacattagtaagaaagtatatatagggtctcttttttggttaggaatgagaataagaaataaaaataaaaaatagaataaaatttaaaatattataaaaaaattattaaattttttcttatattacattaaaattgatcttttttttcaaaatagaataatcattccagtaaaataatgagaagaacatttggaatgatattctaatattttaaaatatatataacaaaataaacaaataaaatttgttcaaaaaaaaaaaataaacaaataaaataaaaat

SEQ ID NO: 107309 - DNA, 1661 bp, Cannabis sativa
ttattttgaaggaagagttatttaccaacaaaaaagaggtggactaattataacctcttataataattttttaatcaatttctacgttcgaaatcacatgcaaaattatttttttcgattttttttttttcaaaaatagaattcctaatattttagtttatcacacatgttcaaaaaacttcaaacgtatttctaacacggtaaactgttcgaaatttttaaaaatttatatgaatttacatgaataatgtggtaagaataacaaataccgtcatgaaaaaaaactttcagtatttatttttaagtacggaaattaactaaaagattatataaaaagagattgacggtaacacttcactactaactaattaaaaaaattaaatagaaaaatgttatatatcttatcattaatgaatatgaaaatataattgaaaagaaaagaaatattttagtgatacaaaaatcagttactcttgttttgttcaaactatctctaaactacttagctaatttacataacataattgtattttttttcctttttggaaagggttacataacataaattatcaagtccaatattatatatattatgttacttggcaaatgtgacaagaaatgctcgaaaggcattttcaatatactgaccaaaataaaggttgtctctgtctgggacactgcctaagttccgattattactaataaagcatattagtttatactaaactttacaggtccctttaaagtaacaaaatgtccagcaacaaaaacatagtcatgaatatattatatagtatatatatgtatgtatatatgtctttaagtattaacaacaccaccttctttagatacctcatcaaggcgtcgatccatgatcgaagaaacggtctcaagaaatgcatcttcgctagttcccgggagctcagcttcatttgcctctcgaataatctcttcgataatagattccttcttcaaggtttccctgcacattatgcttccaattgaaaagggactcagccttctctccgctcctttcttcagaagcatggttgagattcgaaggtttcgagcacactcgggcgggagctcccacccgtgagacttgagaagttcaatatctcgcttggcatctagtgatttgatgtagtcgattgtgccctcagaataaggtttgcgagcttgtggccagtagagccagtcaaaggtgcaatcttcaaactgcagttaacacaaatgtgaatggcaagcctaaaagctctaattaacacataatgtgaatctaaacacttttctaatttggataaatagtgatgaattaggttgtatagagtgcaatccctattgaaaacttgcatttgggcagctgtatttgatgaccaaatatacaaggaatctatacatatctcaaacttaattatcaaagcagttacagagagacatgcccataatttctgaagtgtaatcttcaatctaccaacattagtggcttaactgaacaaatagttgtgaaagtaaattagattttataaacaatatgcaaggattaataatgtcacgaaacaaattagactatacagagtgcaatcctaattccttttggaaaagaaaaatatatataaacttgatctctcaacttaataatcaaagcacaatataagcaa

SEQ ID NO: 107310 - DNA, 1204 bp, Cannabis sativa
  modified_base (1060)..(1069): a, c, t, g, unknown or other
ccggtataactaatccctgccataatcctattggcaggtaaagacaaaactgttacgcgccaattagaaaaaaatgtgcaaatttttaatcgttacatatctgcgctggtaaaaattattttcctcgtcaatggacggatttaggcatcttttaacgtcgacgttgaatttttttctagtgcgaaaactcaccggtaaaagaaactttagttggcactattggctattgcaccggaaaaaattgttttaccgactgagcattgcagccaaattttttcaacgcgttgtgtctagttttgctggcacaaatatgcgccgacaaaacccttcttgtagtgttttttaaattaatgttttcacttagtgatttagcaaaaaataaaataaaataaagtaaaatatattttaaatattacgacaaaacaaataaaacaaaagatatatgaaattttattaagtaaaattattacacaattttaaaaaaatatataaaagcaaactaaacgtgaaaaaaaaaacttaaaatatatatcttaagacaatttttaaaaactatgttaaatcaattctatttaataactattttaacatttacttttgaaattattttttttaaatatattaagactaaataaacaattttgttaggaaaatatgtatattctttatactaagatccttttggcatacctacttatatatagtcgggtgtaaatataaatgttttttttttttcgtttcaagaaaaatatatatatttttttctggtaattctacaatgcactcctttaaaagggatgtattgatccacccttaacttatttcggcatttagaaaaaaaaaattaatctattttttttttcatattgatgtacgttataactatttaagatatatcctataaaattttaagaaatttggaataatttacaatatagaatacaatgttcaaacagtcgattttacacgcgtataaaataaaatagtcacgcgtgcaatacaatgtttgaacatagttttcagcgtgttaaacttttccaaatttcttaaaattttgcannnnnnnnnnaataactataacatacatgaccatgagaaaaaatttaactgaaaaattatttcggatgctaaaacaaataagggtacaccaatatattcattttaaggttgtgcatagtagaattttcttatttttttttttttt

SEQ ID NO: 107311 - DNA, 2626 bp, Cannabis sativa
  modified_base (2590)..(2599): a, c, t, g, unknown or other
atattgattaagactgctgttatatttgaccatcaatttaaaccttttaggaagagattaagaaaaataaaagaagctaagctagttttctttattcccattattactcaccatcttattcattaaattttttttgtgtgttgtcacacctttagggaaaaagataaaaaagaattggattttgatttttgatagagcttcttttctagtgtatatttacatatatttattagaatttaaatatatacttagttttagttctgattggtacatatacgaaagcagtagttaactaataataaggaatattttttaaaaaaagtttcttcaattaattacgcctttcaagataagattggtatttaaaaggatttcaagaattaaaaaaggtcatttcaaaaaaaaaaaaaagaagatcaaatcacttgttttaactaatatatataatatatagtgagtataggtcaatgtattttacttaaaagaagaacaatttattttgttcaccttttctatgaaaggattccattcacaaaataatagaaatttatatcactaaattttaggaaacagacttatcaaaattccatatataaataaaaaaattgtttaaaacaacccaaaaaaattatttattgtatttcctgaagaacgaacgtatttataaataaaaatatttaaaatgtaaatatatataaaaaaaaaatctgtataattatatttttataatttattttaaaattttgatttatgactaaattatatacccacataattaaattatatatacaaatttgatataaatcaactacttaaatcgacaaattaatatgaaaagtatttaaaattaagttgcaaaattgtacgttagtgaaattgaaatattgtcaattacaaaaataactaatttccctactaactaagtataactaagaagaatcctagccttgcctttatttaggttcaccttaaaatatacatataattgtgtatacgaaacacaaataatcaatgacttacgaccaattaacacataacataatccaaaaaaaaaaaaataagagatctcaaaattcaaataataaattaaataataagacagaaaagagtaacatcaaatttaacgagttcgagccatgtgcaatactttacatctcggtcagaaaaatagcactcatatctttattgatatcagtgtttacaagattacaagagtcttcacaaactctcagagattacgagaaaatatttttctctctagtttagactctttctctctctctcaaccttatactatcagaattttcactcaagcaataatagtctgattcatatagattacaagaattgatagttatttatagatttacattgttgtctaaattatctctgagaatatcttggctcatttatacaaccttaaatgatccagctcatctctagcaacaataatccttgtcagctttgatgaacacgcttttagtataaaccatccgggaactataatactcacaagtcgtctggatttgtacaagttcctctttccagacgaataagcaagactgacagtaagctatctagaattaatctccgaagtaataacaagctaccttgagtgacagtacatcgcggtacaagctaatctagaaccaccctctggtttctacaaagtcttccgcacaagactttccgaattcacaccaagcttctcgtatctactctctaaattcacaactttctttccaaatgacaaaacttgtaaccataatcaacaaatctccaccttggtttcaagttgaagtcgcttgacaaatcattgttataaatactgttgttccccttagcctctccaagctcaacttactccaatcagcttcaggcagtgctcaaacttaccactcgacactaccttggtcataatgtcagaaggattgtttttagttggaacccttggcaatcttcacagtttctttctccaaaacctctcatatgaagtgaagtttcatatcaatgtgcttagttcgttcatggtacacacaattcttgattaattgaattgcacttatcacaatggacagtaataatcttctggttgagtttcaactcttctatcaactcagttaaccacagtgcttccttgatcgctttcgtcagggacatatattctgcttcagtcgacagtgccacaatcttctgaaggttcgctttttaattaatagttgtttcgaacatagtaaacacacattcggttaaagactttcatgtatcaatacaccctgcataatcatagtccacataactattaataatttttataattcaaaataatattataaataaaagctacatcactagcaattttgccgcctataaatgactacaactcgtcactctaattaggggtgtgcataaatcgatcaaatacaatgagaatcgaccgatccaattacaaccgacagccaaacattgaatatccaattgtgatcggatcggattggatgttatttttaaatatccaattgaatgtattggatatttttaaatatccaatacatccaacatccttgtattttcatttagtttggatgannnnnnnnnntttatattgttatacgtcaaatctata

SEQ ID NO: 107312 - DNA, 2138 bp, Cannabis sativa
aaaaaaaaaaaaaacctttcttttttatatttgattcttccattgaaaatggttttaagaattttcagttgggtagttgtacatggttcacatttgtcatcttttcattttcaaaacttacattttgtgtgtagttactcttatttaatgaatttatacaatatactcacacagtcacacatagaatattaatggcttgcattgcatggaagatgaatctcaatgtgaatattatatgtttatgtacatatttatatgtaaagtataaaataatttcctcaaaaaaaaaaagtataaaataattaaattcaaatttaattaatttgaaccaattataaataagaataatctctaatttataatttgttatacattttttaagtctacattaaaaaaaaatatacctttgtacaagaataattaaatttttatatattttataaaattatttttatagatttaataattctattctaaatagtaatacatgcataaatattatatttactcaaaaataactctattattctataatattaatgattgtttattgtttgttgttacattaatatttttttgtgtgttaattttttttctagtgtaactttatttaattataacctcttaattagaatataatttgcttattgtaagtatattcttagatagaggttctcctgtatatatatagatactaggtattagtatcatgcatgtttatttaaagttgtattagattactaacctaattatttatttaaataataataataaaaaaaataaatctaatacaattcttatattttttaaatatataaatatagttttaaatttatttataaaaaaatatatctaactaattttattaaataataaaataaataaataaatttagatattttaaacaatacaactaatatatttgatataaagtataactaattaattgaattaacatctaacttaaatttaaattaagatttatataaaaatataattatctatttttttgatatttttaaatgattatttaaattatattttaataaataaattaaatttagatttttaaaattattttaaaaataataattaattaattgataatcggttaacaaaaataataaaaaaaaccattaaaccaacaatttttgttggatatctacatttaatataagagatatacaatataatagagataagtttaaaaaataataataataatatatttagataagtgcagtgaatttaaatttgaatcacaatattagatatttttaggtatgtaaatatatttaaatttaaatcacaatgtttaaaaaataataaaaaaatatatttattattatataatcacatttaatataatagagatataaaaaaataaaaataaaatgttccattaggctttctcttttcaacggctctcaacggctctagttataccttaaaattaatcatctatttataataacagtaattattacttccaaattattttcttctaattaattattttacatgggaccaaactaattgtattctcaatttctaatttagaggttataaatttcaaactttaattaagaagttataaataagtaggtagattacatttatacactcgggttggattttttagcacgccacgaaatcggtacgagcatgggatacgagtacgacacaatacgaaaaaatatgagcttaggcggttaggcctagcacgacacgaataaataaaggcccatgcacaacacgaaaatatgagcttgagcacgatacgacacaacaaacacgaaagcacaacacgagaatacgaattttatagcacgaaagcacggacaaaataaaagacgaataaaaattcataaaataattttttatttaataattcatctactctttcgtataaaaatgctttatttatatattttaagactatattttttaaaaaattaaattattttaatacatataatatatatttgttaaaatattctttgtcaggcgaaagttttaaattatattggcacattttataaatcagtgataatagttggcacattttgatatgttaaatatttttttttattatgttgaatattattgacaactttatgtgaaaaattattaataga

SEQ ID NO: 107313 - DNA, 3045 bp, Cannabis sativa
ccaataaccgatccaatccaattagaatcgaacttttagcatccaatctaattgtaattggatatcaaattcttttgtaattggattagattagatcggtttggttcaattggattggattggatgttgtccacccttacctggcccattgttctgcacgactctacttcgcggatcgattggttggcctagccctggggcttgggcgtccctttctttctattgggattagtcaactgtgtttatgttattctatggagtattgtttgtgggtcttcgcggatgggcacctattacacccttatgtaagggtttatttaccaaaaaatctataaaaatatttttgattatgaataagagttgaacattttgatatatggatgaatgttaagttattaatatttaatattgaataatttatatataaatataagaatattcattattcatacatgaggttgcgacttttattgtgcagagaattaagatcacttagccatgaattaaacagtcagtaacatattaaactttaggaatctttaattaatagttactagtgcggtttactgatgccccttatttggtgcaagtaatctcgatttagatcactgatgtagcatgatatctaagtgaagattttgtatataatagagattatgtatgacaatggtagatcggccaaaatcctgagtaatcaaacatgtcacttactataaagacataattcatatcataatgataatcagtggtagatcggccaaaatcctgagtaatcatgaactcatgtgcatgttattagtttctttgattcgcccgttaaagtttctccgggaagataattgatacaacttctgttttggaaatctaatactatagatggctgggaacatgatctacatttgtagaatcctgagtttcctaacagacccaatgttggttcctttatgtgttaattttggagctgaaaaattacccgcaaatttagattggatctaaattatactttcactagtaaattggcgaaactaaaggataaagaagttattagaagggtaaaaaggtaattgactaaaactaattacaaatcgacacaagaagactaatcactggaattggatcaatggacactgtagtaaaacttaataaatataattctataattactaagagtctaattccatatttataatggatcagtaatcatggaattaataaacaagattatttagttgatgatatttaatatataatctagtttattggagcttaaagttataggtccatggtccccaaatcaccactttgaaacactgtcaaggggagggataaaagttgtatatgaaagttcaaaaaaatctattttgaattgtcaaaatagtaattatttatattgtaataaataatttattttcaaattaattaaattgagaaaagataaaagttgccaagacaaaagacacatcccttgttttaattaaaatagagggaggtgccacatgcgctacctatatagggtgtccctaatagttttttcttttggagttaattaattcaaaatataaatatttagattttaaaaatagttgagatactctctcaagtagttgagagatttcctcaatcgtttatagaatataaatatctataatagaattcagttatattatttatttaaataataatatgattgaataaagggatttgaatttaaataattaatcaaataaaatctttattgagtttatttcatataccgtataaactgaaattctatatattttttgaaacagaagaatttatacgtaactttctgaaagcctaaaaatgattaaccagtaaacttttttatctccatcactaaaacaaggttgttcttactcatgtgttaagaatatagtaacttcataaacactattatcctactagcccacactagtccttgtgtgttgtggaagatatggaagattaaggtgtgagttttgtcattaccgttccaagaatacaatatagaaaaagactcgaggataccctgataggatttaagagataaatattattttcatttatttactttcagtttaatatgtatacatatagtgatcttgggcatatgatacaatgataatcaataatactccttctgttgtgtacctaatttagtaccataataccaacaccttccctttgtcatttgttgttgcagagggcctagctccaagatggtcaaaattcttagtaagagagttttgtcggggagttggcctgagcttgtagtcgtgccaaggcttcttgcatctgacgcaaaacttcttcctacttagctaatgtacctcctttgggtatttgcaagctcccgctggagtcgaattacttcgggatcttgctcatagtattattcttcataatcttggttgtggttttttgttgtggtcatccttagggtcatctttatgatgttcatgctcatcctcatcgatgggattttcagcgactcgctctccgcaatggtaatcttcttggtgcagatagttgcccacctccaacgtttcccccatccctcgcaacacccacttgagcattcatcgggggagctagttctcgcgatcattggcggcattgtccctaccatatcgagtaggcggcttgaacattgcctttcgggttgcaaccatcgttgtagatgacaactatggtaattttattgagttttttagaaaccgattatgaaataaaataagcttaagaaggaaataaattaaagaagaagagagatttttacgtggttcgagtgttaatgaactctagtgcacgatcaatattattgagctagaaaagcttcaaagtgtctttacacaagtgttttttccctagacgaagaaccttaattctttgctcttgatctcagaaatcgatttccaactaatccctttgcacaaagggatcttgttctatttataggatagaaccgagtgtagataaacccagacccagtagggtttttcagtgtcaattaggctcaccgatggggtaaaatacaatatatat

SEQ ID NO: 107314 - DNA, 1310 bp, Cannabis sativa
  modified_base (31)..(41): a, c, t, g, unknown or other
  modified_base (1064)..(1064): a, c, t, g, unknown or other
aactattttagaaacccaaactgtaaatttnnnnnnnnnnnaaaattaaaaaaacagtatatggagtaattccccttttttaaatcatatatattttattatttttttctaataaaatttcacattattttttattttaatttctttttgttataatgtttgaaatataatttatttttgtttgataagtatattttttaagaatatgaattaaaagaaaaaaattgaaaaaaactaatataattaaaaatatatattacgtaaaataaaatttattaaaattaagtatatttataaattttcaaagtataaataaaattcctctattttttttattaataactaggtgaaaaactcgtgcaaagcatcgaatccatatcgatctgctaaaaaaattaaaaaattatagaacaatacatgtattttaattgattattagtgttctttttttaaatattaggatttaaatttaaaccctacacatatttaaaacatatcttttgttattattttaaaaaaataatacaaaaaatgtttacaatatttttaaagaacaaaaaagaaaaaattacatgtaatcatttttcatttataataattaacacgctcatcgctattcttttttaactttaatcatttataataataatatttttcatttattttattttacattactttaatcatttttaactttatatatacatgaaatatttttttaataagtattactggttattaaataaatttatttataaatattaattttaaaaatatgaaattattaaattttaattcaaaaacgaataataaaataaaatttttaatatatatacttaatttaattacttaattaaaaaaatattaattttttttttttttacactttatcaaaaacatgtttatatacaaaatatttaagttaaattcaatacatttttatcttttttaccgaaaaaaactttttctagtagtacccatctatttatggataatacccattaaaaatacagtattatatactagatagatgttacgtgtcaagtcacgtatgttaattttantttagtttttagttttttttaatatcacaattttaaaattaataatattcaatgtagtgataatcattgaaatttgaaagcataataataatttaaataaaaacaaaaattactattttgtaatagtaattaaaaaaatgattattcgccaaatttatcttcgcaattaatgaaaatgctcatctggttaaactatcaaaatattcaaatttaatttaaaataatatttaaaatttaactaatttt

SEQ ID NO: 107315 - DNA, 1426 bp, Cannabis sativa
aaaaaaaaaagattaaagattaaaatgtgagaagtataaaaaatttatgtggcaaaagataatttaagtaataaatagtgtaaaatgtgtatttctctacaaattttaaaatagaatatttacttatataacactatgttttgagatcacttaggcaaaatgatcgctccaatgcttagaagaaagaattcataaaagataataatttagaagagggttttggttcataatttgactttttatgcatatggtgggttaaaattaataaccaaaacttaaactaccgaatattggtggaatatgttaatttttatgtacacctcaaaataccctcttcatttcaaaactttctaacttctctttattttcctcttgctcgttcattctctttccctttcactagttctcactgaaatatctaccgaaatcccattacatgatccaagaccgcgaccaccaagaccatcaccaccatccaattgagatcacgccaatttgatcgaccgagagtgctccatttcaatccgacctcaccaatcccttcctcaaccacgaatggaaataccacttccactaacgaagaccacaaacatagactatgaacggagagaacacgagcgaagatgttctctataattttctatttttttctttttttgagtgggtccgatataggcccaatataagttcgatagggggttctaaaattttagtttttgaggttcatggtgaaggttcgataggggtctgataatgattcgatgacagtctgatgtttgttaactgattcgtgaacgtatttcgtgtctaatgggggtctgacactatccgaatgggggtctgatggggtatggatgtattgattcgaataatgttggacccccatttggatagtgttagacccttagtgtacacgaaatacgcccacgaatcagtttgtaagcatcagaccaccataaatctatatcggacataaaaagcctaccaatctattactaagcatcggaccaccaccgaacctacatcagaccttctccatcaacctcaaaaaagtaaattttggaacctactatcgaacatatatcagggctatatcggacaccattggaccaactcggaaaaatgaaaaaaaaaaactaaaaaatttccacagaatgtcagattggtgtggctcgtggtttgcgtttgtggtctttgttcgtggtctgcatttgtggtctcccttcgagcaggtggctctccattcgtgtttgaggaaggagattggcgtaagctcagacggattgtaatggagtcgagagggttggtccgattagttttttagtgggtcgagtggtgttggatggtggcgatagtcttggatggtggcggtggtcgttgcagttcggttctcttgaagagatcgaggtgaatggagggagagaga

SEQ ID NO: 107316 - DNA, 4495 bp, Cannabis sativa
ggcattgtccagaggctggccggccaagggtgggcggccaacttatgtgaggaagctggtcttgtgttcgatgctcgtttgagtggcggggtctctgttttctcagttactgactttgtcttcataccagtgagttgtattgccatgtggcactaattctgtccatgtaagcactaccacgttaggaggacaaaacatgggataccagttaccacccaagtccctgtgcggacgtttgtatggatagggactttccctgctatgttggtgtggtcagggctacagtagcctttgctgaataaaatttcttacgttcttagtcctttaaaacattttaccttgactgtcttatcttgttgctgttcaaaaataactattttagttgtatttttgttgtgtaggtgaagtaattgaagaaaggagcccacatgcactacataagtgctttttggagggaaaacctttttcacttctcactttttattttgcattttctctcactagaaatttgcattagaaaaatctcctccttctctttagagggccgaactcaccagcatcatcttcccaggatttttgcaccgtttcaacgatctaagcttcccaccttcttcctcaacgacatcatgtagtgggtaagctttctattcccgctatttcacttgatttggttgattttgccattgatgcatgaacactattccttagtttgaagatgttttgattcttactttagatttttatccttcggtattttgatatgtgtgaaagccttaggatacataatgtatgatttctagacaaaaaagatctgaatctgaccttcgttgtgataattggctctttaagtcacgaagaacatgtttgagttcttgaaaaaacatgacttctaatccatgaagatcttcgtcggccaaggagctcttgttcaagacttggccggccaagggaggctatcaaggggcctagccgaccaaggggttgtacccctaggctggtcgacctatgcctggaattatggttccttgctagacactagactaggtcctggcatctggccagccactaaggcctggaacccttgccgaccaaggccaaggctccaagtgggcagccagtttttctctctcttttgaccacgactagggtcttgtgacagtcttggaggcatatacaactgtggccttatgcatggtttcacttggaaactttatataaggctaggtagtgaaaccattatagttaattatacaacttaagaattgcaatatgtcttagttagtgttcttaagacggtacttgatcgatgattgaccttctacattgtgttttgcctggaaggaacctttgggtactgttgacttgaatttgtttgtagctttatcaagttgctcacctccctttatttcttccatgtaggtagcaccaggtgttgactaggggaggtgacagccgtgtaggtccctcatttacttcatatttatggccaaaatgagacagaccctccgtagggcacctccatatgaccatcatgtggctagggtggccacaaggggtcaagttaagattgtggaggagattgctcagcccagtgctaatgttgagccagagattgaccaaggggtcgagagtcctaatactaaatctaatcttgaggaggccgcaccggcgaagaggaggaggtacaggacttgttctgtcctcccaaattgtccattgggtcactgtgaggccaatggtaacccactgaacaggcttggtgagccttcaaagcttggagtagatcatgtaacagagcaatctttcgagctggagatactagatgcgagatcacagggagatagttgggtctctactgcttctactctttttgatgaggcctttagcaagatccttactagtggcttagtgaggggtttccattgtcagattcctcatttaaattattgggtgcactggctccctttgggttggttggcgtgatctaagcgccacattgagaatggggtagcatttccatttcgttagtgttttctggacatcgcttcttactttggtatgtgtcctgcacaactcacgcgaaaaagcatcaagtacctttcaatgatgcttgtcatatatagggagctagggtggcctcaacctaccccgtacgagatcgaatactactttgttctgaagtctgccccgaagtagaacaggactgggtatttttatttatgttagattggtcacctatggttgggtgacactaattgtgcaacaccatgttgagaaggtcggggtgtgggtacgccaagaagtactttactgcctatggcctccgtaggatcgggcactacaaattctgactagtgctactcttcagatgctctatccttactttgtaaatagggcaaaccacatcctatctctctcgctagagcagagaaatataatccagttgaccaatgtggaaaattcctggaagtatggcttatatcctcctactcttagagttgcggaagtctcggtggtagagggtgacttagctgttgaggtgcctttatctcacatcttgtagaatctagagaagaaggaaaagactctccgccggtgcctagcctggccaacgaggatccagttggtgatgcttctctctggatcaggcctagaggccagccttttaagggacctacttgccccatgcatatatctagaggtaagggtaaggaaattttcaaggactctgatagttcctcttctgatgatgatggtatttgatagttgataacaccatactcttatcttgtattgaatgtttatgattgctttctgacttttctactttcttttactgatatgtctttcaggctgagaggtctgactcggggaccttcaaatgagcccacggggtgagtaaaggccaaggtcgctaggacttctcatggtggagatgttgttaggtcgtcactgcctccccctctgctagggcctgcaccagctgggtagcttgtggtacggcttgctgattaggctacttggaggaccgatagaggaacagggtcagttgttgggtagagggctactgaggtagccgcagaaatatagagagagctttccccttcatggatgaggatctaaaggagcttggtgatggcgagccagataagctctactctactggtatttgggatctttctctggtaagttgtactcttagctttgttcaccttcttggcactgtgtaggctggctagccctaaggtttgttgcatgtgtctggccgaccttggatgtatcggtgaagggctggtctgccataaaagtcccaaggggggactggccggccaatgttgtggctttaatactattattgttctgttttgttattaagccttgataaagctgagctcaacacatgatggctcacagggatcctcggatgctctttaagagcaggtgaagacattggaggttcccttgtggtgaaagacaaagccatacctgagttggagattctcctagaagagagacagagaatggtttctggcttagagactatgcttggtgctagaaacatagagaacacgacaaaagctgccatcatcatcgagcaaaagtctgaccttcatgatcacaaggagaaactgagggaggctcttaatggccagcagaccattggggttgtcctccaaacttacttatgagttcaagttacctgatacacgtgctagtctctcatacatgggcatcaggcttttgtggagagaacattggcccatggaaaggcattttttgagagctagatggaggtagaccaagtcactacctatcaagaggagtcatcattagagactcatgatgaggggttggccgacccacctgtggaggaggtggtcagccaagatacagaccaccaggttggctagcatgttgatgctagggttggcctaaactctagcaatcctaatctcgtgccttcaaattcagctcctcttgcccctacacacatttagatagtatttctattagtaatattcaacattatgtttgtataagatagactgttgacctcacttctcgccaacaagagtgagtcaaaataaagtgattacataaaataaatgaaagaaagcaaaaatagtaaagtaaaaagagcaccggattttaaagaagttttaccccgtgagaatgttaatagcctactccccttgtattttattgacttgagagaacgaataaagtgttcttcctctctaaagctcttataatggatctctgagttattttctctcttagatcactattctctcttgagtgtgtttctagattaattcttttgtcccccataatagtgagattatgccactatttataagggcttaatacatgaagaatgctttcccttaatctataatgaataaaataggaaactacattaattctataattacaatgtaaagaataggaaactaaggtatctttcctttattttctgactcaatcccacaat

SEQ ID NO: 107317 - DNA, 1405 bp, Cannabis sativa
  modified_base (95)..(103): a, c, t, g, unknown or other
aaaggttattagattattaccttattaattttttttagttcccatcaatgggtattacccattaagaagtctttccatatatatatatatatatnnnnnnnnngagagagagagagagagattttgtctatggtgaggaaagaaaaagaaaagagctttttttccaaacaattgattgaaaggataatgtgcagtaaaggccttcaccaaacccttatatttatagatagcttattttctcctctctctttattatttaattaaataaatttcaaaaataaaggatatttttacccttggatcaaagtatacagagcttatgctcttcttggactttttcaatttaagtctagttgactctaaattgacctttttatttacttttatttaacttatataactataccatattacattagttgagagataactatgtaaaatacaatgcccaagccaaaaacactatagtgatcacactcattgtatttccatttatttcaattaaatagtcaaactgtcttttaattaaaatactaattttttggttaatcagaaaattatattgatcacaaaaattaaacaagataaaattacttacaaagttttagataaagcttccacccactctctatctttactaatcaaattattaggagtcaaagacatcaatctaagaaaaatattatgaataatacaattaaaagtgaccttaacagtaggaatttttttatcccaaagcacagtgtttctaggatgccaatgtgatagatcatggttgtaaagacactcaaaagaacgattcttttacctcttcaggctttaaatttctgaatccattcaaggcctttatcataatctcttttctgggtagagattatagcccaacgtcaaatcttttgaaccaccataatgctataaatacaatcaaagaagaggtaagaatggctctccacaccacttccacacaataaacacaagaaagagttggtataaccaagtcgacaaaattggtcaaaagtcgacagttgattcttcaaagctaaccaacttataaacctgtattttggagtaaaaaatctatcctaactacaatcataatgccatctatcaccatttccttgagccatcttcttacaaaaatcaaatatggaaaattgatacttccagaagtcctcaagatgcttaatcctttccttgcactactacaaaaaccccctttagaggcggtttttaagccctttcagcgtcggtagtcgccataggggtagatatggcgtcggtttttctaaaataaccgactccataggggtttcctaaaatttttttcagctttaatttatatatttttttttacatttataaaaatctaaatttatttttgtaatattaattaaattaaattaaa

SEQ ID NO: 107318 - DNA, 2409 bp, Cannabis sativa
  modified_base (1839)..(1840): a, c, t, g, unknown or other
tgaaatattatacagctgcatgcttattgtatcatgcatgctagcttcacatcgtgtattacttttatatcagaaaatactattaaaattgttattattattattatcgatatatatttataaatatatttatatacacagatacaaataccaatactgagtgtctgtgtctaccttgagctattcttcatcatttttctgttctttaagtgcatgttttaccgtatatatatgggttttccttcagaaaacaaaatttaggttccatctcaaaatgctatgactttccaagtgagtggagtaacccaaatcgtttttgtttctatattatgtataattcattgccaatatatatatggagcaatttactaatatattttattattattgaacaatgtttttaatgtgtcacataataaggggctaatatacagtacgtaaaacaacaagcatcggaatattgagaaaggaagcaaaaaaaaaaataaagacaaaatgacgtgtaaaagtaaaatatctatatccgttttaatcgattaatttcacttcttattcttagatgactactaatccacaaatagtttcgagaataaatatatattaaattaatatttaagtttttttttttaattttttaatcacaaaaataaagtaaaatttgtattttgaaaaacaaaaatagttcctataagattttatttttttttttttgaatagagcactttgattttttaatttaaacagaaaacaaaagactatttaataactttcaccacaacaaatgagctttttagctttgtcctctcgctaattcatagtcgctattactgaaaaaaaaattgtcatgcctaatgctcatctattgcgaggactttgtctaagctgaatatttttttagttatcgccactttttggcatgattttgtttagcatatgcatttttagagaggacaataagtccttgctaaagtttttttgtatatgtatagagaggaaaaagtccttgctataaaaaggcactaattcttttttttttttttgtttttagagaggaaaaagtccttataaaaagtatacatatttttataaacattcatttagagcggacactgtccttgctaaatgctgcagacaactttatctttttttcccttgttttctattcaagctatttgctttatactttagttatagttcattaactaaaattaattatacatacaaaaaaactatttaaacgttataatgtaaacatacaattgtagttaacaaaatatgaaaagtaaatctctcaaaataaaaacaaacttgaacatcttaattttctcctccatgtctatcaaaataaaaacaaacatcaacagttatgcatctcctaaattttcttcttattctattagaatattagaaattgatatttctcattacccaataaaatgggaaaaatggtatttatacaaagtggcaaatacctaaagacaaagcctaaaataaaaacccaatataaaagcccaatcctattacaccccctcaagatgaagtgtacaaattataaaacttcatcttggatacaagagattgaaattgattggaaaataaaggtttagttaagatatcggcaatgttgtcctttgtagaaacatgtaggagtttgagacggccttgatggagcttttccctcacaatgtgacaatcaatatcaatgtgtttcgtgcgctcatggaaaaccggattttcggagatgtgtatagcggcggtattgtcacaatataagacaggtggactggtgtaaagaccgcttaatttaaatttggaaactagcagataattagggtttanntatgaaaattatttattgatattaaaataattgtttatgatgatttatttgaattcaaaacgcatttaatatgtcatatatagaaatttcgtatttttgcattttcggtgtccggcaacattggaacacggtgtatggctcagtagaatcacatcttggtattttatatagcggggcggtatagttagacattggaaatgtcgggattggtcgggaatttagaatttcccaaaatacccctttgtgacctttagtggctattagtatgggagggcaaaattgtcattttgccaagccttagtttgtcttttgtgattttctagttaatgttaaaatctgattttaaagtttaattaattggttttatttgattaaaacaaaggacatttgtctcattttcaaggaaaaactaagttaaagaaaaatcacatttttctctcaatctcactctctctttcggcccccccctccctttgagcagcaagggtttggtgttttcctttaaaattcaagctgttttctcaaggttttagtaagctcaagttcttggtaagctttttgtaacttgt

SEQ ID NO: 107319 - DNA, 1207 bp, Cannabis sativa
aagttcagggggcaaaaatcctaattagccttatatgcttcattcccaccattttaatgagcaccaccatcactattacaacacctaaaaaccatcaccacaacaactaccacaccgccacccactactacgacggtcccaccaccacccaccaccacaatgtatttcaaacaatctcaatcttagatttaaacacaaaatacaaactgaaacgggaattgaaaaataatatgagatcctacttccattaacttgataacaaaaaaaaaaaaacaaagaaacaaatagaaaaagaagaaaaaaattactaaacctaaatctaaacctctttcctctcttatgcttccatcaacttgtacacgcttctacctaagtaggcccgaccgtttcttggcattggcgagcaaacgaaagccacgaacgacttctctatcctcgaaatcccatcttcgagaactcccaaagctttattcctctctcattcttccctttctcaatgcaattctccatcaagaattgaatggggcaccactacttccccaaggtccagaaatctcaatcccatctctttcccgtgatttgccatccccgaaagtcctccaccttcacctgtacgaggagatctgaagagggagagaggacgaaagaaagaattagatttagatttagggtttattattttagatttagtttgttgaattttctttttaatttgttgaaattctatttttatgattattgaattaattattcaaattaaataattaattactttcctgttattgagatatattttttttttgaaattaaactcttattaacaacaaccaagagtttaatacatatcaataagaaaagaagaataatcttcaatctaagctaattcactatccaccctaagtgtatgcacaactaattcatgagaaacgaacatgaactagggatgccttaagaaaattggaaagcaaactaacaaaaaaatctataaaaacctagctcatttgaaaagaaagagtgctattgaataacagaaaccaaagctaaataaataaactcaacataacaaagagaaataacgtgtaaaaccaatccatcactatcattaagactgaagcttcagcttgaatgattaagaagtaaccaatgagttcagatcttctgcaatatgtgaacttttcgtgtgttgaagtatagataaacaacctac

SEQ ID NO: 107320 - DNA, 649 bp, Cannabis sativa
ttaccaatagtcgtttactaatcacaaagcatcacttcttattaacattaggtaccactagtacctaataagaaaattttaataaaattattagtaacttcacacatgaaaagaaaaaacacttacaagagtgtttgatttatttaaaaaaaaaaaagtatatgggaaaattagattatttataaaagaattattgttgaaatttttagaaactgattataagaagtattaagctaaagaagaagtaaaatataaataaacacaattttttttcttacgtggttggaatcttaatccatgtgttaatattagtatattgttaatggtgtcttttacacaatttttgacagagttttctctctgtaaatacaagatttttgatcccctttaataatgaaggtgatgctatatttgtaggcaaccatgcatagtgagttgggttaatcaaggccaatagggtttttctagaatttgagcccactgatggggtattaacattttgtgtgagattgggtctaaggtttaaggcctaatgccaaaagtggtaggtgtgggacactattgaatgtattgttgagagtttatgtgttagtatatgtgtggtctttggtgcatggagaaacgacaatgtcaaagtagtggtcgtttc

SEQ ID NO: 107321 - DNA, 1001 bp, Cannabis sativa
agtttgcgaactaggtagatgcggttagtgctgatttgtatggtaactgaatgggtgctcaattagaaatcatttatttatgttgtattacgtgtgctccagtagtggagattgtaaatagataaagtttttagttagtttgtgtaaatattccttgtatatatctaatcgcctaaatttagagggttatctatggaagatcagctcgctttttaattattattaaattttattataattacactataatatttttaaaatcttttgattagtaaaagtgagaacaataaataaaaaacttgccttagatattaggacattacaactgcaatatataataattatgatgatcataataaaagcatatccatagtggtcctataatacatttaattcatcaaagctttatttcattattcatgcatatccttacaaagagtggaagaatgatatctagctagctagggtagtggtcctataatatatttacgtctttcactatcaagacagaattgaacaactctcttacttacccaccactcatcagtatggaaagctaattaagtatgcagggatactgctcaatcagatcttgctatggcttcgatgacttactcggtaatcggacggacaactcagatcggagaaattcttaaagctagagttaaatgcagagtttgacctcggtattaattttctaatttttcatttaatattgattaaataggatattaatttaaattaattttaggatcttttccatttttacacttctaaacaattttttttttctatttttacgaaattctatatatagaaactcctattgcaactagcgctgcaacctaaattataacaaaaaaatcgtacagaaactgttatttttgctagcgctacaagcactttaaaaatccaaaccgcactacaagaaacgtcacttttgcgttagtaaaatagaattttcttgtgatgtgttggtaaaagggggttggcaaatcaat

SEQ ID NO: 107322 - DNA, 1490 bp, Cannabis sativa
ttttttttttttttttgaacaaagattttttaggtatgtatgtgcaataaaaaattctagataaaaattaatatttttatgtatgtatgtataagcataaaaggaaaaaaaaaaaaattggtcttttttaattatttgatagattacgttattctaaacaaacaaaccatgcaaataggacaaacatccaaaaaaaaatatttgaaaaacactcaactaatatcaaatctcttacatgctttgcttatgtatgaaaaaatgatcattttgttggaatgtacaatacaaaatatttaatctcaaacgtaaattcaagtggaagaatcgattaaattaatatttgactttctaagtcttattagtttggcctaaacacattaagaattgtttctagtttttaggtaattatatttttgaatatgaacatttcttgtacttcttatcacaggtatgtagttcataagtaaaggggatttaatcttaagctttttattttttttaatatattgaaaacagatgaggtcaaattcgatccgtaaaaaaattaggtggggtaaagcgaatctgatctgagatctgataagtattcgaatgttttgaatcagtaataatccgttgaatcagatgtccgatctgatacgaataaacgaatctttttgccatgcctactgattatgttatctgcttggatttcttttcctaaattcttagcctcctaagttgtttttctctctagccaggcctgtcagtcctccttaaatttagacgtggcttggtcagagtttcgctattacgattcgtcttatcggtgtgtcatgaatttttttaagttgatgtgatattaaattatatgatttctttaaaaaaaaattaagaacaaaatataaatatgaataattaaaaatatatatcactagaataaaaattattaaaataaatcaatatatttatttttcattcttctttatatggaaaagggggattctaacttaggacctttttattagaaaaagtgtagaaccatttacagtatgtgtataactactttattttttattcttcttagaaaatgaaaatgtactttttaattaaaataagaataacaaaaaagaaatatttaatatattatactctagatgagtacaagaaaatatatatttttatgttttaatatatatatatattaattaattaattgaaagaggtgatgagcaaaaacacaaagaaatttttaagagtcactcataattaaaaaggtgagcgttgctattaggtaccagtagtgcctatcatcttttcacatatcactttgtgattgattagcgatactctttaaaagttatcatattaaggctaaatactattttagaccctgtggtttgcaaaacttactgattggactatctgatttgttaaataataaaataaaccatgtattttctaaaatgataaaaataagaccttattcttaatttttgacaatttttttt

SEQ ID NO: 107323 - DNA, 894 bp, Cannabis sativa
taaaacaaaagtgccatatcaaagaaattttcttagaacaatttttcgggtgtaatcaagtgatactgttcagtggagaacgaatcgtatacagaatatgttttatcttggggatgtcgtagttgctagactgtcgtgcacgcttcgggcagagtcgtgaaatgtcttaaagagagcaacatagtccgcaacttaggtttatgcatgccttaagggtcacagttttatgcgtattggtgaggactcacacaccgaacaaccacctaggtgtcactttattttttaaagaaaaattatataattaaataaatatttttggattgaagaaagaatagggaagaagagagaacgataagtaggaaaaagaatagtctaataccatgttgagagaaacaaaaagatattgaaaaagaacaataagagtgattctcattacaactcactcaaaaggagagtcattagctcttatatactgagattagttagcaaaaagtaaatagtgaaattataacagaatttaactatctaacttactctatgaacaagcataaaactaacacattgacactcttatgtaacatttgttatgatataaatagggctgagcaaaaaatttaagaaattgaaaaaaattgagtacaccgaatgttcgaatattgaaaaaatcaataccgaaaaaattgaaaatcaaaaaaattatctttgcatggtcaattttagtgtcaatggcaaaccgaccgattaaaccgagaaccgattgaatgttatatactatacatatataatataattattttttgtacatatttaatatacaattttattaaactagtatatttatgtattatatacacaataatataagggaaaaaaacaaaaaaatacaaaaaagga

SEQ ID NO: 107324 - DNA, 3835 bp, Cannabis sativa
  modified_base (45)..(50): a, c, t, g, unknown or other
  modified_base (1950)..(1969): a, c, t, g, unknown or other
tataattagtcacaattttttcttttttagtcacaagttttgttnnnnnnaaaagtaaaaaaatttgtaatgtatattgatatggtgttgggaaaaatgcctaattatagcaatatgctctatataatatgagaaatgctaaaaggtacagtagtgcttagcaccctcctatgtgactatcgctattgatccaattaagtatctgtcctatatagtttaatgtaataacttttaaaaagtatcgctaattaaccaaccgcaagacgacatatgtaaaggtactaaactagtgcccaataacaatactaatataatataaacgcatactccaacaaagcaatatttcaaattattaatttagtgtgtctactctatctatacttgcagaaatttaagtccgtacgtagaattatcattatttacttcaaatttagaatgagaaaatatatattatataacaaatgtaaatataatttaggatattaatttatcattatattaaataaaatatatttagaaaaataatatacatattaaataaatttatagagtatacatgttgtaaatgcatacgatccatatttttttcctccttatttttttaaatatgagttatgtagtgtcgtgtcgtgaagtaatatatcgtgttatgtcatgccaatatttttaaaggtagaagacttgatattttcgtgtcgtgctcaaatttatgttatactttattgatcaggtcgacccatttttcttaaataggccaactaattttcttatatgggctcgatcggatttgtgctctactttcttacatttgtttaacaattaatgaactaattactatatgtataattttttaatttcaacaatattttataaataatcatataaataaaattattagaatttgaatactcaaattttcaagtcactacactttgcatataaattgatatatagttttagttttaaaatatctaataggtttaattatagagatatgatattttagtttttttattatattatttataattaataaatacatatttattattattaatataaaatttgttatggtgtcgtgctttcaagttagtttattcatgtttacatattgtgacatttaagttcacatttttagtgttgttatgctaatttgtgaaattatatcgtattatatcatacttaaatttatatttttttttctcgattgacatcgtatcaattttgtgcagcgtcaaaaaatctgcctcatcatatacttacaactatcaaagtggtggaacaatatataaaattataaaataatataaatagtaactaaataaatgaagagttcttgatggcatgataatactgtggataattggaaatttattgagatattgatccttaaaatttattgaacttaataaaataatgatactcatgctgggtccttgactctgcacaagaggaccaagaccaagacctagttgatagtaaattttccaccaagacactctacccaatcagatgttgacagctgttacccttatttaatagcacagttgaaattggacatatcaacacagtttgggaagtttcttggaaacctcttacataatgtgaacacttttggtgcagatattatggactctatacctccactcccatctagaacacctaattaataaacaataataatcccatctcaatctcattcatctttcggcttgtaattagaataattataattaatgtagtaattttgagatgagtaagaattgataggggaaaattaattaatatccttaatccttttattaatttggagttcttatccataatagtaattcacaatgattctaatggaaatatttgaagataattattgaggagaacaagcttatacccacttttaatgagatttccattaagaaaaaaagtttttaattttattattattattannnnnnnnnnnnnnnnnnnnattattattattatttctctcaagagatcttagggtttccaacatttttgttggttagaggacttgattattaactccgatatttctttatatttgtgcgactgttctttggacaaggttctatatcaggcgacattagtcatttgattgtctgttttgatacttttaaggtttttgaacttgaggacaaggtctcctactctgttttggaccattctaaattcattgatcgaatcagatttggcatttgagaatactcagcactaggttgattgtcaacttaggcactggacccagcactaggtcaacctgggcgctgggccccgtttccaagggcttaggtttgtagttttctccctcagtttgtttgaatcttcattatttttgaggaggaaaaaaatactcaacacgttttggtgaacttgattggaatcaatccaggttgacaatatgtcaacctgtgcgctaggtcccaattatggccctccagaaattttgtttggttccaaaaaatagttgaatcgtaatatttcctgaaaatagagaaaatgctgagaagatttctcagaaaatatcattgaaatcggcccaagttgacaaaatgtctacctgggcgttgggccagccctatgtgtcaatctaagcgttggtccttatttcttccctgaaattatctatttctttatttttgatgaagacaaagaagatgcaaaattcggatcgtcgatttgatacttggaagatgcactggggtgcctagacatcagggccccgggtgctcaaaaaatgaatttgctccgaatctgatcctgatatctcaaatatgtccgtggtatgtctagttggtatcccaatgcaaagtttgacccatttgcactaagacggtcccaaaaactaaaaccgtggttaggaatgttaacttgggcgctgggtgaaactttagttgcccaggttggcttccaagttgcaaattcgtgtaatttcagctccaaaaatttggattagattgcttcatgtcttcatggtatataatattgaaagatagtgagttggatttaagttattgaagtccgaacatccatcccggagctcccgaagtcaatctgggagcagggctagggtcccctcctaggtcgactgctatgactctagtctactcaactttgtgatctcatccttcttgctacgtgccaaacattgatatccacgttaccaggaaatttttttgagttaacaatcttatatatacttgtatttcatatattgtctaatatattatccactaaatacttatttttagagcataaatcctaataatcttttctttgatttttgatacagcaagtgttgtgtagatgacataaaatagtggctgggatggagaacatcatggcggcaagttaatgggctattaagatcgatttcaagagcgatctggtcaagttttaagaagcaaataattagtatggtgcagtggtgtaccacctttggagaaatagaaatgaagttttgtggtataataaagtattaacattatcctcaatgattaggtgtatagggcatgatgttaaaagtagattgcattttattttgccaaaagaatattaaaaattaatctctaaattgttgataattgaagataatatctgtctaaaaattgtagataacaaaaaataatgatactcatgggtggactttaatcttcctttgcttcgacagagacaatagtataatttttatattttgtattttttattctagcagggttcgcatataattggattgtccattttttcgttgataaatttaatttggtagtgtcgacaaagcagcagtgttcctgcaaatagttatttattttcattt

SEQ ID NO: 107325 - DNA, 1563 bp, Cannabis sativa
gatcacgaacatcattaatttttaacttattacttcccgatgagctactcacatctataactgtagcattccaacagtctggtagagaatagaaaaatattaatgctcataattctttttcaaatttgattccaaatgaattccattgggttgtgactatattgaatttatttagatgttgagctaccaatgtacctttcatcattcgcaaattgaataattgcctcatcaaatgaactttgtttgaggctaatgacttctcatacatattagagagtattgccataagagtagtcgatcgtggtcttttcctttgctatattgaaagcaacattttgtaagaaaacatcaattgaatagctttgaagggcctatctatcaagaagattccactcttcatctttcataccctctcgcttctttttttagagaggttgataaagctttttctggtataagtagtctttgatctacattttccaaaaacccaaaatctgtaccatttaatttatcgaattcacttttccttcgtctgcggccatcactctcacttaaatttaactttcgaatagaatttccaaccgagaatatcaatctaataccgattgttgggaaaattacgcaaatttttctataaattagattagagagaataaaataatagcagtaataacacacaaaaaaaattgataacaaattttggtggtgtctaagtcttctgcaaatctattactgaaactaaagagcaaaaatacacaaaatatttacaacacttttcacaacccacaccttaattatacctaagattttttctcacaaaaattatctcagaaccttttctttctctaagcttttaactaaagcccttcttcttcttcttcttcttttttttaaaaaaattttgggtatatataaattgaacatatgtgggtttacataggctttggaagaaataaaataggtggtgaaaattattcaatgattaagtaccttctattgaaatttacttaacttatagcattctttatttttaactaataaacttttagctaaaactagtttgtcttgtttccttaatataggtctgagtcttgggaaaaagtccgagatggaggtcgggtccgaggtccaagacttgggtctgggttcgattctaggttccaagtctagggctgaagtttgggtttaggtttggggtcaagttcgaggtttggggttcaggtacgggttcggatttgggttcgggtttgaatccgagttcggtctagggtccagggtcccggttttggactaagtctggttcccgaactctagactatttttaaatattataatacatgctaattaatatatagatcttttgttatatattaaaaaataattcgtattgtattaatatttatggttgtaataattaataaaatacaaaattttattcaaacacaatttattctttaatacaatacgacccttatatgtcttactaaaccagccattcgaggtgttgtttttttttttttgtgaatatattatttgcccagctgctttttaaaaaaattgtga

SEQ ID NO: 107326 - DNA, 2169 bp, Cannabis sativa
gcgccgtcccgctggcgtatccgagcaagctagcattcactacgtgtgctccggcggcagtgctcgccgtatgggttccgtgtccgtctctgtcccgaggtgacacgatctctttgccctgcttcacgaagcttccgccggatgccatctggaaacccttggcgaagcttcgagctccaatgagcttcttgttgcagagagatgaactgaaatctggaccggtttcgcactctccgcgccaccgtgacgggatctcaggcataccagtatcgtcaaagcttttggattcgggccacaccccagtatccaaaactccaacaatgacatcatgagaggcctggttaatatcctgagtactgagtccaccatcgacctctaaacccagaaactcaggggtccgagtagtgtgaagggtataaactgtatcttcgtatacacccaaaacgtcgtcagattggcggagtgactcagcttgttcaggatccaaagaggctgcgaatccagggtaagcgttggtgtaggagtaaagcagcgaatccgtgtccgaagaaagagaagataagctagcagagtaccattcctgacgagtgggataagcaagtggcttctcaggatttttcatgtgaacaatgtaggtttttttggccatggccaagtggccactttgtatgagtaacagagccacggtgcaaaacaagaacgtggccttcaaggccatggctataggttggttaaaagctttagtttcagagaataaattaaaaatgaagggaattgagaaattaaatggcgggatatgaaaaggttgaagaaggcgaaaaccgaaccagtcgctaatggctgcgactgtcagatggatataagaagaagaagaagactagtgtcgggtttatatcaagttgagatttaaaataaggagtttcttttagtaaaattacgtaaatgccattccttacatataaacaggaaaaagtgggagttaaattaacattacattaaacaaacgcgtttaggaataaattcatgtggggtttgaatatctggaaatgttggttcaattttcatgaaaacaaatcaaattgaaaaattaaaagtaatcaatagctgtatatattagattagattagaagtgaacagttaatgaattagaaaggttactttgtgtctaattgtttttatcacaaagaacaaaaggtgctttgataagaaaaaaacacttggagacactattacagctggatacacttcactcaatgggtccaccccattcttttttgcttattgaatcatcttccattccttaatgcccattccattcctaataaaatacactcattacttttgttttaataattacttttctcaagtgtactcactccctggaaaaatatattcaattatgttgcttctttcttattcataattttcttttctttagaaatatcacaatgtacttttcttttaccaaaattcatatcacgttacactttagaatttagaattgacaaaaaatgtttgccatatttgtgaccttatttatgtttcaaagcatgtaattaaaattaaacattgagaaatatgtcactttgttcaatgcaaattacgtatggatagagggtgttgaaaatgagggcagtattggaataaaataaaataaaaaagcagagcacaaaaatcaaggaagaagtggggttaatatttttgtcttatacgaagaatgaaatagactggtggtcgtggcatagactaaactgttaccaatcgtcattgtgcttagcaacccacaccatttctcaagggcacaaatttgtaacggctacttttaattttttggttttatcatctcaattatttttgtaaagaaaatggttcacactcaaactcactcaccctcctttaactgactatttttattttattttatttttgactgatcctccactttcttcatttcttttctcttaaaccgcaaaaatgactatacacgtttaaatcacgtagtcttctcagtttcaaaatggtatatacacttgtcaattaactgtgctcatattccattttcgtggtaatcttaccgttagcattacacattaaaaatacattttaatctcactttcatgactttcttcctgctccactatgatcattcaagataaacctactttaaaa

SEQ ID NO: 107327 - DNA, 1785 bp, Cannabis sativa
ttaaacaagaaagagtgttgtggtcgcacgtgtagtccataagagacagagtaatttcaacataaaagtgagagagtgagttttaaaaaacaaggggggccaaatgtgcggttgcatgaagcagtccagggcagtggcttacacatagacacagttatatagggtattgggtcgaaccccctgctaatggctccgaaggaaaaccaaaccgagtggacataaaatacaaaataaaacaataatatgaacatgggaattggtgtctaatattttttttagtattattttattattagtgtaattaaatatcaaataattttaaaaaaaataaaatattgctaactaatcatacagtattactctactagtaccaataacaatatatataatcatgcatggtctatatttggcttggctgccaccgtgctcgcctcgtgtccttaacaaagaccatatattctttccaattgaatctttcattttgttgggttgcgactgcgtataccatttcgattcgagtgtatataatagagtttgggacagtcaaatccttttaattattgttttatttgtacttaattttttaaacttaaattttagtagtaaaaatttttaaattcctgaattgttaacaaatgacatcaaattatctgttattatcgattatttatgtgtacacttttatgcagtattattatttcaaaatttattttaaaattaaataaaattttaaaaaaaaataaaatatttagaaaataaaaaatgttataaattgtgaaataatttttaaataaatattaaacacactaatataaacgtatcacgtgtacaaaagtacacacataagtaatttatgttagtaattaactgtaaaaaatagataatatcttaaatttattaacagttcaataatttaaaagattttactactaaagtttgaacttagaaagttaaatactagtggaatgatagttgagacttgagagggtctagcaacaaaatgtaagatataatatataagaaaatctctattgagtcccaaacaagttgtgcaatttttttctttttttatatttataaaattctctgtgtaaaaatttaaattaaatttggtatatgctaaaattttaattaaattttgcacaaaatataatatttaatgcacctatattattgacattcttgtcattttagtataatgacttgctttaaaatacttttttaattataatattattactattaatttttaaaaaatatatttaatgtatgattatcattattgataattatattttatgttaatttatatcttaatgcattgaaatataattacaaaatgtgtctcaaatttaatttatcacattaccatatgtataagaaaaatgtaattaaatagccctatttctaactttagtgataggtaatgtttctttttaaaataataaaacaaatgttattttttactttttaatatttaaaatacccttcattatataaaaggtattataaaaataccttagagtaatataaatataacatacaaatactataccttagagtaatatgagtattatgttctttttttattttttttttactgataggtattcttttaattttatttttatttctttccttcatgatatataatataatatacaaatattatatcttagattaatatgatataccacaacaattctattgtcaaaaaatatataaaaaaaacttaaataaacttccacaagttttttttttctctttctttcatgatataccata

SEQ ID NO: 107328 - DNA, 1274 bp, Cannabis sativa
acttaaagcataaaaacttttaagttattataagaagatgaagaaacaatagtcatatatgatcgaaccatttagaatacattaagagtaacattaatatgcttaataaatacagaaagactctcctctgacaataattctacaattagcatattgtttcatcccatttttgccttccaaatcgtctatgaatgagacacttagaataatataatcacgacaataataaaaatttaacaacataaaaatcccctgccatgttacgcattcactaaacaaaatctcatctacaatatcataacccctatcatctcatatatatgggcaatgaggatcaagcaaatgctttgaagttatcggatgcaaaagggtgtcatgaactttatagcacacacaaaaacaaaacaacaacaaaatgaaaatgatacaagcaagaaaacaaatgtaaatagattttatataaaaagaaaacatttctttaaaaaaaatgggatcactgaccttgcttgaaacacacggtgattctatgcagcacctaagatgagggatgattatcacagaagttgtcattaacaagcaaaagcttgataggacatttctaagattttccatatggctggctaatgtaatgcagcccaaaaaaaaaacaattattttttacagctctgctcaattttaagctcttgtcattaactagagagtgcggtcatgaaccctctcctccctctgcagcaggcgtgaagtcaaggtgcacaaatctggcgtgtattttggaattcagatttttgggctgaagatattgaaggaggagcttgatttttgagtatgttcactaaggacctacattaactccactcaactatatcaaaattgatgcatgcaaaaacgtctaaaatctaacaactacatctataaaaaatcaaacaacattttgtctattttattaacctaaacatctgttaatttcaactacaaataataataataaaaatatatatacaattttaagggtaaggcatttaatcaaattcgatcaaaactcacacgagcacatgacataggacatgataaaaatgtgttttatcatgaaattcagtaatttcatttcatgataaagcacatctttattattatgcttgtgctcctattagtcacccatagaaaaatcaagttaattatttttatttctatgacaaataactaaaatgcagacataaataagcattacaacatttctcatgcagaaaacctaccaaagtatcctctaactagag

SEQ ID NO: 107329 - DNA, 2259 bp, Cannabis sativa
  modified_base (50)..(73): a, c, t, g, unknown or other
ttataaaaaacacagtaaaaaagtaaaaaataccgcctggcagtattttnnnnnnnnnnnnnnnnnnnnnnnnataccatgtaaatttccctaaaataaaagataaatggactataaaactcctttatggccaaaatacatagtaggcccattgattgattttttccattttatttcaattaaatgaaacaatttattgtttttccaattttatcacttacccaatctaaactatctaaatgttattttttaaaatatttaatagttataaataattatcaaataaatttataagttaaatatatttattaattagacccacaaagtatcttaattaacaaataaatttttatttctctttttttctcaatttagcccaaacgtagtgaaattttttaaattcaacatagtcaatttttaaattttaattgattaaataaattaattgattgagtcaataagatgataatatctcaaataatgtgaggatcatgggcctatataatcaagctcctaataagttgatctaaatttttttgagtaaatttcttaacttattaatttctcatgactcctctatagaatcgaaattgcactattgattacatagaacactctatatatccaatatagatacgccgtgaattatcaattgttacaatcaaactaatcgatgatcctctatagacgatctacattgaataatgacaaaattattattttacttttcaatacatttcatcctttaaacacttagctccttgtaaataatattttagtaaactaccataattattaaaataagtactccaccatttaactcatttagccaagctcaaagaaaactaatatttcacttctaaataatcatagaagttataaatgtccatatctatgattaacgctcctattcaattgcactatcgagttcctaatatgtaaaatgagttagtctaatggataagtcagtaaagaacaagtcaaagaactctaatactagaactagaaagaatgtaattatctcatgattaatatcaattaatttacgatcaactaagtgaaattaatttagaaaacatataacgataagtttataatatatttttagctattaatatcagtccagtctgatgtaaattatatacatctgatacaagtttactttgctagtaccctgaaaaaggcattctacttagccaagtgtaagtaaatgacatcagtaattatcacgtcagtataaatttagtgcactgataaattacgagactaaatagtttgaagtatataatcacgattattttctactgtagcaacaacactataattgtgaataactatatattcgggatttaacagaatttattttattaaataataatataagtaacatgaccaaacaatatatatatataatagtaaaaagtaatctttgatatttattattaagtaaataagtttactttgaaatcgaattttatttaaagcataaaatctcaacaaattttacccatgttcatctattgaagcatggtcatatcaaacatagcaatatatacatattcacatagtatttttattaagaaaaactaaataaatatgagatatgtcatatttagttagctataattttatttagtatttatagttttctcaacataatttttttaaaaaaaaaaattagcgtcgcaatgcattagataaagaacataactaaacctcacggtcattacaaaacaggttctccgacaaggaagataccgaaatacagccaaacttctggtgggtaaaagcccacttagccatattatgggcaacatagttacaatgtctactaacattcataaagttacagctaataaaagaaggagtggacctcatacaaaaggagacatagttctcaagtgcccaatgggactccttcccattgagagcattgatagctagtctcgagtcactctcaataataataaactttaaacctaagtcgattgccacagaaatggatgaacaacaggccgctgcttctccgcttaaagcatccgaaaagtccaactgagacgtgtggatccgaatcaccttaccctggtgattcctagcaacaacagctgtgcacatgcttgacaatcctactcttacatcacaattcagtttgatccaatcctcaaggggtggtgtaacgcccgtatttaaatatttttaaactcaaaaggtattttaatatatttcataacttcctacttatataggtcgggatcccga

SEQ ID NO: 107330 - DNA, 808 bp, Cannabis sativa
ctgaacactgcttataaacaaagtaaacaaatcccattaagaaataaaaaatgtctgttgtagttgctacacaagaaacataatatgaatgctttaatacttagaatatatatattatacagttcatatagtgctctgatctgattggtagtacctgaacatggtattccactgacccaaattcatacaagtgatgatcaatctccatgggcttttgagcactgtaatcaaatagacagcattaacaatacaattttttttagattctgtgaccaaagtaaatttctctattattgttcctttatatctgggatttaatacatgaagttctttttaagtttgtttccttctttttcttttattataaactaataaataatagctgttattgaagttatccttagaaaatatggttagaggaactatgagtggggcaattaggcataaattgatatcgacccctcagaatttgataacttcaacgacattaacaacattaacaacaacttttgaattttttttggattacattcattatctcaagttttgaatcgaactaatccattgatacaaatagttcatgggagaaaatcgaattatctaggccctgaaggattgacaggacgaactgctaaatgatcaaacatccaaattacaatcatattacactattttccattcctatagactcagaaaaattattcagtacttagagactatttttcctttttttcattatcccaagtttgaaatatggcttctggaattagatgtgacaacacatttttattttttagtgaaagatgat

SEQ ID NO: 107331 - DNA, 1961 bp, Cannabis sativa
tgtgatttggtattttattgctatgtttagtgaattgattttcttcattcaagagtgtttattgtgcaattgcttacttttgcttgatcaccattagaaagtagtagctaatagggttggtggaattgcttaaatgatgcatgaaaatcaccttagaaaagtgtgatttgtaaatggcatagtaatatgttatttaccttgtatgacttgaaggaattgtgcttaaattggtattcttaaaattaattgggcatatgaatatgttaattaattagagaatgaaaccataaatactttgaaaaaaagattatgacattttaaattactagttgacattattaatttacaacaatactcatttgcacaattataacaactttacatttttaggccaatttaataattctagcttgttttcttcaaagtttgtgtttgttaaattttatatattctcgtcacttcattttatttttgtttaaaccaatttgtgagtaattagttttacaaattaatttctaattttcaatcactgtggagacgatactcgatttatgatcattttattacttgttccgattccgtacacttgcgtatacaaatttttacaacacttacatttgtgatatgcttcaacattcaaatcctattgaagtcataaaagaaaaagtaagtatattctcattttctctataaatacaaacatataaaaatattttccttttaattagttttaattagttataaaaaaaaaaaaaagatgaatgaaatgtaataaaattaaaagaaaaaaaaaatagaaaacctatgtatttgcaaaattagatcaaaattaaggtgaccttttcatccaactttttattaaaaaaaaaaaaaaagttggataaatctcaattttttcatgaaaagtggcatggaaagtacacttttatctcacttttttcaaataaccgggataaaaggggtactttttatcccgcttttatgaaaaaattgggataaacaggtagtttttatccttttttttttgtcataaaaatcgggttaaaaagtgtactttttatctcgattttttaaatacttttatcccactaccaaatatcccagattttattttagtaaaaatagggataaaaaaacttaaaaactgagataaaaagctttttcctgtagtagtgtcagttttgccattatatttcaataatgattaaatgacacttaatctattttggatactaagaaaagggcggtgctatggggtaccaagatatctaacaccatgatgagatgacgtcctataattagttaacagttttcgataatccttattgaaattaaataagtgaaacctaatatttaattatagtaatattacaatttacaagaatattaggtactatatttggtctttagcatttcacttaaaaaaacaaatccgaaaatttacatattatcacgtatattttatatatctagaattgatttgtaaaaggcagattcatcagcatcatatgacattatattacacccaaaatctaattctattaattttatgtcaggaaaaactgtgtttccccttaatcatatggtatacgaaaggattaaatgcatttaatttctttatagaagaatcaaatttgctaatatctatctacagagaaatgctaagcgctaattatggtgcctatgaggtgtaatctctctatttgtataatttaacataggtcacatttactttaatttaaaaaacattataaagaaccactaactaattataataacctataacatagaaatctcaggcaccctggtgcccatagcaaatggggatccgaattacataaacattatgatattgtaataaacaaagtaatacataatacccttttgtatggctgtatgtaggcttcacgttgcagtgtctttctccacatcattcacttgaaactacaaaattttgccta

SEQ ID NO: 107332 - DNA, 621 bp, Cannabis sativa
ttaataaaaacgacttgtcgtttactcatcgaagagttcaggccctcgttttttaacttttatgtgtaatggttggtaatacgtggtgtcgaccatttatgttcactacctctaccaagagactccaattaaggaaacttttagtttggacagttctgaatttttaatagtttaattataagatgaatgtgaatgtttttataatagtctaagtctgtattgtaagataccaatgaattatttttgaaagatgacattaatttttaagtatatcatgtttcttttctagtctctgtatatagtcattttcctcaaaagctacgactgtgagagttctatgagtcattctcatcaaactctagcataataacatttgaaattcttttgacaaaaggacaagaaaaaaggaccacaagttgctagtcaagctttgtattttatgtgaaaatatcaaaagaaaaattgtttttgaaaaaaaaaatatatcgagtaatattcttgaaaaaatatcgggtatttgatatttatcaaatgtatgatatttttatttatttatttttgaaagaaatcaaatgtatgattaacttaattaaaatagaaaatttacatacattactaact

SEQ ID NO: 107333 - DNA, 1712 bp, Cannabis sativa
gggcaccctcctctcttagactagtttttgggagtgagttttatccaagtggatacaataagtatcaaagtcatgcaccttcaagtgggaccaatgttacgaaaggggcgatatgtggaaaagcccatagtagggcaccacagagtggtatgttgtggatcttggctctaaagtgagtgtattgttaggatcccacatcgatatgggattgattggtggtttatagctactggggcaccctctccttttaggctagtttgtgggattgagttctacccaagtggttgtagcacatatatacctagagatattttagctgctgtagtttgagttgcactgcatttaaaattaatcaatttgtttccatagagtgtggtttgtttagtttcattctaagaaactacttgaatattaaggaaaatctccaagtcttttgtatccacagtgtgattaaatacttaagaaatagtaaataaattaaaatttccaaagggttaagttgtctatctcttttgcagtactactttgatccagtctcaaagcgaagatttcgctcaaagaaagaggtcctttacttcttacaaacaggaactcgaccgaaaaggaaaatcgatgctgatgcagcggtgagtcaaaatgcgaaccttttttagaaatttttttgattcatggcctgctctttcaatttactatgctctgttttttcttacattaagttttctttttcgatcagactgtggacaattctggggaacataagcagaaggctagcacaagtgaaaagggttctgttaagaacttcaatttttcggatgtgcctgagaatgttcaatgggttctctcagattcttctgaagattggaaagcttttattggcaatgaccaagttctggagtctagtaaacgagactggttagccgcattcacattccttgcatctagagatagaggccgataccaatgaaggccatttccattcctcctgacattaaactagtgtcaccaatccagtgcgtgcaaatactagtattactgaccattgttcttcattttgtttctagtccttttggtttctcaattagttgtaatttagtcttatattgtaaaaccaacagccaagcacagatcgtattgtttcttggcatttttgtcatcaactcatattagtcaataggctcctcttttgttcgttctttttatgtgtacgtatcaacttttctgaagctttattaaaactatacaataacatcaatgggcattgttcgataatctcattttatgtacacaactttgcaatatttgcaacttgactaattagttttgaatcagaactcaggatattaacttcagtaacaatttttgagtttggaatcatgatttcacaaatgagaatagctttattttttcttctaaaataaaggtagcataaataaataaaatcaattacatagaatgaaaaaaaaaagaatcaagtatgtatattacaaaaaagtgaagaaaattcttctttacaatttacattttttttcctggaagagttctttttacaatttgttttgcaacatgtggatattatcatgtgtcaaacattgagatagaaaaatgtaaaagtaaaaagagagtagggaagagcaaatgcatttaacatttttccgaaaacaaaataaatgagtttaaagataaatcagagagaaacaaaatgacactaatat

SEQ ID NO: 107334 - DNA, 1659 bp, Cannabis sativa
  modified_base (1601)..(1623): a, c, t, g, unknown or other
caagacgtcatagaatgatgagtagatttgtcagaccagctgctcgcagctccagtcaaggaagttgggaataagatgcaacacaaattattcgagacattactggctcgtattatagtattaaagttgttcaggtgaacgactggatccgtagttccatcatactgcgagacatgcgggattttgaatccctgagggaatttagaatttaaaatatcaagatgaaacgactcgatttcctcattcgagtcgtaaccaggtaattgcccatgttctccatcctgatactttctgaacttatcctccagttcaattattcgcaattagataggatctatttgttgctgattagcattaagttgatggcgcaaatcagatgcattttggtttagtcgctcgtgaagatggggttgtctttgattcaagtgctcgcaaagatctggctgtcttcgctcataattacttgcagacattgtctctgaataactctcagattgatagcttcgtgtattgctcatgctttcttggccagcataacgtcggggcctacttccctcttgcattttcctacctgatcgattgtgtgctcgagaccttgagtgtcctgaactagaacttgcttcatcttgtatcggccttctccttcaaaagaggttagatacacatcctctatatttagatacatgtatacatcctctctttctgatcaagaaggacattgaaggtgtctcagaggtagcccacttgtcatgggttagtttccagtgtttctttcgttgccacgagggatcccctgattcccaggtcgaggctgtctcgcgtcctcattcatgcaagaagcttttggtacatcattttatttgttcccttggttcgtaaatccttgggatccttgaggaacgtcttgccgttgctctcgattatttgtctgattatccattggaacatcccttgtacccccaggttgctcttcctaggtgtttcgggatttccctaatttgttatttcctgtctcctagttctagaacctcgtggtctccttgccgcgagatcaagttgattctgaggatttgttccttgtgtcgccctggctgctggagtctctctttccaactcagcattttgtcgattatattcagctaagcgttgtcggagttgtctattctctaactccactaatggtacatacctagttggatcataagtatcctcacttctatgcacgtatttggttgaattattgggatcttcactccatctttatggattttgatcattaccaccatcaatcctccttgaacgtgaaattccagtggtatggggtctttgggatcccattggctcctttccagggcgacgtgtggtttctttaggatgatttccatcgttttgattgttatcagccattgaatatggatagatttttgtttgtaaggagggatttttttgagttttatcactaaggctctcaatgaaagcaccaaactgttaacgcagattttcgttaacaaaaaataaatagcctttcagtaataaattttctacaaaaaattaataagtaaataaagatataattgttgggttttgtgccataaataaannnnnnnnnnnnnnnnnnnnnnntacttattaataaagatcagaattaacattttatgt

SEQ ID NO: 107335 - DNA, 2039 bp, Cannabis sativa
tttgtaattaaagtttaatttctgtgctaattttactagtaatcccaattaggggattagggttttataagtatgttgggtagcgtgcctaatgatttagggcgttacatatcccttaaactcccaactcaatatggaatagggactgttaaagaggactcgttaagggcgagacaatgttacatcgttgaattgaagggaagggcaaaggctcatcaaacaatagtagtgacaatcaaggatatcaaaaacaaagaagtggaagatatggacccaagaattattgaggaaaagtcccagctttggccagtggaggagttggacgaggtggtactagatcccaacgaccctactaaaattgtaaaaattggtaaatagttggggaaataattaaagtagaattaattttctttttacaagaagaccatgatcagttttcctggagccattcagatatggtcaggattgacccgaatatcatatgtcatcaccttaatatagatccactctatcctttaacacagcaaaaaagacgcctcctcgattatgaaagacaagatgatttaaaggaagaggttgataagttattaaccaacaacttcattcgagagtcattttacccactttgggttttggacccagcgttagtctcgaaatcaaacgacacatgaagaacttttatagacttctctaacctgaataaagtatgtccaaaagattgatttccattacctaggattgatcagctagttgacgccacagcaagacgacaactcgtgtcttttatgcatgcaattcattcagataaaaatacatgtcagtgatcaagaatatacaagctttattaccaatatggggctttattgttataagaccattccattcagactaaagaatatatgagccacttatcaacaaatcgtgaatggaatatttgaacaccaaattggtcaaaatatggaaatttatgtagataaaatgttttgaattgataaaaatccaagaccatgtagttgatcatgcaaaatgttttccagtcctaagaaaataaaaaatgaagttgaatctaaaaaagtgttcatttggagtatcttttggaaaatttcttggcctcgtactaaatacgagaggaattgaagaaaattcaaaaaagataaaacctctgcttgacatgccttcaaaatttttgcttgacatgcaagaggaattcatcaagttttttacaattgcaatgatccatgaattcagatcaatcaaattcacaactttaattttggctcatccaaaagtcggaagtttcgagtcttccatttctacaagacaacaaccatttctgacaatgtgtgaccagcttgaccaaaacatataaaaggattaagggttgtcaagcaataacttgggcatctcaaaggaatttctttagacatttatacacctttacaacgtccaagctgacgtcagacgtcaacttgggcactagaatgtcaacctgggcgttggatgtcaacatgggcactgaaatatgaattacctttagtaaaacagccacaactcgctcaattttcatctgattgatgtaattcaaattgtgttttgaagttatttaaatcctctattaagtcatgtctcacacaccagccgaaattatgaagttatcgttgtcaaaattcatgcccaagacagttataaaaataagctccgagtaacacgcaacgtgacctgctaaacataaaaaatcaaccatcactaccaaaagctaatttttaccgttagatcatcatcaacaatggaaaacactttatttgtaatttatctcctatttttgtgggcctccttcacctataaaatgagagctcccttagtttatttttacattcagaaaaatacccacaaggtcagagcttctcgctctagaatttaaaatttctaatactcaaacagttgctgtaattaccctctcgtgagaataaaaactcgaagtagatgtagtcccattacctatcgcgacataaggagtgaactacaataaattattgtgt

SEQ ID NO: 107336 - DNA, 1355 bp, Cannabis sativa
gcttgatcattatcagattctcaacatcctcttaccactgaatctgtaatgaaaaagattgaggactacaacactttggttttcattttttacattcgtgctgacaataagaagaccaaggatgtagtaaagaagatgtatgacattcagactaagaaagtgaatacattgattaggcctgatggcaccaagaaggcttacgttagattgaccccagactatgatgctctggacgtagctaacaaaattggaatcatctaagctagttttgtagtatttctcattacgaatttcaattttgtttccatttgcaaatgaagtacaattttatgagattttggttcagtttgaagtcacaatctttttatgtaactggttattgtttcggttatgctcttacaattttcattggaagacataattaaactgcgtaattatttggtcaaaacaaaaagtgtcttaaacaagtctaaaaatgaacatataattttaaaagtaactaatctaaaaattgaaggttagtatattagatatttatttaaaatggatcattttatataatgataactgattgatatcttatccacattataatcaaatggtccaaaaatatacattatttgtaatgattttaaattttttggtaacttttatatatatatatatatatatatgtatagttaatcaaaatgtctatataagtcacattttaaaaaaagtgagtaatttgcgtcaaaaaaaaaaaaaagtgagtaacttaaatgtgtttgatagatatttctttaaatacaatttattaaaaatggaagtttattatactacaaactcataaattttgaaaataaatttaaaagttactcaaatataaaaaatctcaattctgaattccaaccattaccacaccacccgtgatgttaattttcttcacttttatttttcttcttctaatttaaaaaacataaaatagtactactactatatttaaattacattgaaaagagtctagtttttcagtgcacaacgaccatgaaatatatagggacgttctttgtttttcggtgtcgaactgagtggtatcgtttatttctttgcgctatctctactcaatctgacgtttactgatcttctgcaaccaaggttcgccattttattttttgagtttatttttggtcgtgggggctaatttgcaaaagaagttttttgtgcaaaggagttttttagattgataatcaatgtacaaatttaagaataaaaaatgaaagctttatgtgtttgttgttttgcttatgggaaagtgttagtttgataaatatgtcaaaaatgagctttcctttagctaagattgagttatgtaa

SEQ ID NO: 107337 - DNA, 5790 bp, Cannabis sativa
gatctaagatcctggtaaaatactatccaacagatggggcatccaatagcgaaggatcagggggtggaatgatcctcataagtcccaaaaaattcaaggtgcacgctgccattagatttgagttttctacatctaaaaactaagccaaatatgaggctctaattggaggattaaaactcgctcttgagatgaaagtcgagtaccttcaagcatttagtgactcgcagatcgtggtttgccaagtcaatggagagtacctagcccgaggagggcgtttggccagatatctttcttatacctgtgagttattgcaaaagtttagaaagatagtcgtttgtagaatacctcgtgcttataattctcatgcaaatgctctggtccaactggcctcgacaacagaagcagaattactcgatgtaattcctatagatgtattaactcatccaactatcaatcgagatgagatgatggaggttgatacagtcaaaaaggtcacctgatgaccccgataattaattagttgaaaataggaacgcttcctgaagataaaactgaagccaagaaactacgatatcgagtcgctcgatatgtgatttatgacgacaagctctatcgcagaagctttagtcagccattacttaagtgcatcaatgggattgaatgcgattacatacttcgagaagtacacggtgggatctgcggtaaccatgctggtggtaattccgttgctctaaaaatcatgaggcaaggatattactggccaacattgcgggcagatgcagctaactttgccaaaagatgtgacaagtgtcagcgaatagcaacctatgtaaataggccaccgagccaattaaattctatcactagtccctggccatttgcagtttggggcatagatttaaacggagaatttccaaaaggaaaaggaggagtaaaatacgcagtagtccctgtccattacttcacaaaatgagctgaagccaagcctcttgtgaccataacaacctccaaattgcgcgagtttgtttatagcgccatcttctgcaggtttggcatcccttataaattaatttctgacaatggtaaacaattttattgtaaggagatgcgccaactatgcgatgagttagggattcaaaaggctttttcggcagtcgcatatcctcagaggaatgggcaaactgaagtggttaacaagatcattaagcataccatcaaaggtaagctcgaagaaagaaagggtacatggccagaagaacttccacaagttctatggtcgtataatataactcctcgctctacgactggtgaaacccccttttcaatctcttacgggtttgaagccatggtaccagtcgaggctagagcaggatcttaaaggagagatgtcttcaacatcaacagtaacatagaaaatcagttggtacaacttgattttctggaagggaaatgcgatcaggctcatttgaaaaatgtagcctatcaacagcgaacaactcgctatttcaactcgagggtcaaagaacgaagtctgcgagtaggagatttggttttgcaaaaggtcatgcctaacacacgtaactcatcacatggagtttttagtgataactgggaagggccatacctaatcgctgaaaaaattggtaatgcgacttaccgattatctgatctcgacagtacaatgatcaagagagcttggaatggcgaaagcttaaagtattactttcaatagtactcgcatatatttatacttagtcaatttatttcaataaatgtactaagtataggggtataaccttatattgtactattgattattataataatgaaattttcaaagtttttagaaatttttatcttcttcacaagttttatacttctacgttattacaccaagctgtaatgataaaaatattgcgaatagaaacggtagagacaaatatcaaaagacaagcttaaattatgcgagtacccatgtaccgcttaataagtttgcaaaagtaaaatatcttgaaattatgcgtgagtacccgtgtaccgctaacaaaaaaaaattaaagtttgataatagcaaaataatacttaggaaattaaagaagctagagtcatggaatcgtctgcgaccttgcttgcagcaccatcatcgacttcctctgcatccgcattctcggcctcctaagggaaaaggtttcccccacatctgtgagtttgggtaggcgacatagcacgagaaccctcggctatttcagcagcttccgctccaaggactgtgaagtcgaagtcaggaaacttggataaaagtcatgtaaatgtagtcagaaacaacttgatcgtactgtttcttctcattctctctttcagtctcaagatcgcgagtcatttccttaacacgtgattgcaatagcttggccttgtcctttgcctgcttagccttctcctccgcctgctccttagccttcccgaggtcctcgacgtctttctctttcgaagtaacatccaacttcagtttcctcacattatcctaaagaagagcgttttgttttctcaagagatcgacctccttggtacctacgacaaaagccctcgagaacatagtcatgaactacgaggccagttctgcggagcgtggcaacaatttctcagcaagaatgccctcgaccttggacacgaacttatcatggagagttatgatattgcgagccctaatagtaggatcgatcatgactttcttccctttgtcttgggaaattttgacctgctttttcgaggagtcggccacgggagtcgcaacgacctctcttttcctcttttgtgggatgacaggagaggtggtcgcagttccaactttaggctttcgattgagaatagggacctgcttcaggaacgtcatttctgcgagaaagtcgtaagataagtataattttattctacaaatgaacatgtatatattcgatgtattacctgatgttggtcttgatgtttgtttaaatagactcttgtctattctttccttttgcttctaagacggctccttgtacactggttctcgctgaaggcaagcgttctcaagtataagtttgtgttcttgcaattttgtagtagtacacagcaactgccaattgcgatcttgaaatctgcaagcagggtccagaacaggtcgagccagcctatctgcgatcaaataaaaagcaaacattagtgactatacaaggtaacaaaaatatatactaagtgttgagatacgcgacgtactaggttgacgattgaagtcagtcttaactcctggtactttaaacgcgtagaaccaattagatttccaatcccccatattggaaaccataccttctaccccataatctcataattggcccatttattaaagtagtaaaagctgttatcgtggccaacgttttttatgtcataaaaatagttaaaatcctccatcgttggttccccttgcacatactccttataaatctcataaaaccccaaaattatgcgataactattcggggttagttaaaagggagagacatcgtaatgtctgagcatggctttgacaaaaggatgaaaggataaagttactccacatcaaagaatagggatcgaaaccaccacatcttgcgtggggataattgcggggttggtaaaaggaaagtgaggtctttgagacgctgaagggcgtagggtccctattcgaaccgaattcaactgtgcaaatgtatgcatgtcagatttggtgactcgcgagactaggtcatcacatgaaaagggttgattcagttgagcgtcgtcaactgaatccgtctcgctaccctcagcactttcttcctcctccgactcgcaatctggaacctcgaagtcttccattttttcgacttcaatgtcaggggcatgtcttgaatgagtgagagatattcatgagctgacaccgtagatttgctgttgcaaatctcaaccattactggttcaacgagttcctgaaccatcctgtctatctcgtccatagattgtgaaccctgacgagcagctctagcagcagggacctgctccttagagatcaaggtgggtatgaaactgtccctcttctctgcttcatcagcaaaagccccacctccaaagccaatcatttggctatccgtcaagttgctcatctgaaagatagaacatcttttcagtgtggtgaaagtgtgagaataaaagaagtgccctcactcgcataaaaaggttcagaaaatataaagtattaaccagacatctcaagaaatggctaggggtgtctcagtaacataatgatcatgtcgccacatgaaaattaagataatgagacacacccaccatttcgagaaaccaatcctcgcaaagtataagtcccacatgtacaactaacagtgtatctcaagaaatggctgagagttccccagtatcccaaggggcatgcattccctgcatgaccattgagttaatgggaaaccctcaccattttgagaaacctggttagtcctaacatgcgactaaaaagcaagaaaagcgaaagctggccgtatgtctcaaatggctgggcgtatcacagtgacccaagaaacatgtgagagtttacatgtgtattaagttactgcgacacacccaccattcaaaagactcagacagttttcacaacaaaagcacacataatttgaaggctaaaaaataaaccccaaattctaacagggatcaaaatagctaaatttcagatttactaagttatttggaagtgtatgcgagtattcaagatgttcatcacgaacctcgcgagtattcataatactcaacgagaaatgtgttcttcctgaaacccgtgattattcaaatttcaggcctatatttcctagagaaatgcatagttttgtctgaaagaaaataaagtttcatatatatgtcctattgtctcatgcattttctacctcttaaaacacggaatacagattgattttcaaaaaaaaaataataaaagggaatagttgcaaacaattttccattaaccttgaaatatatcgatcttccttagacggttctgtgaaaattaaaagcgtctaagttcttttctagaaaatgtgaaagaagctatgaggttttacaaatcagagaaaaaggacgataaaaacgaaaatgagagggaaaagaagtgaaggatcattttgtatgaggaggtttaaataccattatccctcattaattgggatggagacatgtggcaagagaatgcctaaggtttcacaagccaacagttatccataaccacgcctacacggactctaacgagttttgatgacgtggcaccccacatgggttaagtataatgattacagccgtcttttcgaaaccctcgattagacaaccaatagtcaccatctcgtgacaacctttcgcctgcctctcgcttatagtttccctcatgacataagatgtcagtcgcgaaactagggacatgtgttatagtgagaatttctcacctagaaactcaagaccaggctcctataaaaatgacacgtggactcactctcctcgaggagggctgagatgtcagtaggagacctcttgagtgaaaacctcgcctaaactagactcaacaggatgatgtgaccttgatagagtctagtcgcattcgtatagttcgcacgaagtaggaccgaagatctcttcaaaagttatgtatactaagatatatgtgaggactataaagatcttcctgcgaggttgtaaagatcgattctttactctccgagttggtccggatgacccaacagcctc

SEQ ID NO: 107338 - DNA, 2446 bp, Cannabis sativa
ttttatattattttataacacgtcccaatttactacatccctttttagatctaaattcattccacagcatgataatataatattagtattcttttctttctcttcttttttttttttccaaaagttattaattttcttattagccactactagttttttttttttagcaagccactactagttttaaattatcataatccttacaaattattacatttaaatactctttagaataaattaatgagagcaagacaataattttttctaaggatgcaacgggcagtaaataaaggtagcatatgctatcaatatgttctgaatataattgggattttctgaccaccaaataataccactacgtgtaggcaaagcaagtttggccaaagtatgaacaacaccattacaaggtctatgaatgaacaaaccttacaacatggatcttattacaaagcttaagaatatcatctaaaacatgacccaaagaagtaataatataaattttgtttttaattttaagcacaacattcatacagtcagatttaataatgatgttttcatacctaaaggagaggcattgacagagagcattttgaatagccaaagcttcagcaacttctggatcaaaacaaccttccaagtgccaaatagtcgaggctttagcttggaagagtagaacccaaccattcattcgaagcaccattttgaggacccgtcactctcggccaagacgggggctagccaccacctgctgtttattgtggaaattcccaaggtagtctcttagcctagataacagtaagcttaaggagtcaactcaacattgttatggacatttctattatgctgaaaaaaaaaattgccacgaaattactataaccaattcaatcatccctttgggaaggggatcaacaaatctatgaacaaagttaaaaaaaatctacgcaatggctccttcggtcacccaacaaaaacttacaaatcttactacaatgtatcaaagaaagacaaccctaaagagcatgatgagtagttttctcttctaccccacataaagggcataaaccatcagataaaagaccatggcaagcaaaattaactttagtaggaatctaattatgggaaatttgccatgcaaaaagtcttaccttatgaggaaggttgaggggccgaatcttcttccaccatccagagaaaccattagatgatgaggcacgagtcaaagccaagttgcgacgagccaaccaatagccactcttgacagtaaactaccccaagttctcatagttcaaaataagtttgtctgaaacatcgttagtggaccaagaaatagagagaatagtcttagcttcattaacttgaaaactagaccaaataagctctttattccaacctcccgaagtgtcacaaagcacaaagaccttagccaacccatcaagtcggtgagggattaacacaagacccggtggaactgaaggaatccaattatcagagtagatatcgatgttcaaatcgttcccaacatgccaaattgcctcgaatcaaagagttccttttcccagataatatttttcgaacaaaagagccttgcttggacttagtgattttagcaagcgacctcttcttgaagtacaaaccttttaaaacacagccagccaaaaagttgtggacattttatatgcgagaagcttgttttaccaacagagcttgattaaacaaatagaggtctcaaaaacccataccccatcttccttatgcaagcaaagattctcctaggtacaccagtgcatcttttttcataacatcatttcctccctacttaaaacgaggacacatacgatgaacatttttgtcaaaagcttttggaaacttaaaaaggtccatcatataggcagttttttataaggatctcgcgaccagccatagagaaaaattttgatttccacccattatgatttttccaaattcttttcctaatagcattaaacaaaccagattttctatgccttggaaaacaatgaagacccagatagttgacatggcactcaacccccttaaaccccaataaatccaccaagtaatctttctgagagtttagaacattagggctaatgcaaatagtcgatttgtcaaagttaaccatttgtcctgaagctaccccataccagttcaaaagctgcttgaatctcacatagttcccttcaaaggctttgaaaaaaaaactatagtcagcaaaaagcagatgataaatgacggggccatcgcgaccacaagggaagccatgcaataatttattctcacaatccctcttaaccatactagaagtgccctcgacacagagaagaaacaaataaggggacatggggtcaccttgtctaagactccattgaggagtaatatacctaagaactgttggggattattttaccaggatctagatttactgcca

SEQ ID NO: 107339 - DNA, 2840 bp, Cannabis sativa
ttcgggttgagtaggtagatcatctaagctaagattagattttggtaaaataatttccaataaggacgaccctcaagcagattgtaaaccacgctttcttgagttccctgatgaaatgaccttgtccttcaccttgaatctggttggtatagaaatgatgtagcatcttgggctctgaggaaggcgtatgttcgctacttatttcctagtcttcaaagctagactttgaaagatcattacttgacgaagatgggctagcacagagataaggatgatcctcgtataggagttgaagcagatctttgtcgatatgatgtttgcctccccaaaattcaccaaggttcatccacaaagggtaggagacaagaaagtgagagttggtcaaagcaacgaatgaaaaacaaattgaatggaccgaccaggttcgattgaggagtcaaaagtagaaatttcacccaaaaatagaattttcaacttagaagttcaaaacttcaaattggaatttaattttcaataaaaccccaaatggacgagtgaaaatggattttgtaaggttaaaatttgaggcgcagttagacaatcagacgtcatggttgaatacaatcaaaattcctaaactttaaacctaggaattctatagttaacctagaacggttcaagaacaggcgagattcatagcaagaaacccagaaaattaacatgtatttcattgaaaatatgtaaaagaaagaaatgaacaacatacccattggcttgaagcttcttgttctgctcaaatggtgtcataaagagttttcttgcaaatccttcgaagaatttgagagaaatattcgtctggaaactttttgctatggtttttcaagagtaagaattgctaaaaggtcactaaaggctcctattcctatatataagcagtcgaaaaagggaattaatcatttcaaaattcaagttcctcgaattctccccaaaaatttacgttatgtactcattccaatagagtaaccgtcaacacgcccagacatcaaattgtgattcgaggcagaattgtcaattagaattaaatgagccaaaattgaagagaccactagtcaaggttactatagttcatcatccgacacctaggaaacgcgtcacccatccggacaagactccaggctgagtgaagtcctcgtgcgactaggaaggtctcgcgtagacttggggggcaaatgttatcccattttttgaaccttgacgtggcaatagaattgaatgatacatgtaccatattttgtatacctaggcggaggtatttattcctagcagcctataaatgactaatcaacatctataatagtcggttatccgagcaaggttgttgagaagatatccaaccaggtacgaacatgtttatgccaagaaacgtacaagagatggtgacttcaaagactaatctcattggattgagtcaaaggaaaatggcaacttgtcctcgtttcctatttcatatattgtaattatagaatcattgtaatttcttattttatgcattgtaagcaaaagggaaaccatccctcatgcattaagtctttataaatagttatctggcttcactatgaaggggatcgagagaattgctgctgaaaaatattctagaatgaaaagagtggtctaacagagaaacataatcagagatcaattgtaagatctttcaagaggaagaacactttgttccttcatctcacatcaatacaatacaaggggagtaggtcattactacactcacggggccagacctttttaaaatctggtgttcactttaatttactgtttttgctttcttttaattatcttttttaattgctttatttttgactcactgttgttggcgagaagcgagatcaacaatatataacttgttcataattatattttttgtaattattttcaatgttgtccaaaaagggatgagaatttctaattccttcttattttgattttttttatttttttgaaacccaaattgtttttatttagtttaatagacataattatataaagagaaacttcaaaaaaaaaaagaaaataaaaaagaaattgctttcagagcaactccaaagggaatgtacaagtcaaatttgttgttatataagtttagagggagatttcatttgcgcttaaatttgtcttgtgattataggcataacatatatgatgtacttgtaacaacaacgacatccaaccttttttttaatatatatttatatgataattatttgtacatttgtactcataaaatataaaataatatttatttttttttgacgtagtgattagaatcactaacgaatttacgatgcagatatttacaaaccgcgcaggaacctcctcaaatcaggatggctaatcgtctaacataagagcatgcttgtcaaactatgaattgctaaagaaagtgagctacatgagacaaactgttcccaaaaatttagacaataaagctataacatcctcatacagcacaccaacatagctagagcttcaacttgtaacatcgaaaactacacgcaaactcttttacatatcaaaatgctccacaaactatctacaaaagaaaaaagataaaaaataaagtggattaatccctaacgttgatattaaaactaataataaaaaatctcaatagtaaaagatgataactctcaaataaattatatttaaaaacttatgagcaaagtctgtgtaacactaggccttccacaaaatcaacctacaaaataacaataaaactctattaccacacaatttaatgaaaaaatatgtaatgtgaataaaacttgtaaaacaattcatataataat

SEQ ID NO: 107340 - DNA, 1308 bp, Cannabis sativa
tatgtatgctgacgtgacacaacggtatttgtgcaaataattttcttaaaggtatttttataaataaaattaattttaagtatattattgaaaaacccccataaaaaatgtgataattttttagtcaccataaaaaattatttatgactaaaatataatatttaggtacaagttatcactaatttatttttagtcataacaagtattataattaaaaatacaataaattgtgattgttgtgactaatacctttagtcacgaactttttaatcacaatatcggaattattaattataattagtcacaatttcttttagttttagtcataaattttattgtagccagtgacagacccaaaatttttattttgtaggggcttatttattattaaaaaaatttatacatgcattataatgacttttactagattaatttaattttgtggggatttttttactattttaatttataattatcaaattaaaaaaaattatttaattttttaaaagataatatttttgttagtgggggctatagccctacataggtccgtccctaattgtagctaagtaaaattttttatagtactgtatatacacacgtccaaaacatttacgtacaacaacaaaatatttgaactttttattttggccacgtaaataatttaaacaatacgacatcatacaaaaacaattgcttttatgatattgcattaataatgtaacatattagcatctctaatgacacttttaagggtgtcaaaaatctcaacgagccctagaaaaaaaccctgacaactctatatagaaacaccccgcctttttactctctcttactcttctctttctttgtttggctcaccatgccatgaaatgtatttttcttctatttcttcttacctctacgtgtctcttagcccaaccaccaccagggcgccgcctcaacgaagatctcacaaacgtcggtgaaaaaactctctctctagcatcgacgacacccaaccccgacagcccaaccagcaccgaaggtcccatctctctttcttttattttttctgccatgtttttcattttgtgttttcttttaccattttaatattgttgtttgcaggtatactttacttagatttgtggtgcatataaatacttaccaattttaaatctacacattcactctgatcagtagtatttatataaggtataattcttccctgtttagtccaattgtcccgattaataattagttaactaatacttatgacatctacactaaacccattagttaaaaaacaaatttaattaatcccgg

SEQ ID NO: 107341 - DNA, 1408 bp, Cannabis sativa
ttgtcatttaacaaaacacagggtccaattgataatttttataaaacaaagagtccaaaatagtatttaccctagagtatttgaattgaaattgggacagttggcaggggattgttgtgtataaattggcaccaaatttatgtgattgcagagactacacgacaatatttggagagagagagaaagtgaagaagggggcaagaaagggttgtttggggtgttttggataaggtattttaataattgatgggaggggacaaaggcaaaaataaagcctattatattcttcctcggccattaatcttaggctcatggggggagatgaactcacccaatcaaaattgagaaggtgtccactctttctttgtacacaataatcatgtgttccctcttttcctttgattacaatataatacgatggaaaaagaatgtatacgaagggaatagaagtagaattagaattagtggtggggtttgagatttattttattaaattacattgcattatacttgtacttataaataaaaacacagcgttccacccttgtgtattaaggttcctaatttttgctaataaattttaatatgtatcaaattatattctatgcattttttcagtagttaaaaattcttttcgaattattgaaattattaaatttatagacttctacctgatttcattccattttactaatatggcgattgttcatgtactgaattttattcccgaactttgatactaaatcatgtcttgtgaactttcaaaagtacaaaagtgtgtctctaaattttcatccacattaaactttgtttagtaaatggctcctggagatttgtagatgtagagcgaaggacttgagtaaaagtgtgttcctatccaatctccttcactgtttcagtttggaacccttttgagtcgatatcaagacttcttcctctagttgttttagataatttggacaaacttggtgacgagatcattagttttattttctttgtaataatggtgtttagcatcttttgtctttgtgacgttgactttaggccgttttgtgggctttgcccctttgttcttctagatgcgcttagagcttttgctcctctttgtaatttgctatttatggtttctctttgtgagattgtgtggtttttttatatctgatcttatagaactttgttattttgttaatcttaatgaatctccttaaaataaataactaaagtataattaaaagagataattgcagcaaaagtcttcaaaaacttaagattgatgcagattagtccccaaaaatcaaaaaatttgttagtccattagtacctaagttaaatagtctcttaattgctaccaatatcaccacatgccaaagcattattagtacacttaataaatattattaaaaaatta

SEQ ID NO: 107342 - DNA, 2375 bp, Cannabis sativa
atacaaatctgagtttttttttttcttttttataatattatttttcaagacttgcttatctgtataaaactacaattaaaaaatgattaaaatgctatggaaaaaagttataccaaaagactacaaacataaagtgcttttattttaatataatgagaaaatggatgtcttgttctcatgtcattacccaaacaaaaaaaaaaaatgaaactatttaaaccaaaaggagatatttttcaataatattgttcacctcttaagttaaggctcatgtttgaagaagaaaaaaattatgtatgaaccaaataaacacaatatctcaaacttggaccacattatgatgatgatgttgggggagtattaaacaacatacaacatcaaactaaatatagttgataaattattggatattactcataagaattgacaagttttcaaacttttttccagatgggtattaataaaattaattaaaatacaatatttagattaattgatttagaattaagactaatacccaccgaccccctcattgtgttttctgaaaaaataacatataataatgtaacttaaacaaatgtgtatatatatacaattacaaatacaatgaatgtaaacaaacacataattagtacctgaaaaaacccctaagaaagcaagtcttcatgggtccaaaatgacattaaatcttatcatcttctaattgagttgcttccttagctgagaccctgtaaattgtaaagttggtattttttttttaaggtatacagatacaaacattcattatagtatacatcaaaaaagcaaactagtattatgtctataagctattatatatatatattatgtgtatatagtagctttataacattcaagatctgcccttggaatctgaactttttgatgcttgattcactatttcattataacctaagcaatctctttctttctttctctctctctttctgatatgtctgcaataaagaaaaggaagaagaatagaataagggtcacaatcaagtgaggacattagtgggcacaccccatgttcttcactatgaaattagtaaggaaaagtgaagtttcttctattgggtccaccttacaatatgaatattatttaatggttatggagattgagcttcctaaccccaatatcatcattcataattaaatttaaatgccatgaaaatccacttaaaaaatctatgcttttaatttcatgctattaaaacttaaaccattcatgtgttagtacaacaacaatgtacaatacatcaataatatataaatatagatattgaaaaattgtttggtgagaaaatcagttttctcctaaggacatttctaattttgtgtacatagagaaattataaattattctttttatgtgatggtgtatatagttacactcggaaaaattaacaatcacacaaaaaaatatatatatttaattacacatgtacttattttattttgagtattactattatgtactagtagtgttcaatactttttataagtagtactttataattagttagcgatattacctaaaaattatttttttaaattatatgggacctgatacttttttagtggtataatatcaagaagagtattgggcactaatagtacttttcaacaattctcttttattttatacgcatgtaaaatattcagaagttcagcaataaaaagaatagagaagatgcttattataagagtaaatattattttggaccctatgttttgtaaaaattaccaattagaccttttgttttgttaaatgacaaaatagaccctatatcttccaaaatgataaaaataggatcatgagctcaattttcaataattttattttttaataaaactaattttaatacaatttctaacacgaacagatacagaaaatgtaatcagttttaccataacatctctagattggattatcattaagttttattttgataaaaaaaatcagttaagggtcaaatttgtacaattttaaaaaatacattgttcattttatcatttaacaaaacaaagaatctaattaataacttttacaaaacacaagatccaaaatagtattcacccttattataactatattatacaatatcattaaaaaaaaaaaggtaggatataattttttaaagagaaatgctaaagagcactagtggtgtctagcacactcctatgtatcaatatcgttattggttcaactaagtatcggatcccatataatttaatataatagcttttagggggtatcgctagccaatcgcaacgcgacatgtcgagaaagtgctagacaccactgtgcctaataaaaatgttcttttttaaaaggagcaacctaaaatctaaaa

SEQ ID NO: 107343 - DNA, 1303 bp, Cannabis sativa
acagacatatcacaattgcacagaaccgtagaacgccacttcagctggaccggtcatgtaaatgtgattgtcttcttccctccattcgatctgtaatggccctccaggcaagtcaaccgtgcaattctatgccccgacaccaaaaacataacaagattattaagacaaacaaaggcagtttaaaactacatcaaatatatggtttggttccacttgttatggatagtttcagattcatttcttgatatgttggtacttgaatgttatgaaaataggaagaagtttatgagttgtttagcttcgtaaaagtaatagggggcgtttagccaagttttttagaaacggttttctgaaaactttgttttgaaaagctaaaaaacatcaatatgttgttttctattttcaaaagcaatttttttttgacaaacatatattcttttttacatttttgctcacatacccgaatccgaatctcgaactcggactcagacctagaccctgacacgactcaaacctagacctagacctcagacccaagccccagatctgaaccccgactctgatccaaacccgacctatatctagatccagaccccgaactcagaccccgacctagacccaaaccctggactagaacttcgaccacggacgtggaccccaactcgaaattagactcggaccctggaccccagcccgaacccagaccccaacctagacctagacgagaccccagactcgaacccgaacttagagtcaaacccaaactcaaaccccgacccctgacgcgtactccaacccggactaggtggcatgggttcatgttgtggtatggtgtagaatattaaatttttttttagtaaaaaacaaaaatctaaaaataattttaaaaaaacataagccaaaccccattaaatttttaaaataacaaaaaactgttttctattctcacttttaaaaatacaattttaaaaaatgaaaaactaaacacagcaaaacagccccttaaccttaccctagtgcattagctaaatttttattctgtttattcaacttcttgtgtatttatgtgttaggatgggttgttaagagctaccaaaaatattgaatgtatgcgtgtcaaaacctacccttccagcacggccctcaagaacggctgcaacaactacggcacaagcaccagttccacaggccaatgttgctcctgcaacaataaataataaatcaacaatgtagttaagcaatgaagttgaaaaaaccaactacggtgagtgagcttatcgcaaaaaacaactgaaagcacacc

SEQ ID NO: 107344 - DNA, 1528 bp, Cannabis sativa
ctcttcagccgcatctcctcttcaaacaacggtgagaactcaccctaaccacctcctcttcagacgattcgacggtggtctgtggtctctcttctcccatgatattgctcaatccttcttattcttctttcccagtcatacaaacccagccgcacctctggctgttctccagccctctctctctccaagcttcgatcaacggcgtccccctctcttcgagcttcgatagacgacgctcctctctctctctctctctctccgagcttcaatcagtggcacccctcttgccaaaaatcccaaaatcgcctcttgtccctcatccctccaaccacccttctctctccctctgttcatctttctttcggacaaccatcgacgagcctatctctccaatgtaagttatatatattaataattttattttaattatttatttatatatatatatttgaatttgataaagatcaataaattggatgtagctgaatatttcaaacccaatccactagtaaacaccctgttattattgtaatagtatgtttagttatagtagtttagaggctttaaagaatttatgttgatagttcttgggctttagatgtaattgttttgagatatggattgtaatgttcttaaattgtgtggatttagtacacaaacttttctttctttgaattttttgggtggttgtacatttcgaccaacttgcatttcattgattttgttactgttctatttctcgatgatgttgatcttggtttctcgcggttttatatttttgcaactcgatttgctttttagttccttgttagttcccttgacagttttggtattttttttttcttctttcggtgtatgacttagctcaaattgagagaattaaaataaagaaaactgagtttggatttgaggaagaagaagaagagtaagcggcagcagtagcagcagcaaccatgaatataatggaaacatcaataatacatcatgtatgaattgtgctacttagtctattgtttcttgctgaattcaattggtgtcaccatgtggcttacttcgttttcctgatttatttgtatatggtactgttttcattctttaaaaatttttggtttttctttacaagttttgtattattaaattgaaaaagtaaagtactgtactctctattgtagaaggaatattgtgcgaacgcatatgtttatcttttaatttgttaaacttcacttttcaagggtattttttttctctagcaaatgagtaaatatatgtatgtttgaactgggtttggtctaaactagtgtttcttttttagtctaaatagagagctttaaatgatagtttgatttgcatttttaataggttcatgagcattgtgttatgcaattgaagaaaaaagtgaagttttaagaaagaaaacaaagttaacgaaaaagggtaagtttttatttatgaatttatatttcataatgattttgcttattttttattgatgaatttatttttctttggcatatccaaattagtgaat

SEQ ID NO: 107345 - DNA, 638 bp, Cannabis sativa
aaaatacaatagctacccttaaaaaaataatagaattttatttttaaaaggataattttataattttactaatcaattttttctccataactttctacctcacacctaatataaaagagattaacaatcctctctattcctcttactccccattctctctaacctcttcatccatcctactctcctttcctcctaccaaacataacctaagtattttttagaagtaagtgctacaaatgatgtgtaagaaatataaaataaaatattatatcttttaatgatgtaaaaatatatagcacctttaaagaatgttaggattagagatgttcttagttcatctatagcctcaatattagagttacaactaatataagagacaaatactttagaaagctaaataataaagctttaatgtctaaaaaataaaataatgagccaatctcaattctactaacaaaacaataatttatgtttaaaaattattaaccactcacaataaaccacgtggcaaaaaaatcagctgcatattagaaaatatattgggaaatatataaagtgattttggtatttgaatgagtcaactaaatctcgatttttctatatatgtttctcattattattaagatttttttttacat

SEQ ID NO: 107346 - DNA, 1035 bp, Cannabis sativa
ccgcaccgcgcggtttgggaaaaattcaaaccgcaaccgcactgcgaagaatttcaaattgcattttttttttgcggtgtggtgcggtcgggcggtttgagcggtttgatgtacacccctaatgcactatccaagtagaaagttctatgggtgtcctagatacaaagtaataaattattattattattattattattttattttttaagttatgtaatttaaaatgtgtttcaattggaatttgtaatttttatttcattataagttttccttattttttatttctaagaaatgttgaaaaaggttgtggctttctaatttgggtggacactgctcttcaataaggattcaatcaaaatttaagttgtttaataacaaggttaaaagaacttgaagatgatgttagagacctgcacaaggtttttcagaaagaagatgaagacattgcaaatatttttagtatgaaacttgtaaaatttgagttttttatttttgttctttgttctggtattgtataacttatcataaagtaatgacaattatgattaagtttgtaagttattttgaatgtaagttagttccataaatttgagttgttgagttaattatgtcttctaacattttaaatcatattcaataataaattatcattattttattttttttttggtgaaagttggtgtctgaggcaccatacattaaagttttagttattgagttaaatatatgttccaatattttgagtcatattcattttttgttgtttgtgtgtaataaccgcattttataatatggattagtaaaggcaattagcactaattattaatatttttatagtatttgtagatttaaattatttgtgggccccattgttaaaagtgggctttagagttataatttctcaattttggagattttattaaactcaaggagtattatttatattatatgtgaattatgcaatttttataatttttgctcagagacaacggaaaatgtgatggattgcttgtttgatcacatgggtaagtctag

SEQ ID NO: 107347 - DNA, 836 bp, Cannabis sativa
  modified_base (28)..(35): a, c, t, g, unknown or other
tctaattataaaattgaaaagtaaaaannnnnnnntagaatatgtttttgaaaaatattttcacttttctacttttaaaaataaaaaattgattaaaaaaatattagaaaacgccacctaaatatatatttgttgtaatatttggtgttgaatgtttgaagttgtcacagtaatagattctaaatcaaattggttaaaatggtacaacaaaatagtgcttgtaaatagtgtaacaaatatcatcgccaatgctttttatcaataaagctccaaaatgaaatcagtgcaattatttttagccttgtaagaattcattgataacaaccttcagaaaggtaactcgagcctcacccatttaattagatattttcacgtcacttgtaaattaaaaaattctgaaccaaaatataatcaacaagagcgtgggagtgagaaataagttccatgtaaatgaaattctaaaccaaagccatgagaatttgatgtatttgatttgtgattcaacacagtaagatcctaatttcagtaacccaagtaggaatcagaacaaaatcttttagtaaagccaggaaaaaggaaaaagaaaatataaatgtaaaaaatgagagggatgagaatgtgtagtagtaaagtaacgggtgtctaaaatcatcaacaactgaaataaagtctcattatgatctaagaagccatctagttatcaaattgtaaaagaaaaaaactacagcacagcaagcaaaacttcctatgatcataacatgttctacgatagagtcaacataatccacaaaatttaacagagaacagagaatgataatcttggacaaaaaagactc

SEQ ID NO: 107348 - DNA, 1235 bp, Cannabis sativa
caagcaccaaaacgacatcgtctaaggcgcatgttctgctgtgtgcctgagattattcagtcgcttaaatctgggaagaatctgggccgtaggatcattctggctcttttattgatggctgtcgtatcgttatttgtcaaattctctttcctgagtagccacgtggatgttgataccaatgttaaagagaacaatggacttttgattttacagaccttcaaggatgactcggccatggctgctcaacaggccataaccgagtcccaaacttccatgcctaaacgtgttcttgagagattttctgtaagtaaattaattaatatttcattcccatttttattttattttttaaaaaatgtttatatctcataattaatcataattaaaaacttttccatatatattgaaagggttggaatattttgggtcaattatttgactagctagctgggtggtatggtgtgtatgtgcatggaattttctgcttactcgtttaatgaccatatagctatgacatttcaacgtgtagtaatattaattaggtccttgtttttgtttttatttgtgacatttattttggatttaactgttgtttgatggaaaaagttagaagcttttaatgactttggtatataaatatattctgtatattggtattaatgattggatttttttttcctattttgtataggctccagaaatatggatgagaccaaacagtgacaattttcacaaatgcattgctcgacccaagaatcgaataagtatgtaaaatcaatgtataatcaagcacaagaggaattcattaaaaagattcaaactctaatgtttttggaatttgaattcacttcagggacaggttctaaaacaaatggttatcttcttgttcatgctaatggtggactaaatcaaatgagaactggggtaagatttttatttatgtttttttctcagaaattgcttcttatttattgaaacttctgagtgactttttttttttttttgagttaactaacttttgccataaatgagttgcagatttgtgacatggttgctgttgcaaagattatgaatgctactcttgttcttccttctcttgatcatgagtcattttggactgatccaaggtttgattcttagctttttttggattttgagatattaagtgtaaatagttttattttcaacatatattgattcacatttctaatttcagtgaatttaaggacatattt

SEQ ID NO: 107349 - DNA, 1643 bp, Cannabis sativa
  modified_base (28)..(41): a, c, t, g, unknown or other
tctaattataaaattgaaaagtaaaaannnnnnnnnnnnnnatgtttttgaaaaatattttcatttttctacttttaaaaacgaaaaactgattaaaaaagtgttaccaaacgccacctaattatactcgaagtgcattttttaacatatatatatattatgtacatatattaagaaatttagaatcttcattaaaatgaaattaaggatctactaacgtattgaaaaagtgaaagaaaatgatttggatagtttaatgaatcatgaggtatctgagatagtttaattctaagaaatagggattgaatcctctgatcaatgtgatttatttttttccaaacgtagagtgcataatagacggaagagagagttacctcttccgaatgtgctagcactcagagggcctccatttggaatgactactttgaaaaagacttccagtttcgtctcttcattcattggttccgaatgtaatcgggtccattcttccaaccaacatttatccttctttatggctttctttgcctcattcgtgaagatttatgtgatgacttcttttacgtcaacaaaattattgtggacgttgcgagttttgtaggcatcacttcttcaatgaagggcgattagaccaacacgcatgaggttcgcggtgatgatcaaaccttatactctcaaagtttcctgggaaaggcctttgtacaaagcttctctttccagcaggaaaggagcgagttgtggatgagagatatcgtctaaaaagaaataaaaaaaggaggcctaattagattttattagagattgaaagaaatcctaaaagaagaagaaaagtggcatcaatcatctgcaatgttgaactacaacgacagggttggaattcttttaaaagggaagtcagtggtgaagaaccagtattgctgaaagtcatgggtgtattttaaggtactatttggacaaatcatcaccttagaccgtttctccagcttgtagaaaccaaccttaatccagttcttccgcatgggatttgacttcacttggtagaagtaaagaattttttctagtcttgaaacctccacctttagatcctttcacaggatgaaccgtcccaccaataatttgtaaacttgggggaatcaactggaagggcgttatacctacttctgcacgtatacgtgcaaagtaactccagagtggaagatgtgcccctacttccatgtgtgcccagctccagacaccaaatctattctcgcacttgccaggtgattctcctaacaaggaaagcctattccaaaacaagccacatatattttgaggccgcgctcctcttcgtaggcccacagtgccccataatttctgaatttatcagtgtgttgatccatctcccattaagatgaattatacactacttgtggtgctttggctctttcttattccagattctccacctcatcaacttggattgcattgaccatgataacaattgaaaaagagtccttcccaaaaaattgcttggaaaggtccccaccagatcctaaatctgggagcaagatcctcaggtagggctgagcatcggtcgaattggtcggtttttttcaatattaaaatctaaaattcgattttcggtctgaattggtgcaatccgaaaa

SEQ ID NO: 107350 - DNA, 1973 bp, Cannabis sativa
gggaagatcacttgatacacttgcgacaggtattgcaattgttacagcagaatcagttctttgctaagggtagcaaatgccaattttttcagaactctatagaatatttgggtcatttggtttcagctgaaggtgtcaaagctgacccacaaaaagtggcagcaatggtggattggccacaacccaaaaacctcaaacagcttagaggttttcttggtctcacaggttactatagacgttttgttgctcattatgcaaccattgcagctcccctaacagacttgttgaagaaggataatttttgttggtcttcccaagctaccatagcatttgagacactcaagcatgctatgaccaccactccagttcttgccttaccggatttcttcgaagaatttgtgatcgaaacggatgcttccaatgctgggattggtggagttcttatgcaagcgggtcaccctattgcttttttcagccgaaagttagggcctcgatttgttggtacttcggcttacatgagggaattgcgtgcgattgtcgaagccgtaaccaaatggcgccaatacttattggggcggccctttgtgattcgcactgatcacaagagcctgaaggagctccttactcaggtcattcaaaccccagaccagcaacaatttcttcagaagttattgggattccaattcacgatcgaatacaagtcgggtaaggaaaataaggctgctgatgccctttctagagtgtctgatggtacacttttgtggttgcaaacgacattgtcctcaggttgttttgatattttggaggaaattagacaagaaaatgtcaccagccctgatctatgcttgattcacgaccaacttcagcttcaaagcaataccttgccacactacaactcgcgagaagggttgctgtattttaagaacagaattgtcctcagtaagcactctcacctcaaaaatactctcatctgtgagttccatgattcacccattggaggtcatgcgggaattgaccgtacttttcttcgcctgagtgcaaattttttttgggaagggatgcgccaggatgtacgcaaatatgtccaatcttgtctagtgtgccaaacggttaaagcatctacgcaagatccatatggattgttacaaccgttgcaaattccggaacgggtttgggaggatttggctatggactttatagttggtttacccagttcttatggactcactaatattcttatggtcattgacaggttcaccaaatatgccaattttggagcactaccgaatcagtatacagctacaaaggtcgctgatctatttactcacatggtgatccgagttcatgggatgccacgcactattgtgtcagaccgtgaccccattttcacaagtgctttttggaagaagttgtttgaactaatgggcactactttacacatgagttcagcttaccatcctcaattcgacggccaaacggaggttactaacagatatgtggagcagtatttgcgtgcttttacaacagacaacccgaaacaatggagcaaatttctctcttgggcggagtatcactacaacactagccatcattcagctattggaatgacaccatttcaagcagtttatggccgagtaccaccctcaatccttgcttacagccgtggccctacacccatacaagcagttgaagaagacctcttatcccgtgatgccattcttcaacagctcaaagaaaacttacatcaaagccaaaatcgtatgcgacaacaagccaataagaagcgaagagatcatgagtttcaggtgggtgacttggtcttagtcaagttacagctgtatcgtcaatctacggtagccaaacgccttaataccaagctttgtcgacggtattttggtcctttttcagtcattgctcgtcggggtacagccgcctacaccttggatttaccagccgggagtcgtattcatcct

SEQ ID NO: 107351 - DNA, 2688 bp, Cannabis sativa
catcattacgtgggtgtaagggaccaatgacatttctagttgagcttgcacaatatttgatgtctaaaaaaattcatttgaagagcttgatcggagggaaaaagtacctgacgattcatgagatcgacgtagtatttgttgtcgaagatgataggtgttcggagatcttgaaaattggctatcatcatacttttgtcttcgattgattgggattttgagacgttttggaagaggccattgttgttcgagtggctacatgggcatccacgaatgaatcgctcgattgggattgggagtgggaatggaagagaccattattgttgcagtccgattttgatttcttcgaaagaagagaggattgctcgattgagattttgagacgttctttgaattcgttattgaaaagaagataggatcgatcgatcttgattttgagaatttctttgaattcgtgaggccattgttgttgcagtagtgagaccgttgttttttagtttcttttacatttttattagttttttttttcttcataagaataataggtcaacggcgttataagaatatatataaaaaaaaaggattgttaaatcaaaaattgttattagatagtcacttttaatataaagataatggtatatataataaaaattttattttttaaaattttaaatttctttttaaagaaaattaaattattttatttttttattaactcaacattgaatgagtaaaaatatttttttttacatagttaaattattattattattattataaaatatatcaaggcttttgggaacgacaaaagcagttatttggaatttgaacatacgattaattaagaaaaaaccatttgtatcttctgatctcattcctccgtcgccgactgaatcactctcagatcttctcctccgccgagtaccggtggtgtcgtcggcctcgaattttaaccatcggtaatatttttaggtttttttctttttcttttttcatatttcatatttctgagtcctcgcctccaccgtgaaggtaatatctttctcttttttagggttttttttccgatttcgttcgtcattcttattcttcttttttttttcagtaagaatcttgggtttgctctcagtctcaggccacactccggacactaggtaattcttgttaatgttttcttttgtcattttttttttcattctttctataaatcacaaatcagggcacatgacatgtttcctttgtttctgggaactagggatccaaacttgaatatatatttccaaataacacacatatgtccctataaattacctttattagaatgaactacaatgtccctttcatttccgctttctgtttgttacgacaagattttctattgtgatttggaaatcatcatccgattcaatccaattagaccttaaaatctaatccaatacgatctaattactaattaagattggatatttgttttttaattttttttagaaaaataacttcaggaaacaccacccaagagcaaatcactcaagggggtcgagagctaacagattcattgataactagcatcagccaaaatagaattctaaatacaagatggatagccgagccactagacaatactagcagtagctttcaatgcaaaattaacaagagagtcagccactgcattaacagttctgagacaaaaattaaaactcacaaaattcgtattaagcgaactgtgtcatgtctgactattttttattttgtgtgaaggttgtgtcgactcgcgcttaattttttcgaccataattcgtaaaatttgtgtgtcaaaactcgctttgccacccataaatttataagatgtggcttctagtctctacactacacaaattaatatattaatgcttaaaaaatatacatattgtgaattttatatgtaaaaatataataacttatattaataaataaatttttgataaaactagtacattaagtaacgacaagaaaagcactttgtcgttacaaaacaacaccgactttatgtcattcatccaaaaaaaaaaaaaaacccttggtctgatctctcctccgccgcccactacaacgctgctctgaaacaatcttctcctccgccgagtagcagtggtgtcgtcggtctccgatcttgtcctactcggcggtgtcgtcggcctccgatcttgacctactcggcggtgtcgtcggtccccaatcttgaccggtaatattcttttttagggttttttttattttttttttcatatttctgatcacgatctcaacattatctcaatatctcatctcagatctcagtcctccgcgtacgacggtcgtgtcctcacctccgtgacatcggtatgatcttttttttttccttatggattcaatgttgtgtgcttggatcatatcttctgatgttttgaatgagtctgttaatttacagatatttgtttggtaatacatatatctataagaacttagaaattggtaaagaatgtactaaacccccaaaatgtcaaaaagtagcactgtaagtcaacaatttcattcaaacttttcatcctcttttgagtgttagatctactgtaagcgtattgtacctttattagaatgaactgccctttcatttctgctttctgttaattacaacaagattttctattatgatttgagtgtttaatcatggga

SEQ ID NO: 107352 - DNA, 2754 bp, Cannabis sativa
aaaaatttaaaataatttacaaagtaaaaaatagaatttaaataacttattttattcgtttataaaataaatatttgtacatgtatctctcttgattcttgatccaacacaaacattaaaaaattaaaataaaaaaaaaattacatcattaaagcaaccacagtctaaaattttacacataaaaaaaaaaaaaaaaattacaaatgtgaccacagaatccaaattttgaacttaaccgtacatatccataaaaatcaagacaagagggaaaaatctccgagaacttcaaactgagacaatcagaaaacaatttttgttttaggttttttctattattttggtggaaactattctatttaaaaaaaaaatgaaagaccattccaatgtaatagcagaaaaaatttaataatttttgtatgtattttaaattttattatattcctattcctaatcctattctatattttcattcctcccaactaaaagttagttactttctttagttttttttttttttccttaaaaaaatgtataagtatgattaaaaagttattaattaaacttctttaatgtatttatttaatggttacacaagtaaaactaaaaatatatttatttttaactttttggttcagaactttagttggtcttgaatgaagttttttagttagcaaaaacaaaatattatgaagttttattaaaattttggtgtctctacgtaatataaaatttcacatatttattatatcaaattaattttgtaagttttattaaaatttttgaagtctctacataatataataatataaaattatgtttaataatcgcctgttttatttctaaacttacccatatatataaatgtatatatataattagttaataattaaaagtgattgataatatatgacatatgtgacatattatacgatcaaatcatacttaatattattgtacctcggtgagacaggtgcagatatttttgattaagactctcctatgttatatatatgtggctaaaggaaattcccacaaatatatatatttaaactttaaagcaattgaaacaagtaattgataattagataaagtccatgtatattgatttgtggcaactaattttgtttttttatacaaataaaaagctttgaatatatatagtaatagtataaaaaaaatcatgtcaattagtgtaatatattttggcacatatattagggctacacattaggcaggtttggccagattaaagttttttcggtttgagtttcgggttttacaaagtgtgtgtttcaagcaagcacataaataaaactaaagtatggcacaagaggtttgacaatgttggtaaaagagcattgcatgaactaaacaaacagagattacttaaaaaagtaaaacttgagcagttagagtattgcgttcttggtaaagcttgtagagtcaaatatagtactagaaaaatggataccaagggaatactgaattacgttcatagtgacttatggggaccctcgaggacacgatcacactctggaagcatgtattttctttctatagttgatgatttttaagcactagaagataatgattgagaatcaaaccgaaaggaaagtaaaatggcttacaacaaataatggtccggaatactgttttgaagagtttgatgtattttgtaagaaggaaggaatagcaaggcacaagactgtgaggaagactccttagcaaaatggactcgcgtagaggtttaacataaccttcctggaaagagtcaggtgcatgttattgagtgctggattgcccaaagtgttcagaacagaaactgtgtccactgcagcttatttgataaataaatatctgtcaacagtattggatttcaagcatcagatgaggtatggtcagaaaatccaacaagttacgaacacttaaaggtatttggatgtgtttgttatgcacacatcaggcaagacaaacttgaggctatgaccttaaagtgtattttttagagtttccagaaggagtcaaagaatatagactgtggtgtctagagcctggaatgaaaaaatatataactagtagggatgtgacttttaatgaatcttttatgggatttattgacaaatctgctggaagtcaagccaatattgatcaaaatgaaatcgaagctttggaaactgatcttgaggtggagcctctggtaagagtggagattaaaacacatgtagatcatggaagtaatgattcggaagacgattccaaaaataataatctaaaaaagttataaactggctagagacaaaacacggagagaagtaaaggctccaaataggtaagaacatgttgatttaattacatttgtatttcatgttgccaatcagattgtgcatgaagtgcctaccaactatgcacaagcaataaaaagcaaagaccacaaaaaatggaatgtagctttgtcggaagaaatgcactccctgaagaagaactgggcttgttgcaaaagtctctgtatggtttgaaataatcttcgagatagtagaacaggagatttgatgattatgtgaccaggataggtccgaagaggggtaagcttgatccatttatacatttccaagagagaaatggagatactttgtatatgttgttgtacgtagatgatattctgatcgccaacaagagtgtgcaaaagatcaagcacttgaaactccagctaaaatcgaagtttgaaatgaaggatttgggtccagctagtaagat

SEQ ID NO: 107353 - DNA, 1603 bp, Cannabis sativa
cattgaagaaaagtattgcaaatatgaaaagcaatgagccaatgaaagtcaataaagatgacataccaccgaagatgatgaagatgttgacgctggagtcctcgatggaagattttccagcccaagcttcacccagttctggttttccttctctgcttcagcgagaattttcctctcaagctcaaaatcaaattggaaattactccgaggtatctctcctacatatggtgacagctgaggctacaaaatgagacaataaagccaaattatactaggttgcttctcttcaatagttcaatacagataacaaagaagaagatagtattcaggtcaactgagaaaataacgcaaatatcacactaacaaagtaataattcttcaaaacaatggccgaacattgaattcacactgacgacataatttaattctctaagatggcgtttggttggaggtaatgaaatggaatagaatggaaaggaaataattttcattccattcttttgtttggttgtatttaaaatcattggaataccattccaatggaatgacctttctatcattttagtggaatgactattccattttaaaatggaagaaaagaccattccaatacaaggtttgaaaaaatttaataatttttttataaatttttttatgcattttaaattttattttattccattccattccaattccaattccaattctcattcccattcctattactattccgatattttcgttcctcccaaccaaacgccacctaagtgttggggaaaatgaaaggccgaactacttcactagtatggacagaggtgtaaatccaaaaaaatcactggtataataacatgaacaacggctacattcatagatgtgacatggcagatgaaacatccggttacccagctcgaatttcataaaaaagacacaaaaatgtatattatatataaacatatcgccagtggtgcaactatcatatagatcatataccctttgaggcaatagtgcaacagcacagatctaaacaaatcaaagatatactgaccatgtatttgacaaagaacccaacaacaaaaaagcagaattccttcaccaaatataataggtagacacatttatgctcctaagaattttgtacgactttctattacaatcttcattactgtttccccaaatcatgagtaatcaaattggtaactccaacaaaatatcgactgtggacaaaactagcatcacaaaagctcattatcgtcgaatcaagcaaaattcgttgttgtttcttatctcccaaaatacacagggttcaatcgtgaagttaataaagtaagaataatcaaacaaagtacaagatcgctactatggctaataaagcatcataaccagaaaaaaagaagtcggatcttacaggaggtgtgatccgatactccggctttatagttacgcgtatacccaatccagctgcacattcagaaaacaaagaaaatcgaaaagttggtcaaaattccaataataaacaacaagacctgcaataattccctaaccctaacccttataagaataaaaagaagtgaaatttgtagacttacaagaagcagaagaggga

SEQ ID NO: 107354 - DNA, 2408 bp, Cannabis sativa
aaaaagcccttatatttaataacaataataattctaactgaattaactgttaagcaggtcttgagatttagtggattataggaaaaaaatattttggcctttatttagagaaaaatgtaatatttttaaaaatcagtaaaaaaaatgtgtaattttaaaatgaaaaaaacttttttttggaccctgaggttagtgtgtccaagcctagctcgtctatgcccatggccggacatgctgttatgacagttaaagttgttagactttaagttttgtttggattacattccacattcatttatatgaaattttattgaacaatgatcaatgtccacaggtgctgaattttgtgaagggttgtccttctttggtatttctagtaatcttgttacttattttactaaagaattgcaccaaggaaatgcggctgctgcgaaagctgtttcggtttggcaagggactacctacctcacaccctttattggagccattgttgcagatgcttacttgggaaaatattggaccattgctgttttctccaccatctatttcatagtaaaattctcatcttggtgtactcttactgatgaaaagagcacttttggcttatgaatttggtgtttttttacagggattgtgtgccttgactctctcagcatcactaccaggaccaagctcttttttcttcatatgtggactttatttggttgctttagggactggtgggatcaaaccatgtgtttcaccatttggtggggatcaatttgataatactgattcaaaggagagatcaaagaagagatctttcttcaactggttttactttacaatgtccattggaattttcatagcaactacttttcttgcatggattcaagataatgttgggtggggtttaggatttggtattcctactatgtgtatgggcattgccattgcttgttttctatttggaacacccttttatagatttcaaaaaccctatggaagtccaattactagaatgtgccaagttttggttgcatcctgtcgaaatcgaaatctcgagatgcctaaagacagtaatcttctttttgaaccacaagaaaacaattcagttatggaaggaagctgcattaaactcaaacgcactaatacattgaagtaattattcttaaatttcctatcttttgtttgtgctccccatttattgtttctaataattaatctcaatttgacacagatttcttgataaggcagctgtgatgtcttctggtgatgagattagtactagtgggaagtccttcaatccatggaggctttgtagtgtaaatcaagttgaagaattgaagagctttattgggttgttaccaatatgggcatgtggaataatcttctttgttgatgcagctcaagtttctacaatgatgctagaacaagggatggtaatggacacaactattggttcattaacaattccaccagtttcacttgcaacttttgatgtagttgttattcttttggttattccaatttatgatagggtaattgtaccctttgttaagaaatttacaggcaatgaaaaaggcttcaccgagttgcaacgaattgggatcggacacttcattatggttctaagcatgtctgcagccgcggttgtagaaatttatagactttaccttgggaaagaacttggattagttcaccaaaaaataagtgtaccacttagtatattatggcaaatacctcaatatgttttggtgggaattggaaaggttttcacttcaattggactaatagagttgttttatgaagagtcaccaattggtatgaggagtttaagcagtgcattactgcttctaaatatttcattaggattctatttgaactcttttattgttactatggtaacttacttctcaacaaagggtggcaaggttggatggataccagataatctaaatgaaggtcatcttgattatttcttttgggttttggcagctcttagcttcttcaattttttggtctacataatctttgctatgaagtttgcaaagaataagaagtctgcttattattaagcttaatttgtccatttcatggaggtatcactttcacttaggtatgttttgtattaatgattattgaattatgggtcatcccaataatttttattcaaaatcataaaaaaacaattattgattaacatggattttgtggaattgaataagagatgaagaaagaactgaaaaactacacattagtttataaaagagattcacgcgagttacatgttaaacaatcacatagattatgaaactatctcaaacacacattaaacattattgctcataatcattaaatgcaaaatcaatactttatttagagcatcacaaacttatgaaaacacatacctcccatattggcatttt

SEQ ID NO: 107355 - DNA, 1560 bp, Cannabis sativa
  modified_base (1416)..(1419): a, c, t, g, unknown or other
aaaaaaaaacagtataaatgttgtttttgccgtggaacagtataaatgtaataaaatgggaaaaatcagtagtgggtgtaaatttcccaaatcttatcccaaaattatcatggtctccatcctatttcttattaagaaagaaaatctttatcaaaagtcccaattgagacgggtacctgttttggccatactcacatcacatgaaattttcatccctaaatatgtttttttttgtttttttttttttaacagacatccctaaatatgttaatgacgtttatttatttccttagaattttcaaaagaaaatagaggtataattaaagtttctctaaattttcaagagtatccatatcatcattttttttaaaaaaatttatgattttattttgaaaaataattttatttcataaaatagcaaaatagttatgtgtattttactattggagcatttttgtgaaaaaattgtcaaacctttatacagatgagagaaagaataaaaaataatactctgatgatgatgctcttacatgtctcttaaaggcagacccacataaagctgaggacattcatcccctaaaaaataaaaataaaataaaaaaagaatgtaatagacaccccaaaattgaatacatcaatgcaccccttaaattcttaataattattggatgtaatattaagtggagtgttgcacacagaatataattctttttctcacacacgttccactcttctattttatcaaaaaaaaaaaaatcccactcccttaaccaccaaatctctatttttttgttacctaacccacttttctctcctacactttctatttcactttctcactgcataaacttgatttcaaggctcattttttaaagttggtcaagttttaaatttcaaataatcgtttactctcagcaacattattattgaattatgcatcaataaattatctttcatcaggtgaactcccagtctttgaataaattgaaataagaatgaatcaaaataaaattacaaaaaaaaaaatgcactaatcttcacctttaccggagaagacagtctgggcggtgaagagaatgacttctcgttttccctgaactaattttccattttaatcatttttaattatcctttttaatactttatggttagccaggtggaccaatgaaataataattaaaggtatatatgaatgcttctatattgaccaaatcaactaaagaataataattatatcccactttgactaattcaaatccaattttaattcaatacactttctaaaatttttatatgtggaccaattatactacatgatagtagaactattaatgagtctattttatgggtgtctattaaagaatttccctaaaattgtttaagttaaacattaatttaatcactaatttaatatannnnttaattttttaaaatatttatataattttttggtaatttaaaaataacatattcttagaatcaatttatgtaactattgtgtaattattaatattttaaattttgaaaactaatgtataataatttaaaattatacatttt

SEQ ID NO: 107356 - DNA, 1125 bp, Cannabis sativa
aaatttgccttaaatttctttacaaggatttcattgtgagttctaaatctgtaaaatgtgcaataaaaacagatatggaaatggaagatgatgatgagtaacctgagatagagaaggaacggtggtgaagtgcgttggccggaggatccaattggggagcggcggcggcggagatagaagaagtaaatatgagaatctatcactcccatatgaaatagggctctaatttgattatttatttatttatgaatatttagattttttttttccaaaacttttaccaactcttgattgaatttgaaaattctactcaactattaagattattgaatttaaaattttttgttctattttaccaaaaaaaaatctaacgtgcatgaaataaaagtccaagagcacgatttagtacatgttaaagtttaatggatacgattcgataaaaattaaaattcaggggcacgatttagtacataacaattatctcgttagtataattgaacgaaatttgacagaaatttttaaatttaacaatcttaatagttcggaaaaaatttaaaatataattgagtatatctcaaaattcaataagtaaatattctaattaatttttattagtgtctccttaaagtaaggtgaatattctataccaatttaataatatacatcatttttctgtttttcaatatttctggccaatctttcatttttgttgtaccgttttcacttcaagtactctgatggaatctatctaaatgaaaacacatcaaaacaagtgtaaactcacataaaataaacttaaacaaactaaatttttcatccaaagtgagtcaaaaactattatcatttactcaaaacaaaaaatggagcaattgatactaggggtttatatttttgagggctactaaaaatctaaaaataaataaataaaattcgtttaggaaaatgtcaaatgttttgtagtttgtacaagtgagttcaaatttcccatttttgttacttatttcgtaaataatatttataaagtataaacctatatttactatatttgagtacctattaaacattcggcctattagctcagctggttagagcgtcgtgctaataacgcgaaggtcgcaggttcga

SEQ ID NO: 107357 - DNA, 3310 bp, Cannabis sativa
  modified_base (63)..(67): a, c, t, g, unknown or other
  modified_base (531)..(558): a, c, t, g, unknown or other
ttttaatatataaataattttttattagggtttagggttttaatatttttttattatataaannnnnttttaatatatataaatgtaattagattagatcggtttttaattgatttttgagattgatatccaataatcgatccaattcaattagaattaaacttttagcatccaatccaattcaattgtaattggatatccaactttttgtaattggattggattggatcatttcaattggattggattggatgatgcctacccctaaattagaatgatgttacgattctattaaaaaaagattagttaattgaagcaaaatcttagtttcaccttgctactaattaattttccaaactttggtggtaaccaaacctgaaggagagaaagagatttaggctcagatcttgataatactctgcgacagaaaggaacaatggttagagatctgctgcaatcaatgtaagattttctaaactcttatgtctttaatttcactgttttagatatattcatatttaggatgttaannnnnnnnnnnnnnnnnnnnnnnnnnnnctagtaaaatattcccaacactaacctctcctcttctaaatcgagttcttttcgacgagagcatttcatcatggcatctgtatagaaagaaggaaatccaagtagtcaaccaccctaactacctaatatagaaagggagttgggggtcgtcccccataaactgcttggagagatcccaactagactcactacttaataacgatggctccaaggggttacttgtttcgaattagaaaccaagaacaatgtaaaaaagaagacgagacaaattagcagtcgaccaaaaatctcaaggatttagggcgtaaaattggccagcgtatttgatgaaattcctaaacaaaaatttcagaagtaaagcaattttaaattcctaaactgcctacggtggtatttgcacaaatgagaaaaccctaattttatccccgaacagagcatgcaaatataagctaaaacaacaaatttgtaaagttcaatacacgagtaaaaaatatgtacctgatgtaggcaaggggagatttaaggtgattgttgctaggtttggttcaggaagacgatcgcaactctcctgaagatgaaaaatagaggcgatcaatgagtcgattccttctcaaagtctaagcttgcggtttcctctacagtagccatcctgatcattggcgatggaagatggggatattctcaagccctaattctcagcaacaggcaaagatagtaagctactgtatcttccaggatgatcttccttgaatgcaattcaaagttcttggatggcaagaagtttggtgtgatctgggagtttgaaagtttgaaaaagaaggtaaaagtggtaaccgaaggttatcaaaggtacttataccccaagacagtgatccacatgaggaaggaatggatggccacgatcttttcagagaaaaatcctcatccaacggctagggagaccaaatatttatgagtatctccgcatttaatgcctctcaaaatcaaggtgtgaagtaatgataaaaattctctttttcgatttgcatgccaatcagtgaacaactgccaaaatatagccattcctggaagatgactcctcgacaacttcgtcctgactcacgctcgactgccacgtggatgccccattatcataggtagaatttagcttccatggttgagtaatttgggaagagtcattattttcttcctctaatatccacacatccaaatcatgagatcagagcaagcttccatcatgagcagcatcttgaaagcttgggggtaaatgttattcgcattttcggaatgggacatgtggattccatgttagtattctacgccccttagtgggaccctcatcaatggtaaagtggaccaagcccatctagatatgtccttccgagagttaccttggtttcgtgctcgggatactttccgccttctatagatcgagcctagaagatagttctggagttgtgagcccagaggggaaggatgcatcattctcgaaagattcttccagtttccctatttgtttcctcctatgaataaggaaacaccagctgtcagattgggccataatatcatatcacgatataagaggaaacttcctataacaatcatagggtactcattataatccgatgtggctttgactcaatcaaatcaattatgatctgcctagtcagcagatcacattcttcatgggctcgacttcatgagtaagcccaaagatattgttcagttataaactccctaatagaggaaaaaagggaatccataatgtaattccccaactactataaatacccaactaatctcatcgattaagggttgaattctcttacatacttttgctcaggcgaatatacgaacatacaccttgtgtacttttgagattattataagtaatacattattgaataaaattgactcgtggactaagacttgttaacgccccaaccatgtaaaaacttgtgtgtctcttattatactttctctgtcagtcattatttctttagttcttattgtttttattttgcttctgaaaatctcaggaaacaatcccaaaataggaactataacaactcaattagacgtgatgtttagggtaccaactatcgaacctatgggcgataaggtcaacacagttccaaatgtagaaattataatgactatctttaaattgaactaatgttgttcattcagccctaagaacaataagagcccatccacaagaaccaagattattacctcgggaggcctcatcttcaactttctgaggggtcctatttttaagataatgactacaagccacataatctcagtcttcctcttccttaggcacatggacttattgccactttggaaacttggggattttgaagttgtttgtacattgatccctgccaagaagggcccatgccttcaagttattgtcgtacaacaaattgtcagcctctcacaaaccatagggaagaccaagaaagatcttgtgtcttttctcaatttctggggtggggatgggtctcctagtcatcgccggaaacataacaaaaggacagaattagttaagtacaaagaacttaaagaaaactcaaaactaagaatttaagaggagttagtacgtacatatgattcaaaacttggttgtggtgattagatatagactagtggtccaaaagaagtcatccttaaactcctttttattgggtaacctcacaatgatcttacgatcatttgtctgggtcccaagataataaaagtctcc

SEQ ID NO: 107358 - DNA, 1477 bp, Cannabis sativa
  modified_base (260)..(261): a, c, t, g, unknown or other
aatgccaatttcgatgaattttccggcgccggcagtaactccgacgactttttcgtcaccgaccgctactctgacaacttttccggcaccaacagcaaactctggtgacttttccggcatcaatgacaaataaaactttctaaacgaataaaaatgttaaatatgggatttgaaaacctaattacatatatatgacatatcaaatactataaaaagacctaaaaataaaaaaatactatataaattggtcaaacttaaanntgccatatttatcataagaacttgtaaaatcccatagtaagtgtaatttcctcttgtatttatagtatggattgatgctatacattaatatgactagagtactgggtataggttgatattatggtcaatcatgctatagtcaagaacatttgagactaagttatacgcgttggacacagattataaacttatggcaattaagtgtacgggcgcctaattataggtcaattatatgattatgttttatgttttttttactgagtctgtcgactcacaaatatattttctaagtatagataaaggtaaggcaaaggttgaacaatagtgagtttagagcagaattcatatctagatggttagacctggagggttcagatttttggggcaacatgggctcaattttatagtcgttgggtgacacttttgttacgcggtattttgtataagtttgaaaaataaatttgggatcttgagatatgtaaaattttagaattgaatatgtttatttagtgaagtttataattatttaaaaaatttaaattaaacacaattttacactaaaccatttggttagcaaaggttagcacattaattaagaaaaatacaataatgtgcctaagctagcaggacattattacataagagtttatttattaattaagatactttgtgggactaaaatatgtttaaataataattttatttaataattattaaatagataaagttaatatttaaataaaaggattagataatgggtatttttgaaaaaaaaatagattgtttcatttaattaaataatatggccaaaatcaaagccctaaggcccattagtgaattcagcctagacttatgattttggactcactatttttttttcttgccgatttaatctaaccctagtccattcgagagcttataaacagaatgtgatagagctttgatgaatgagaagttgttttaagcgaagaaaacactaaagtcctaattagagaaagttctctctctctctctctctattgaattttcaaattctctctctacactctctctggaaattgccctatagtgtgttgagtaccaacccactctattcaaggtggtactgagatctctgtagaagattgtgtaaaaaaagcgtttgtaaatttaagaaagagacccagattcattacttggcaatatcttgcttcataacaagaattaagggttaaag

SEQ ID NO: 107359 - DNA, 1898 bp, Cannabis sativa
caactcggtaagccatatggattaggaatgaaggcacagatgagaaggaagaattatctgatcggagcacaatggttgaagacgggaaacgaagattctacgtcgacaattggaggttctgtttgccggtcagatgctgaaaatccagttgctgatgctacaaaaatcatggagattgattccatgatatcaggaaataaagatgataccataccagctggagataattgctatgatagtaatgcgaaagagagaggatcagggaaggctggggggaatactgatagcaataaagtggaagatatagtcaaccttagtgagaaggatatgacaattatgctggaaaataagaagagaaggatggatatggcaactttgagtggtcacgtgactactggcaatatggaaaaccacatgattgaaaaggaaagtattgttgggtctgagccaaaaaacatattaaaggtgggtcttggttcccaagcccaccaagcattatgagtctattatcttggaatttcaatgggcttgggaacccatgggcctatcaattcattaaggaccttgtggtccaaaagagacccaattttgtttttctatgtgaaactttttcaaaaaaggatgttgtggagaagcttagagtatcacttgggtttgatggggcattttctgctgatgttcaaggtagaagtggaggagtggctatgttatggagacatgaggaagaagttcagttgcttggttatggttcaaactacattgatgtatcaatagatgctagggagagtgggagatggagattaaccggtttatatgtggagccaaatagaacatatcgtaagaagacatgggatctcattagaggtttaaaagataagtatgatttgccttggtgcattattggcgatctcaataatgttacatcgcaaaaagataagcgtggtggtaatccatatccgaattggcttattgagggcttttgtggggtgttggatgagtgtggactccatgatctagacttgagtgggtacccatatacatgggaacgtgggcgtggtacggatgattggattgaagttcgcattgatagagctcttgttagtcaaaggtggctgagtatgttcccttcggtcaagttatacaatctggaagtctcgacctctgatcattgtcctttatacgtgatgcctgttaatttaagccatacggttgctactagcaaagtcttccgatttgagaattgctggttgaaagagcctctatgttataaggtggttgaggatacgtggaatcaatatggagggagctcgattatggagaagatcaaaggttgtgggaaggttcttattgaatggggcagagattactcggggaattttaaagaaagaatcaaggagtgcaaagctgaaattcgacactggaaaaaggggagagattcagtggccattagcaattataaagctgcccaaataaagctcaatagtgtgttgctacagcgtgaaattttctggaaacaaaggagtaagcagttgtggcttagggagggtgatcaaaattctaaatttttcaatgccaaagctacttctaagaggcgtaacaatgcaatacagaagctaaaaaatgatgtgggagcttgggttggatgggaggatgagcttccaaatgttgttactgcctatttctctcagcttttgatgctaaagccgtggactatggggctgtaactacttgtatacagccaagaataataaaagatcagaatgctcaaagggttggtgatgttacagccgaggagattaaaaacgccttgttccaaatgcatccataaaaatctcctggtccggatggaatgaccccgggattttataaaaaaatttggcacattgttggtgaagata

SEQ ID NO: 107360 - DNA, 899 bp, Cannabis sativa
tactattatttttcttggagccacccttttgattgtccagcaccacatttgcacttaaaattatgcaaataattaaatatacttgtacttgagaaataaattataattttacagtatactatatacacttaataacattacttcacaccaatttttgtaatatattatataattgcatgcaagagtagtgtttctaattacgttgttaataatatataatattaggtgagaatggcgaagcctttccaaagaagatacggctcaggtcaaatttgctggttaatattagaccatctccgggaattcaagtaattaatctttctaactattaattaattaattaagtagtaagttatgtatacacttaataatatttataaatatgcagagtttggctgatatgatggagaagaatagcgaagcaaagtgggggaattggattggttatgtgctccttccatttgacatttgtttaagggataaccccttggattatattcgcacagctaaagctattattgatcgaaagaaacactctctcgaagctctttgcactttctccatttctggtttcatttttgccctttttggcatcaaggtacgtaacctactacgtttggatcacctttctctcgtaaactttttaatttattgatgatgatgttaatgaataaataatagagaacaagtgctctatttcacaaaatcctgtccgccactacaatggcgttctccaacgtagtcggaccacttgaagaaattggtttctacggacacccaatggcttacctagctggagctacctatggccagccacatgtacgtaatttaatttaatttatattgtctttaagagctctttttatcaacataccacaattttaaaaatattacacaaa

SEQ ID NO: 107361 - DNA, 1019 bp, Cannabis sativa
taaaagtgaaaaaagggttttcccccaaaaattcacgtatgtagtacatgtggcctctttttctcacttaccttaccaacacattataaaggcaactaaagcagttatttctctactgcaatgagatcagacagtcaagacaaagtgcttcaacaagcatatcaacttttattcagcaaaggtaacaacaatcccaacaacatcaatacagctggtaaagtccctatccgtacagacgtttgcacagggacatggggtgaaaatattatcccaattttattctcatgacgtggcatgcttacgtggacagaactagtgccacgtggtagtacaactcactaagaaaaggcaaagtcagcacctgaacaaatgaagatcccgacattcaaacgaggatcaagtgacagaccagctccttcttaggagttggccagccatccctggctggccttatggccggccaaccttgggacagcaccatggccgtctagcctggcctccgtaggggcctggccagccaaggagtgcactgcaggctttgctagacacctctacatgtggacaataggtatgggctacaaattgggcactaaaagcccaacaaaatggctgaataatatctaaaatcaaggacactttggtcttttataaatatctaacaaaccatatggatactaagggatttgaattgtaaacctagagttttaggtttcctatataaaggccttaaccttaggctgaaaatctaagttgtctttaagctggaaacctgatcttaaactctaagtgtttgataaactctctctcttcttcactttctctctcacacacctaccctagtacttctcaacacttgagctttgccagtattgattcatacctagtaatcctaagggtactatagcgtatcctacacatagtgatctagatagtaattccctcagtataaatacaactaaaaagggagtaggtcattatctgctatcacaagggggccgtgttggaaatattttaccagg

SEQ ID NO: 107362 - DNA, 2481 bp, Cannabis sativa
aaagtgacatttcttgtagtgttgatagtagcggttcatgagtttgtgtggtggtggaaggttgtgtgtttgtgcagttgtggtggtggagggttgcgagttcgcgcgattgtggtggtggtttgatgagagagagagagagagagagagagagagaaattattatgggtagtggtggtgtggtctgatgaaaagagagagagagagagagagagagagagaaaggtgaaaacaaaaggcagaaaaaaaatattttttatttaatgattttttttaatttttaattattttgttacgttttataaaaattaatttattttaattttatttttaaatctttatttatgtggcccaataatattgtaccccgtataaattgtgtccatgtgaacaatatcttaattaagtacacatagacaactagtcaactaacctagcagttaactactaaaactaaacaaaaaaagttaaatgctaactgaaagctggtcttaagattttgctatcaaaatttgaactttagatattaattgctactaaaatgaaagtattaaatgtaatattgcaattaactcaaataaataaataatttattttgaaagcctataatctaaaattttattaatctaatcttttacattaatcatcttccctttcctttctctctttgtctaggatgatatagtgaaaatgtcttttcttgtttcctttaattcaaaaatattatataatataaaacaataaaaaaaatcagatccaattattatgacaatatgtgaattatagtttatggaccataatgcaattaagcataacttggaatggaaggaacatagggtagggcagcctacatgttggggtcttggtgtaacaagaatccccaaataagttgatgttctctatgtttgatttatccaatcaccaaatagcaaaattaaaaatattatacattagtctgcttagtccctctcccatgttgaattcaaacacacaatctttctagaaaaattacagtaaataacttcaaatcatatacttatttattaaatgtactcattttgaaacttgtattaaaatgatctattttttcagattatttatattgtcttttattacataaaaaaatcaataatttaaaaattatggtatgcatattagttttgttaaaatcttttttatttgatagttatgtcaacttttttaattgtttatgagttgttgtgagttgttggtatatagattttgttgtacagtatatttttattttgttgtatagtatattatttttcttaaatgatattcattttttattttgcaatgtataatagtgatatataatttagttagcataatacaaatattttaatgtatatatataattttattggcatattatatatatttaattactatttttatatattttaattgtatgatatatatttattttagataatatttaattaatttttattttattatatatatacaatggtcgtatataattttgttgtcataatatatattttaattgtagtatataatttggtaagtgtatacagggaatacttttcaatgggtattatccattgatgggtactaaataatttaattctaaatattaattttaaaaatattaaactactagatttttatccaatagcgaataataaaagagaaagttgaatttcgatgcttaatttaactatttaattaaagaaaatatcaaaatatcttttcttacactaatatcaacaatatgtttatataaaatatttaagttaaactcaacttttattatcttttatcttgccgatttttttttaattattttttttttatctaatggaacaatctcaacccatataatgtaaaaatgagagatttttctaattaaattaaaatattaagcataaaatttaaatttttctaatattacctattcataggtaatactcattaaaagtacactcgtgtatacaaatatatatatattagtaatatatatatttttttttattgttagtagtatatatgttttggtgaatagtatatgtatttattgttatacgatatatcatttttctaaataatatttatggtatattttttattgtacgtacttttgttgacatgatatataattttattagtatcttatatatttttatttttatttgttgttattatatatttcgattgtaaggtatatattttttgttatatggtatataagttttattgtatagtatatcattttattttagatcatgcctgctttgtttttattttattatatataaaggtgatttataattttgtaagtataatataattattttatggttgtatataattttgctaatatggtatataaaattttttataataattttatattatgttattttattttttattataggtatatatgttttgttgtatggtacgtgttgaccgaggttttcggcaactagtaaa

SEQ ID NO: 107363 - DNA, 781 bp, Cannabis sativa
aaaaaattgctaattagccataattttttttttttttttttggttttgtttttgtctttcaaaacaaattaggcttttattttatttatgttgttttcttctgcaagcaaaggaacaatttatccacttttcacttttccttttttttttcttttgggaaaaaaatttctcaatattttttatgttggtttactaaaatctttggagtaatccaatactccatccttgaaattctattactttatctttttagaacttttacttattttatttttatttttggcttcaaaatcttttactttaaaattgacaaagtactagttaaattcatattaattggtataatgattagactaaaacttgcactactcttatatatttcttcacatatataattgttttttcagttttatatactttttaattgccaaatataaagtaataacttatgatataagaatccataactatactttatataagttatataaactgtcaccatacaaactaaaaaaaaattaaaaaaatgatttttcaatcactgcacaatgcttgctacatatttattcaatttctgtaacaatgttaataattgtttttatgaaacaaaacttgacaaaatggattaaatattatacaaaatgactaattatttatatctaaattaaagcttattatgtgccacatcattaggatcggccacaatatttatatatgaattaaaaaaaaaataattttttcataatatatagagtttttaatatgtaatatatatatatat

SEQ ID NO: 107364 - DNA, 1850 bp, Cannabis sativa
  modified_base (356)..(356): a, c, t, g, unknown or other
tgcccagggccgggcctgtctacaatgcccatcaaatttgatggaccacttaagaaaatgttataaataagttttagagttgggcttgaatgaacattttttatttttatggggcttttttttttatatatatatagtacattttttttggttttgaatataagtttgtaaaaatatatacttttttttttcaaaaaagttaaaaaaaatatgagaaaaatagtataagatatctggttacctcttttaaggtaactggttatcttctgattatcttaggtagtgtttggttggaggtaatgtaatagaatggaatggaaaagaaataatttttattctattcctttgtttggttncattttaaagtattggaatgacataaggaatgctcttttcaccattttagtagaatgactattccattttaaaaataaaggaaagatcattccaatgtaacaagagaaaaaatttaatgatttttttataaattttttttgtgcattttaaattttatttcattccattcctattcctattcccattcttattcctatattttcattcctcccaaccaaacgtcacctaagtagagtacttattttcttatatttttttagctttttctagaatttttctcataaattattatttttttttaaaaaaaaaagctataattttgcacacataatataaaatctctaaaatttgtaatttgcaaatttgagattaaatctctaaaactaagtgttaagtcttcacaaatttgagattttaaaagtccattagagttggccttcgaaattagttatttactaccatccaatgaaaaaaagtagtaatcgattaccgctaggaaattaagaaaagtggtaattatttaccatggcaagattttcataatttataaattaaatttagatctaagagtagatgtatatatatttttttccaacatcactttatcagatagaaaaagataattaagtgtcaccaataggaggaggagtgatgtcttatttcatccaaaaaaaaaaaaaaaaactaagacatgtttagtcaaatcataagtcatagcgctaaaattataattaacatcggagatttctgaagaaagctaaacaataaactttaatgtacataaaaagaatgttagaaatttatatattcatgatcataattgtatatataaatatgtattgggtcattatataaatgagtcaaatttatgtggtctattttaaaataaaatttatgacttaagagcgtgattgtcatgattttcatatgtggataccataaggacaattactaatatgatgagagatgcaaataccaaatggtaatgtggtgatgtataacttataagacacgttttgtagcaaaacgttatactcagaaacaaattattgattatacatagattttctctctaatttcatcgaaagacttttaggataataatgatatttgttgctcactttgatcttgaattatatcacatggatgttaaaataacgtttctcaagggtgacattgatgaaacaatttatatggtgcaactagaaaattttgtgtttggtgacgcaaaaaatagatttacaaattaaaaaatctatctatgtactcaagcaagcttcctatcaataagtattacaaatttcatcaagtgattctctcatttggttttgagatgaatgttgttgatgattgtgtgtatcataagtttagtggagatatataggtacatatatccagggacggagggactttagcccatgtgtgggctaaagccctcactcaaatatatacatcaaattttttatatgtaaatatatacatatattaattca

SEQ ID NO: 107365 - DNA, 1373 bp, Cannabis sativa
gatttatggacaaaataatcgattcatccaaagatatcctgctttttgcaggtcttaaacttcccaaccatgaaaaagaatatcaccataaataaagcacaactttttgcctaattgattaattaattaaccaactatttttcagtttatatatttaattaaaaaaaaaaaacaactttctttttctttctttctaaacaaataaataatcaattatttggggttacatggtaatcatatgttggcgtgtttatatgagtaagcaagcagagaaaatgacatttttcaaaaaaaaaatgtagtattttatttcttcttcttttttttttaataaaaaaatagttattaagttcaacaatttggtgatattttgtaatttgctggaaaaagaaatggtgatatttctccctcaataaattcaaaaatgtatatattttccctttaaagaaatatactatgtgataggatttcctaaaaaaatggtatggcaaaccaaaacatataaataacaaataaaaaaaataatgttattaaaaaaaaaaaagtgtccacaaataagattggtgtatgaacataaaacattttcgaccttacactgcattttccgtaatccaccataccatagagtattataatccaatttaatactgttcacatattttgaatatccaataataatattaatattgttcaaaaaaaaaaatatttgcaataataagaaaaatgaaaaaaattataaataaaaataaatcgttcattgttaaaaaaaataaatcaaaacataattatcctattataaaatattatttagggaatcactctatatagttcctccctataattcagtaaaaatatataaaaaaaaattcttttaaaatgtaaaattgaaaaactccctaaaattattacatgaaaaatacaaattaacactttatttacaataatacttccataaggtgtggacaacatttatactttttatgtatttttaattaccaaaatacttcttacactatcacttacacaatcagatgatggttgttgggtggttggtcgaagtttgcatcagacgaaggtttcaattagacgaagattgctgagtggttggccgaaggttgcatcagatgaaggtttcaatcagacgaaggttgttgggtggttggccgaagacgatggttactggatggttggccgaaggttgcatcagacgaaggttgttgggtggttgactgaaggttgtatcaaacgaatgtttcaattagacgaaggttggtgggtgacgaaagtttcaatcagatgaaataactgttagcaaaatattcatgcaactgtaatgcaactgttataaaacattaaaaattagaacagtattt

SEQ ID NO: 107366 - DNA, 524 bp, Cannabis sativa
aataaacatgataaaagagtacggtatattactataaatgattgtgtaaaatatatatacgcttctatatatatggttaaagtatactgcaaaatgacaaaaaatactatatgagcaggattataacgtttcaattttttatttcacaagatgcttcaaatgatcgtcatcaaataaatattaaaaaaggaaaaaaaatctcaggtacctaaaaattacaacacacatatataaatgtatatatattactcccaaaaaatgaactgagaaaacaagaatttcgctagctagatttagaaaaaagaaaagacgatgctaaatattacttgtaagaggaaaaagaataaaaaatatgtatatatatagttatacaaaacgtgtagctaatatattaaagtgtactaaaaacaatgagaagagaggtagctagcatgcaataaataatataaaaggaagtgattattgtttatatgtatatatatatatatatacctgtaacgacgtcgagttcatgaacattactg

SEQ ID NO: 107367 - DNA, 1498 bp, Cannabis sativa
aatgacaagattaataaacacaaatagtaatcggagaaaaaataggaatgaacagagtatggaaaaccaaaaaacaattaaaacaggaaacaaaaaaattaacaccaagatatatattagttcaagtctaatagatcggtatgctctatggctctactccagttttggaacactaccaaatcttttttattgattaagaacatgtacaatacagtcaaaatcgattctctgatgaaatctctcaaagtgtttcaactctcacactattacccaagaatctaacacataacggaggtatctattgaaattccagaagtgtgacagaagtactgtaaccgggagttaaacttaaatattttcgccgcaaattactcatacttatatttatttgtgagtgcttcttgttcaatgttattattgcaaatttcatccataaaatgaacaagacaaaaccatacattaatcattaataatacgtgtacatatatttgtttgaattagccaaattatgttaatttctaacttgcctaatatgatgtctttgttccaactctcttttttctaatgctaaatattcttcttagcctaataatgtctttgttatgtggggttggttgctataaaagggttgaaattataaacagtacatacatctgttttgattaactttgaaattattggaatttggttatcaagttgatttgaatttgattggttggaaaatatttataatgatgaagtaataaattccttcattccttttacattcttgttttttttaatcaatggcccaattgtcttctgaaattaacaatattttggttgtgattcttttacacactcatctcatcttcttccatacacacttaaatccaaaacttgtaactttcattattctttttgtgttcactaacttcatccataaacatcttcaaaaagattaaattataacagaagtaattatttagcatctcatcctattatatcatcaactaattggatacaaatatataaaaataactaagtgatccaatgtttaactttgtctgtactcaggtccggtcctaattagttaaggtgggtaggcccgtgcctagacccactcaaacccagggtccaaaaattttatatattatattttttttttgcattgaaaaaaatagtatttttgaaaaaatttataaaaagaagcacaataatactcacattcctagataaaacacatacttaacaaattacttgggcccattattactcaggaccgaccttgtctgtttcatacattgtagtattatgcattgaattgtattgtataaaaatgtgtaaggttgaattttattgtattatatagtaatgtgttaggttgagttttattgtattatatagtgatgtataatacaatattatatttacttctactaataggttgtgtaaaattatattatttttactataaatctgattctgattgcagcttggacttggtcctggccccaac

SEQ ID NO: 107368 - DNA, 1499 bp, Cannabis sativa
ggctaaaaatagcctaacatgtagcaatgcgtccagttaggctttgtacttccttgacagttatgggcgacttcatgtccaaaagggcttggatcttgtctggatttgcttctattaccttggcgttgactttgaagccaaggaattttctcgagccaacactaaaagaacatttgaggggattgagcttcatgttattgtgaaggattttgaagcatttgctaggtcctccacatggcccctagccttttcggacttgataagcatgttttccacatgcacctccatgttgcgtccgatgagatctacgaacattatgttcaccagcttttggtaagtggcccttgcgttctttagcccaaagggcatgactttgtagtagtacaagccaaagtctgtcatgaaggtggtgtgctcctaattgggcaaatacatctttatctgattgtaacctgaatatgcgtccataaaactcagaacttcatggccagatgtggcgtccaccaactagtcaattctgggcagtgggaagtagtcctttgcacatactttattcaggttggtgaagtcgatgcacgctctccacttcttgttgggtttaggaaccaacattggattggacacccactaagggtagaatgcttctgttatgaagccattggccctcagcctttcgactttatctttgagcacttgggcatgctctttgtctagcaaccgcctttttcgtcgaacaaaccggatgctgagatcaatgttgagtgcatgggttatcacggaggggtcaattcttaccatgtctccatgtgaccatacaaataggtcaaggtttacccttagaaatttagtcaaggctgacctgatttctagagccaaacccttactaatctttagtcttcttgtgggatgagtgtgatcaacctccacctcctcccactcttctacaggtccaaagcttcctacagcatccctaaagcgaggatccatgtctgtatccccacttgggctagacttcattgccccttggagggctcatcttctagactcttggaaagcatcttatccttcttagccttggataaggcctggttgtaacagtgacgggaaaactgttggtctcccctcacacacgccactccgtgccttgttgggaatttgaggcacaagtggtaaatagacgtcagttccgtcaagtcgttgagggccagtgacaatcatggcattgaaagttgagggaacatcaataaccacgaactgtgccatcaatgttcttgtggttggattctctccaactgtgagaggtaatctgatacacccggctagtgcaatgacttggccaaagaagccatacatcacttgattgccaggtgccaggtcagtgagttggagccccatcttttcatattttgatttgaaaagaatattggaggaggcctcatcgtacaccatactgttggattataattttaccatactgttggatttgggcctcacttttt

SEQ ID NO: 107369 - DNA, 3092 bp, Cannabis sativa
tattttttactttacactacatttaataataaaatataaatttgcattaatttttaacattttatacaatgtagaaaaaaaaaaaagacgccctttcacttacaaaaaaaagtatcgcccccccacaatttgaatcctaggttcgccattgactcatgggcttgaattttatggctcacaatctttctaggagaggtttaggactagatgaagagatcagttgaaataattgattccaaatttctttatgatgtaatttgtatttattgctgcattttaatgaagttacaactttttaagaaaaaataaaaattcaaaaataaaattctacaagattaatatttgaaaggaaaaagaaaaaagaaattatttcataaattcaaaaaaatgacaaaaagtttacatatttttatggatttatattttttttttacattttttgaattttaatttattttttcttttaacctaaaaatagtattccttttttttctttgaaacaaataacaagtaaaaaaacttgtacaaaataaattcaataaaaaaaaagtaaaaaagagcttttttcgtgtatatactaaaatggtaaaaaaatattacaaaaatacattgggcaggccctataaatatttatatagcccagcaacaaaaatttacaaaactacctcttgctctaaccattcagcctcactaaccaccttcttaaacaatgagaacttctggcaactaaattagcaggccaaccgaaaaaaaaaacaagcaacttcacctgagaagaagaccggaagaaatccaaacacataaaatttcggatttatgcaaaataaggcagaaaaactagttcgaaactaaaattcagccctgaattacaattgaaatcgcagaaaactaaacctcctaatatcaatttttaaattcataaaatataaagatgtctgagatagatctagagttcttgatcaatccaaatcggatttaaaccgaagaaaaatgtatcaatatattagctaatgtttctcctaggatgcaataacattattttccatattttcaattgttgatttattcacataaaatcacgaataacaaagaaaatttgaattcatctagagccacatacatagaaatattattctagtttttaagtttcaacgtagttgcattgcagttgcaataacattttactaacgctcttaaactagacatatgaataattacaaactgtcaacgacacaatgatttttatgatatctgtaggtgtttcatatttgtaatccaacacaaagttctttaaaaaaaaaagataacaacatgattagtgctattaatatattcatttggttgttataaagttagtttacaaaattctaatagttgtttctccacataatattattaaggtacaattgattgttgattagtgacaaaaaaaatactgacaaattttttcatggcgatacgtattcaaattttctatttctagttgtatttaagttgtatattagttgaataatagttgtgctactgcaatcttattattattttaaaaaatagggctagagattggcaatacacgattcgtacagagaaaactcgagtgtggtaagaaataagaaaagttagggcaatgttaggataaaactataaagaaactaaaaagaaatctcagactctcatcagtttggttcttcccttttttaacttcaatgagagaaatattttcagcaacattaaccttcgatttcttcttaacaggtcgttgatcacttttttggataggtatagcaaagtctgaattatcatcttcaacaataggccattttcctttggatatgttagcaagagatttaacactcatttttgaaggtttttttagcaacagtgataggaaagatgaagaccaagtaatagttatttatagaagagaaaaataattttcttttcttttttaaaaaaaaaacatggtcagatgatggaggaaggtagttgagaaagataaataaaattagttttgatcatgtgagaagttttcaaacagaaaactacaaagaaaaatgaaatgaagctgaaaaaataaaaagaaaaaagataatagattaggagaaaaaataaatagtgtgtgaaagtagtataatgacaatatgtatgtataagaggtattagttaaaataggaaaaaaaaaaaaaacaaaaataaaaatgtaagagtaatcttgtaagagtacttggataatatttttaaatttttatatttttcatataaatttttaaatatataattcattaaaatatgaacatagtcttacttaattgtattgctaatatggccagcacaaccgctgtcccagtgatgttgattctgccatcatctcaactcacaactctaattgataacaaaagcccatcatcaccatcaacatgtgatcataatcatattatatgttatcattttattatatcatatgactacatatagtataaattaaattaattgtactatatgttcaaaaaaaaaattaattgtactatatataatatgtattttgccatgacataaggttgcttataatatttatatttcacatcacgacaaaggtatgaccctctacacacaatgccggagaaagaccaaaatttaatagggactaacacatacaaaaataataataaaaaacttattaacttctagttttttgtaataatttttcacatatattttatacaaatttaaaaataaattggcaccctccgtcctgctccctctctccatcactttttctacgggtagccactctataggtagaagaagtgatggggagaaatgagaaaaaaaaattagaaatagcactacaaaaaactgttacttttagtaataattttgtagttataatataacttttttgtaagtaaatgtgacttttagttacaacaaaatattactttgtgtctaaaacataatatttagttacaaattgtcactagtttagttttagtcacaacaagtattgtgactaaaaatacatttatttacaataaattataatttttgtgacttatacttttagccaaggactttttagtaacaacataaga

SEQ ID NO: 107370 - DNA, 1257 bp, Cannabis sativa
cctttccctttccagtctcctctgaaaagtgaaaaatgaaatattactttaatattcttttagcaatttctttagtttgtttgttggctccgactttgtagtttcttagccatttccattattgaataatcaaccttatcttctttatattttatcttatctagatccaaaacagaacttttgctccctggcaactggtacaccagaagagaggaggatctggaattatgagtcaaggaaactgatttctctttgcctatttattctttctgagtttgataaatgctgtgtacgggatcaagaaattgttgcagttactgctttagcaatgcgtcttgtcattcatttaactgatttgaaagggtggaagaacattaccagcgacaactgccaggaagcagatacagctgttaaagatctaggtcaatttatgggagctggtgaatgtggtctatacatatctgttagaagatacatcaccgcattagatactcctttttcttctcaaatagagaatgtagtgcagaaagatgataaattccttattacagcaagtgcaataactttagctcttcggccattacgtgtgacaaactctaaagtagacggccctggcctgtcagctgtggattcttttgctgagaagtattgtgttttcttacttacaattccttggctggtgcagcgattgccggctgttcttgttcgtgctatgaagcacatatctgttctatcaccttgcttacggattttactggtaaaagactcataaaatttgaacatatctatctgaacttcatcttgaagtttttcttattgttttttttccctgatgagaatttaatacttagaaactttctatgcgttctttctgagacgttcaatctttgggaggcagaaaatccagcaaattgttaggcaggtccacataacgataccttatgggaggaaaccccagatctaactgcacaacctaaccctcatgggtgattatttagaattttttaaccaagttattgtcctaggcgtgatcagtcactggagtcattttcttgtccttttttttaaggaaaaaaaactcaatttagattttcttacatctgatttaacagaaacattttttttaaagatactggcacaatgaatggtatgttatgctttaataaacatatttgatgtagaggattttttttattgctttaagcttttgtcaataatttcgttcattgattactttgagaagatattatttctcct

SEQ ID NO: 107371 - DNA, 985 bp, Cannabis sativa
atatgatatgaatatatatttttttactatacatcaaagtaaaaaagttgacctaaaaaaatgatttaaaagtgtatttttaagcgatatttcaccaaatcctcaaaagaaaaatcataatagcaattataaaaattgtagttataaattgtaaaattaatttgtgtccaatcaaaagatgttaagattattccattatagtttaaattgtaatggtgcataatataacttttacataatataaacgtagtctttctatcatattatatttaattttattgtaatagaaaaagtgacgatatagataataattgataaatagatgtaaattaattacattttaaagttttttttttttttgagaaaacattttatttcacaagttgtactttaatgattaaaaaattaaaaataaaaatataaatatattataaaaaattatttctattattcattaacgtaattaaaagtgtaaataacgtatttaatttaaatatttatcaattaccatccaatacttcacacatttaatttgcatacaataaaattgaataaaatgtattggaagaattacgttattgtaaaaaattatattccaaaaagtattattaataagtcgtacactatataagacacaacttggtagtataaaacgtatcaaaagacacaaatgctaattattcttatatatgtatatattataaatgtaaattatttagactaattaggatttttacccctcaaattttgacatgtactaaatcatgcccctgaatttttttggccattaaaaatttctcataaactattaagattattagattgaaggacttttgtctaatttcacttaattttactatttcaacgattatttatgtattaaccatatgctccccagactttgatatctatcaaattatacctctcaaactttgatatgtactaaatcatgtctcctgaattttcattcatgttagactttttt

SEQ ID NO: 107372 - DNA, 2497 bp, Cannabis sativa
  modified_base (1690)..(1694): a, c, t, g, unknown or other
attaaaaatatactaaacttaatctaaaattaatactaaaaataacctaatacccatcatgagcaccggatttgttgacagtggtcctttttgctaccatttctgcagtatacaactttgatactaaatctttcttcagctctctatgaaaacatcaaaatgtttacgaagattttcgaaaaataataaaatataacaaagctaaagaaatatatcataaacgaagaatgagaccaaggtttttacgtggttcaaggattaacgacctctagcccacgatttaagattattatcataagactggaaaagcctctttgatttacatgttttaaccctagaattttcctaagcactcaaggaataagattctaactttttgcatgaatgtgttttcttatatttatagtgctagggttctaatctgtaaattttcctcactgatggggtaaatacatgtaagacattgacttcaggctcacctagtggagcccgacccataggcattgattttctactgacgcgaatgccacgtcatgttgatagttgtcaaatcgtgtcctacttttgtggataataaagatacataaatccttaattgataattactttatttccatattctaaagatatgattttcggatatgatcttgagaattaagtcctgatattgtggaatttaataattaatgaatgatatacggagctgaatatccagttgttcttttactactcatgtggacactttgcttgatactatttgaagacacactgtgctggagatttatctcgcctggaccagtcgtctgtccaacattcggaagactgaaatttgttgatggattcagtccagtatcttgattggccctattctaattaaactgaaccatcttggaattacacgtgttctctaaccggtaacacggataatacaaaacatataaaatttatatgagatttggtattcgtaactagtttattcattaagaaacaagttttgattacatggaagtaattagtttcttaattcattgcctaaacaaaattatttttaactagttttttcatcaaaaaaattggttattttatcaaaaaatcagtttcttcattataaaaactaattttaattatataaaagtaaaatttatgtataaactactaaatttttttacaattaaatttacatctcatatatgtaattttttgaggcaatttatatacaagtaaatgtacaatattacaaaaaaaaaaagtgcaaaaaaaatataattacataattctatataattttatgaatatttacaaataaacatatatgtttacaattttaatttgttgattattttcaattgattttctacaaaaaacacataaagctaaatatgtaaatacaaaaattaatatttatattttgatatattactaaagtaatatgtttactaaaatttaatataaaattaaaaaaagaatatacaaacatatttataaattttatttatattttataaataatacatatatttattaaatatttgattagtattattaatgtttataatgctattattaatctagtatgtttattatgataataaatataatttatttgttaaaataacataataattttaaaaatagaatacttaactttatttatttatttatttgaataaacactttaaataacacttannnnnattagttattgaaaaatgtgtttaaaaaaataaacgaaattgtaattaaatgtggtcttatgtataaacactatatttatattattattgataatgtttattaattgtaaagtctagcagtgttgtattcttaatgtataataaaatgcatgaaactaatcagaaaacactcagatttacaagcttcgtcggaccctgaaaactcatttcaggcgactagtgcttgggttcccttgaaccagggtaataactttcattatgaatcaaagatacactttccagtttcaattacaattacaccaaaagcaatctgaaactaattcatacagaaattaccccaatgatttgaacacactcaaatcagtttatcatccaagaaccttggacttcagtaggcaagattcccttgcttctcttcagctgaactcttcttcagcatgaagatctgaactcttcacaagatcgcacgacttctgagatgccttcaaattgaagatcacttcatcagctctgcaagaaacacatcaaaaaccaagaacagagttttgccctagcagagcaagaactcattaatcaaatcagaagagttagttaaaaaaccggtaatctctgatttatataataccaactctaatctaacaaactttaacagctcatgcaacaagtaaggacagctgtcatatttttagctcccttagctgacctgtcaaagacaagataagatcaaaaaaactagatgacactatcaaccagacagatgacaaaggcagcataatttgccacacgaaccataggaacttaca

SEQ ID NO: 107373 - DNA, 1015 bp, Cannabis sativa
cggggcagatccgtgtatgatctggatcaggtcggatcagagtcggatctgatccgacccgccctattgacattcctactcaagacccagtgtcgtccgtccaatcgtcgccagctgagctctgccactgttgtccatccacgttctaaggtcaaagagatttgcatcattcttcacttctcaattcttctttataatagtttcttcttactcttcacgatctcaaagttatacgggggcaagcttttcagacggaggaggtgcaatgctaagctttctttactgccacaaaattgtccaaggttagaaagtgatgggtgagatctggactgggctggatcttggatggcttgatggtgccgcatttttgagatcgtcaagagagttttatgtgttcttgaatcattggattcattgctatgttcctttgtattaggaatggctaaatctaaaatctgaattttattttgattttgatgatgacgacaatgaagaaatttgacatatatatataaatatttttgtgggatatttcagttgccacgttggatagttgagctgagttggatcactacacataaggggataaccaggttaaataacggaagaaaggatttacaaatagaactaaacttaaaggagttttcccccaaaaaataaagaaaaggggattaagtgtataagaaattaaacatagagggacttagccacaaatttcgctatttttatatgtttactccacttttaccgtttttatttttatttttcatttttatatatcattttcttatgtttacattaaaatcagtcttttcttttcagttttacaataactcttttcttttccccttttttctcttaaacttcaaaccttgtgatcgttggaaatcactggagaccaccgaagaccaccaaattgtaaaaaaaaaaaattattatttaaaaatttattataaggatagaattttaatttatataaaataagtttaatttttatataaaaaaaattataaat

SEQ ID NO: 107374 - DNA, 2861 bp, Cannabis sativa
  modified_base (2628)..(2629): a, c, t, g, unknown or other
tatgtttagtcataagtaacttttatgttgtgactaaaagtcacatttagtcacaattttttttgttgtgactaaaaagttgtcattaaagatggtcttttttatagtgtttatactgtcctctccctttttttttttcttttatactgtaaacaccaaaaagaaaatagaaggcctccattttccacactcacagatagaaccaccgcaacaacactaggacaaccgaaaaacaaccgttaattccgacaaaattgaacaaaaatagtgaaatcaatgttaaataaataataacaactgtaaaacaacactgaaataaataaaaaatacaagaaaaaattattaaaaaaaactaataatttttacacaacctcaacaccagatgcaataacgactatatttacaagctcaatcctgaaaaatcagaataaaaaactactaaaacaacccaaaatcaaatgtaaaacaaagaagtaaatataatcacttagaaaaatataaaagaattacatacctcaaaactcttttgtcaatgatctcgtcaaatgtatttataggagaaccataataacaaaccacaaaaataactagagaacgaagaagaaatggatttatagcctccatcttctacacctacggccagaactaccacggcaacacgagaacaccccagaaaataactattaattccatcgagatggagcaagagcagtgaaatcgacgtcaaataaataaatcatgacaaataaccgtaaaaaaatactaaaataaataaaaaaaaaaacaaaaaacaaaatgattaaaaaaactaaccatctgcacaatctcaatactagatgtaatagagactatatttgcaagcaagttctagaaaatcagaacaaaaaaaatcacactaactcttatcttttctaaaaaaaaaagactaataacttcaaaaactaaataaaaaattaaaagaagatgaagaagaagaactgaacaagaaaaaaaaaaataaaaaacttatatgttaatggagaaaagtagaaagaacttgaggaagagagaataatgaggaagtgagattaaagtgaagggaatggatattgaatatttagaatatcacatttttttatcatcaagtttaattaaaaaatatatatatatagggttttgtcccgtgattgtactttcacggaatgtattccgtgatgtacgacaaccgttagatgagagagttatttgatctgagggctgagattgatctaggggtaattatggttaaaaaatagtaacgtaccctgacactcatctaatgtaccctgagacccatataatgtaccacggaatacattccgtgaaagtacatcacgagacaaaatcgtatccctatatatatcactaaagtgacaacacaagtcaaatcaaatttttatatcacttaaaatataatgccattttaattaaaaaaaaaaaaatagaaagaaacctatcacaatatttaatattacatattaaaacttttgttaatttatatataaatatatatatatatacatatataatgtgggttgtcaaaagtaaaaaaaaaatagttaaaaagtaatactttttttacaacagtaaaattgaaaaaaaaaaaaaaacaaaatagaaaaaaacagtataagtgtaaatttccctatataaaaagagatgtaagttcacttaatcctatgtgcgagaaaattatattgtatatccactttattttacttgttttaatttttacttttatttttatattctttaagatatactcacttttataaataatgtacctattataccccttagaccatctccagtaggagatataaaagttaagctatattttgtacaaaaaagtagttttgtgatatttttacctcaatttttactattgtgctctaatatataatttaattgtaaatcttaatgaaaactttaatatattatttaatgctcacttaataatttattaaaaaatataaaatgattgttgtgatcaatgcttgatcatgcacctcacacacaacacaaaaataagagattaatcaagaacaatacaaacagttgaatattgaattgtacaacagtaaacaataatcaataaaccagtaaaaccagtagcaagaaccaacaaaagaactaaagttaatgagcaattaaattacaggaataaaaggagaaataatcaaacacaaccaagattacgaggttcgaacaagtgatgatgaatcacttgcctactcctcggccagaacagccccaaaggcttgaatctttattgatgctgaaagagagaattacaaagttgttgtacaaagtgttcttgacacattcactcatgaagctcagcttcaattacaatcgactcatctcactcaaaactctctctgttacaactgaactagcactcaaaaattcccaaaaattgttgctgaaatgctacagcaattggctatttatagccttggtttaagaccagatcctaactgtcataactgacagttaggtaaaaccgttagggggcagaaagaatttgttagcaaaagatttctattcctctattagtggccaatcacaacaatgataataatgtaaaatttaataataaaataatannaataataataatgcaagtcatttaatgcaaaagagtatgttagctaaaatttaataataaaatattaaaaatagcataatgataaatataaaaacatagccagggactgtcaagtggctagcctaatggataatcatgatagaagctgggacttggaagtgctgaatgatttgtttaacatccgtgatcgagatttgatttgtaagacccctatttcttcagctccttctga

SEQ ID NO: 107375 - DNA, 1034 bp, Cannabis sativa
cttaaaaataggattgaaaatactaaccacagctagcaccaccgtgccttctaataaaaataaaaacacctccttttatcttggccgtacgtaaccgttctcagtacactacctcctttcttctctcattcttttacagattaatgaaaatcaatgaagcatgccatgatgatctgaaaccagcccggagcagtactgtcttcttcattttcgttgttgtgaggtccaatcatgaactcgtgtctaaaatgcggaaagaagttcaactcacccaaagcagttcacggccatatgaggacacataagatgaccaaaaaactccttgcttctaataaggcttctggtagtagtatgacagtactctcctccatggagaagaaaatcgcctcctatttgatcctgttatcgaaaggtcagcccaaaaacgataatagtaagacagttggagctagtattttcaagtgtaccagctgccataaggttttcagttcgtatcaggcattagggggtcacagggcaagtcataagagcttaaggggctgttctgcaattaatgataaatgtagtcccaacactactattccagctatagagagtacggctgaagaggctcaaacgacaatgttttgcaaaaaacgacaattacatgagaatcatgagtctccctctggtgatcaaccaagctgccctaaaactagggttgaagaagttcatggcttccgtggtattgggatagacttgaataaaccaccaccaatggagtctgatgatgatggtggtggggttattctccaaataatttagtctctcttcaactttcaggagatctttctagggttttaggaggttaatggtcacaatgttatttgattttctttttgtcttggtactgttattagtttgtcatagtgattttgggtattaagaatattattatttagtgcataatttttctttgttgattttgtcttcattaatgattggtggaatgataatcaatcaagtactaatgtttgatcaggaaattgaaaatc

SEQ ID NO: 107376 - DNA, 736 bp, Cannabis sativa
tttaaaaaaaatattgctaatcaatcgtagaaagtattgagcacattatgtctaatagcaatgctctagaatttaagattaaagtggatagagtttcatctcaaaacttattaaaaatgagaagagtaactcatatattttatattatttctttttacacatttacaatatgaattatttttacgtttagatttaaaaagtatgggtataatgaattggacatgagatttgaaaaaatccccactaaaataaattgggaaatttgtgagtgtacataatcgaaaaatttgtaaattttttgaaacaggtcaaagtacatagcaaaaacttttttttagctctgataccatgttagaatttgtaagatgcatggagttccattttaaaattaattggtactgagaggagtagctcatgcatcttatgtacggtgttatatttgtataacttagcaacgtaggactctaacatccctctcaagatggtagttagttttttgctcatcattctttgatgactcgaacacaagtgacactttgttggctcgcaacagatcacaagcacttttttcggctcatctttatggaccgacattactattggctcacaatagatcacaatcggctctttttttacctcatatttttggactgacgatacttttggctaagactagcaattcgttttatcatgtcatgttcgtgtcgacactagggatgcacacggggcgggaaat

SEQ ID NO: 107377 - DNA, 895 bp, Cannabis sativa
tttttgttttctggttgtatcttattaaacttattagcttttagatcatcattttccaatactaagatctaatcataacttaggaaaatgaatacacatacacgagaaagttttccaacattaagatctaatcatactaaagtggatacacacacactagaattttcttaaggaatctttcatctaggggcggaccaagatagaagcgaggagaggcaatctccccagaaaaggaaactcgggaaaataatgtatatacattttagttagttacgatatatatttgtaataaaagatgatatttatatacataatattagctttggtgtaatgattaaggtagattacatataggatagacgtcttgggtttaaatcccactaagagctttttttttccttctgctttacgaaaaaaaaattacgctcccctcactttaaatcctggatccgccactgctttcatcaattgtgttgatacattaattttgtttgtgatgttcattgttgctataatcttgttactgtgaaggtaaattacatttttggtttgttatttgatttcttttggtatctaaaatcaagaagaaataaaaaagtgtcttttattgctagtctttatcaatgcttgtaagtagtctttatcatctaaaaacttgtattgtaacatgtaggttcttctatatgcatactcttattgtttttcgaattacaagcgccatattaagttatcaacaattcactcctgatgtctatattgctgctagtggttactttttgtgctgtggaattttggatgaaaaaaaagacaaaattctcctatttaatgtaattctgattccattggtcttttccttactaaacaaagaatttgtttaaaatgtttaatgagatga

SEQ ID NO: 107378 - DNA, 551 bp, Cannabis sativa
tgaaatttaataccataattatctcaacatttaatacctaacttctgtcttctcccgtgtaaccccgacaatggtgttttcaccaccgcactcaaactacgctcagccactgtcttcacttcaacaattacagttgttaccgtatttgctatcatcgtcaaacaacgcaatcagatcgttcgtaaaacttcctccaatcggtaaggatgttccacatagagcaaataataaataatgattagaaatagactaacctaaaaaatactgacaaagaaagaaaatcctaaacggcttattattccttcattccaatcttaagtaatataagttaataaaatattaaaactaaaaaatatgtgatgagaagtaaaagcgataaaataatgaagtgtgaaatatatatttaaatggatctagaattgtgatattagggagagagaccagcagaagagatgagatcctgataccaaagagatgactaagccttcttacattctccaccaatttatatgttattaataatattaattaaaaggttaattaggattttt

SEQ ID NO: 107379 - DNA, 1071 bp, Cannabis sativa
ttaaatattttgtcaactaatttattaaaaaatactttacaatttttatttgaggactaacatataagggctggaagaaaaaaaaaaaaaaatcaacaccaaattggtatatgttcaaaatccaacttattgatggtgcagaatttgatgtatactaatttagtgttccaatggagtaaaatggtgtgaagattctacaccaatttcgtaaaatgatgaagcattagaggtgctctaagcacatatttttttatgtgagatggtggtgcttgtctctcttgtactcatatgtgttgtatcaaaaacattggccgatatttacagcactgggtagcgccttaattgggtcttggtgggccaactaattaccacactcatcacacacataatcggttggattacattatccaaccaaatcaatctatgctccggtcgcatcatgaacataaccaacctcgaatcagttcgtatatggattaacaggtggattagctgaatgcattttgttaagtctttaattaataataatatagatagttttagctgggcctctaattgtagctacatatgaaattaatacacgtacgctcaattacaaaatcacgcgatcgatcagtaagaaattaaaactaatattcataattaacagacaaatgttaactctaaataagattatttttttactcaaccaccactaaattccacaacaaaggatttttcctttgtctgcaaggattctttctcattgttaataaattaataataagattatgttttttcttaaaaacaaacaaagaaaattagtacttttttaaacagtgcgactactttgagcttgaacttctgtccttctgagaagatagaatagcatcaatggcttctttcacttgagatatatcaggagctttcccaccttgaactggccaaaattcatcagttgccaacacctaaggaataaaggattgaaaaatgagttatttaacacaaaaaaaaaaaatatcaatcacaattctttatatatattttatatatatagaaatgttatatctataatacgtaccttgacttgta

SEQ ID NO: 107380 - DNA, 1336 bp, Cannabis sativa
gttgggtactcatttcagagctttcaggatgcattttgatacttgcaaggttctaaaacttgaggatgaggtctcctaccctatttttgaccatttcagacttaatagtggaattaaatttggcatttgagtgatcaaaaccagcgtaccgggttgactgatgtcaacttgagcgctgagccttaatttctagggtcttggattatggttttctccccgagtttacttaaatcttcattatcttttatgatagaagaaatacccataacacttttttgagagcttgattggaaatacccaggttgacaatatgtcaatctgggcactaggtcctagttatggccctttagaagtttagtttggtccttaaaaatagttaaatcgtaatatttgcaaaaaacaaagaagatgctcagaagagctcaaaaaacatcattaaaattggcctaggttgacaaaatatcaacctgggtgctaggccagccccaggtatcaacttgggtgttgggccagccctaggtgtcaacatgggcgctaggccagccctaggtgtcaacatgggtgctagatcagcccaggtgtcaacctaggtgctaagctagccccaggtgtcaacctaggtgctaggctagcgccaggtgtcaacttaggtgctaggttagccccaagtgtcaacctgggcactggggcttgcttctggcacctaggatgtattatttcttccctaaaagtacctatttccccctttttgatgaagacaaagatgatgtgaaagttggatcgtcaatttgatgcttaaaagttgcccagattgataaattgtcaacctaagttgcccagattgataaattgggcccgggcaccgggtgctcaaaaattaactttctctgaatctaattttcatgcctcacatatgttcgtggtatgtcttggtcatgtcccaatacaaagtttgaccaatttgcactaagacggtcctaaaaaataaagttctagttgaggatgtcaacctaggcactgggtgaaaccctaggtgcccaagtttacttttggggtgcagattcatgtaattttagctcccgggacatagatttgactgctccatgtcttcacggtatagaatactaaaatatagtgggttggattcaagttattgaagtccaaacttccatcctagagttcccaaagtcaacctgagtgcagggctagggacccctcccagaccgacttactataactcgggactactcaactctgagatgccatctttcttgccacgtgtcaaacatggatgttcatgtcatcagggctactctattggatgttattttaccag

SEQ ID NO: 107381 - DNA, 1726 bp, Cannabis sativa
aatgcatcccgataagtcgccgggaccagatggtatgaacccaaaatttttccaaaagtattggcatattgttgctatacagacgtgataaattgtgtcaaaaatttcttcttgaccaaggagatgcctgagggcatgaatgccagcaatatagtgttgattcctaaaaagaaaaggcccgatcaaatgagcgagttgagacctatttttctttgcaatgtggttgctaaagtcatcacaaaggttcttgctgatcgaatgaaaggttttcttggggaatattatttctttgaaccaaagtgcttttattacgggaaggttgatcacggataatatcatgctttcatttgaaatccttcattatcttaagagaaagaaagttgggaaggatggttatatggcgttaaagcttgatcttagtaaagcatatgatcgagttgattggcattttctatgtgctattttatctcgattgggttttgatgacaaatgggtttggcttatttttgctgcctttcttcggttcaatatcatgtggtgagtagtgggtatactcttgggccaatcactcctagtagaggacttagacaaggcgatctaatctcgccttatctttttctcaaatgtgcagaaggattttcgacattaatcagaagctttgaggatagaaaattaatccatgggtgtaaagtggcaaatggtgctcctattgtgtctcatatgctctttgcgaatgatagctttttgtattgtaaagctacggaaacaagaagttgcaaacatacaacagatgcttgatgtttttgctaaagcatcgggccaacaggtcaattttactaagtcatctgtgttctttagcaccaatacgacgagtatgcgacaaactatttgtaatagaatgggcattcgtgaggctgatgagaagagcaaatatctgggtcttccaagtactattggtagaaataaaactgctacttttagctatgtggtggataaagtacataagagggttcaaacttgggacaataagttcttatcgaaggctgggaaggaagtgcttattaaatgatctgttgttcaagctctccctgcctataccatgaatgtgtttcttcttcctgtcagtattagtactgatgttgtcgaaattttggtggagaagcaataaaaacaaatgtatccattggttgagttgggacaagctttcttctcataagttgaatggaggtatggggttttgggacttcagggatttcaatttgtcattattggcaaagcaaggttggcttctcacttgtgaggatagtttggttacaaatatattcaaagcaagatactttgctcatggtaactttcttaccgcatctttagaagcaatcctagttatatttagaggagtatattggagtctcaagggttggtgattgttggtgcgagaagtctggttggggatggcatgtgggttagtattcttaaggatccatggcttaaggatgatgtgaatccttttattgaatcatctcacctgagccttgttaacaaaatggtgaattctttgatggaagtgaataagcttgagtgggataatgagatactttcaaaagtcttcaatgatagagaccaaagattaatttggcagattcctttgtctactgggagtgaaggtgatagctggtattggtggaaagagaacgatggtttttccacagttaaaagtgcctacggt

SEQ ID NO: 107382 - DNA, 1099 bp, Cannabis sativa
ttttttttttttttttgtgtttacctttaaaagacaatacttgatagagttgtaatcttgagaacgaaaaatctgacaaataaaaataaattatattttcttcataatcttcccaaacaattatttatgatactgaattatacaactttttgtggtaatgagaagggaataccttagtaacaaaaatacccttaggagcaagcaaatgagtggacaacttaacaacatcaatgaccaaagcattctgaacagtggcttccatagcccaagcacggcccatattgggggcaccataatgaagaaccaaatcaaaggcagagcactcatacttcctcatcaccctttttgatctccgacttgcattggggtttagtgatgtcttgctgaataaaaatagcgcatgggattggtttaaccaaatgcaaatccacacacacaaccaggcttccacgtggcaccctccgagtggctatctgagtccaaccacttggagaagtacagagatcgagaacaccctctgtcttgcgaaataatccatacaaaagtttctctctcgagtcaattttatgtaaatctccttcttacgcctttgactctctatacccattgattgaatgaattgatcaacaacaacaacacatcctgcatttttttttcgaaatgttacgtaaattattactataaaaccaaaaataataataaaaaagaaattgtaaacatgtcacaaagacacagacatgtatatttatatctcactcatatacagtaataaatcacaaaagagagagtcttcatcacacgaatcgagaagtgagtgaagaagatcaaatgcaattatatatatggaacactttttaataggtattaccatgaattattacttaacaaatttaactttaaatattaattttaaaaatatcaaactattgaattttgatctaataacgaataatgaaatcacaaatttgaatttttatgtttaatttaacactacttaattaagaaaaaaaatcaaaaaaatatgtctttttaccttatatcaaaaatatgttcatacaaaaatatttaactcaaactcaactttttcttttcttatttt

SEQ ID NO: 107383 - DNA, 1564 bp, Cannabis sativa
  modified_base (1446)..(1456): a, c, t, g, unknown or other
aggtaaacaaaattatcatcacacattgttgacttcttctgtccctgagatctccttagagggggtacttctgaaatagcctctatttgttaatcatcatttagatgacctctttcacaactagaatttttccaataacaagatattcatcagcaataggaccttcttcagtaataggcccctcatcaataatacacacttcaccaataataaacccttgtcatcttggatatcaagagcaatatattcatcaacaattagagcattatcaactagagtaagaataagattgttattattatcatctcttgaaaaggacacaagaataaaactttccttagatgactctcccatttcaagagatgttgaatgaatattttcagcaacattaatttccataaatttactagtttaagattcaaaaattcatgtactacgagtagggcaataaaagtgatagccttttgagtgcattggataaccaatgatataacaaagaactattctcggatttaacgtttttaaatcaggatcatatattcttactttaactgcaggccccatacacgaagatgattcgaactaggctttcttccagtccataactcaaaaggagttttttgtttggaatagatttacttggaacacgatttaagatataagtagttgtcatgagtgctgctccccataagagctctagtagattttatctgcttaccatgctgctaatcatgtccattagagtgcaattttttcttttagcaacgtcattctgctcgggtgaaccaagtatagtgtattgaggaactacaccattttcttgtaaatactcagcaaaaggcctcacatgttgtccagattctgtataacgaccataatattttccttcatgatctgaaagaacaacctttgacgactcttcctaattgtttgtcaacctcattttgaaagattttgagtttatcaagggcatcgaatttttctttgatcaagtaagtgaagccataatgagaaaaatcatcgatgaaagttataaaatacttgttcctagatagtgtggtggaataaggtccactgatattaatgaggattatgtcaattaaagattgtctacggttgacagtcttcattcttttttagtcaattttctacgagtacaatcaacacaagtatcccaaccagaatcatcaagaggaggaagaattttagctcgaagtaatcgatcaaatctttctttagaaatatgacccaatatattgtgccataacaataaggatcgatgtttctttaatataaaagagaaagctaagaaagccaattaaatttgtaaaggccattagaataaaagtgttcaataatccagagtcaaacataatgtcaatattatgattagcaaaagaaaaaaaatatcattgtttaactaaaagcggaagcaaaactaaattnnnnnnnnnnntaggaacataaaaagtgttgttcaaaaaaatcttaacactaaactataattcaagaataaatgtgtcaacttagataacgccaactccaacataagtgcccactttaa

SEQ ID NO: 107384 - DNA, 1144 bp, Cannabis sativa
attaaaataaaataaaaattgttgacaattttctaattccgggaacatacctagtgggatcgtatgccccctagtctctccttcctgtaatggtctcttattattagttcttttgaagttccattcaagaggacctcttcttatatttggatcagtagattgagtcccttgggaatcttttccagggcaatgaacgatttcttcttcctgttcatcacgagtgtcttgagggatattattcataataagaaaatttaattttttcttttgagtagggatgtgtgtttttagagtttaattatcaaatgttctaattgaaagcaccaaactgttaacgtaaaatttaattaacataaatgaggcttgataattaatgaatctataataaaaatttaaaggcaattaattataatagaaagataaagaattttttatgaggttttgtagtaaaaatctacatactccacaaatcactcttatttctaggatttttgtttacagaatacaattcggtagaatttctctaagtcaggaaatcggtcgtccctctttcaatgcaatcactgctatttgtaggattgaaatagcaatacctcaatctaatctaaattacagttatgaaacgtggacattctccacgttttatttatctataaatagatgggaatggtttatactccatatttggaacgggtaactgttattctatgattgagcatggaattcctcgtaaatagactcttcctcgtgatcaccaggaataagatttgaatgaattatttttctcctcataagtaagccttttcaagttgtatctcttgtgcgaactgagttaaaagtattaattctcacaacacgcttggtcttcctctccttttttaacatcttttccattgtgatatgcaagacgctcgttattaatcttacatatgtctcattgatcaccttgattttcttaatgtttactgagagggtccttgcatgtcttcttactgcgaggagatcatttaatgtcttttttttgtacatgtgtcacgtaaatagacccgtttatttattgctcgaattacgggtataatagataaaataatataacacttttggggtaattaccatttttgaccctctattttgcaaaaattat

SEQ ID NO: 107385 - DNA, 1461 bp, Cannabis sativa
  modified_base (99)..(101): a, c, t, g, unknown or other
ggaaatcatatcatattattattaccacttttaaattttcaatcaatttttttttaggaataattacttaaggcactattttttaaaaaaaaaaattannnttttacgtttaaagaattttttattttatatatttttacggttttctataaaaacaacaagaaaactaaattaataagagtacaacataaaagaccgtattttctgtaaataaaataaaaaaaaaatcgtaaaaatattcaaaattccgtgaaatcatatttttgaaatttttttatttgtgaaataatctttttttttatgatattgataataaatttttgttacattgattaaattttttaaaaaaaaaaattaccaaaatacattaacatagaaaaaattttatttttgctctttgaattttttacttacaaaaatacttttttaataaaaataataaactatttttagttgttttatggtttatttatagttatattatagttgtcataaaattattttttttttgttgttttataatttatttatagttgatgaaagttatcgtgattaatttctcgttatttttttatttttttttactttttgatgaacaaagtgtattttgtaatttcaaaattttataaaactagttttgtaattaaaaattttatacgtaaaattataaataaaacataaaaagtaattttttaaaaaaaatttctcttctgttgatagttcttattaaatattaaattatttttttgatttaataataatataatataattttaatactatatctatttatacaattggataaaaactaaattataaatatttgtatttatgttcaacgtgttattaaatatttaatacattaactattaaaaaaattgatttgatacttaagtactactataaacaaatatttaatgttgttgtcgtaaaaaggtaaattgagtatataccactttttattttattttttttctaatttttacgatttttttttatttttacaatttgaattgtgatctggattgctccgttagttgctacgtagattgctctgtaaattgcaccgtatatcataaaaatataaaaaaatatatatattttaaaatgtatagaagaaaaaaatatatattattctttaaataatattacttatcaaaatgaatactttttataagttgtgatgagttttttaattttgcaggacatttttgaagctggaagtgaaacaacagctgtaacagaggattgggctatggtagaattgatgagaaatccaataatgatgaaaaaggctcaagatgaggttagggaagtttttggaagaaaaggattagttgataaaacatcaatccatgagatgaaatacttaaaattaattattaaagaaactctaaggttgcatcctcctgctccttttttacttccaagggaaaatagtgaaaaatgtgaaattaatgg

SEQ ID NO: 107386 - DNA, 1075 bp, Cannabis sativa
gtgagtcgacagacttagtaaaaaaagcatataacatatcatataataccgacttgtatttaggcgcccatacacctatttacaaggcttaacagaagtgtaagaacattctaactatgatacgatcatgtaccatgtaccgcatgcactaagtaaaccatcgtactagtgtaggtagggtatagaccgcaccttgagtactgttaaatgttgtaccacagacaccttgtaccttcctgtactagtgctggtaacaccacgatgtacttttaaacatcatacaatttaccaatgcactctgtacaactaccgtacaagtgttggtattgactgaatcacaacaagcatgcatatactttaacacatacatacattcgaatatccatatcacacatatataaagttcttaccttctttccaaattcaagtgtgctggccgacctgaacgaaaagtctcgtgctggatggatgccctaatcacataacaaaactgggtaaatcacatgatcgaaaccctaatccgggaaacccaaacctataactctaggctttgctataaatactatggattacactaactcagaagacagggaaacaccccactacggcactggaatggacgagaattgagaaaatggcttgttcaatgatcctgtcaaaactggctaactagttttacaggcatggcaaaccagttatctggtttgcaccaggtttcccccaataactcattttgtgctcaaaacccatccaaatgcacccaaactttccaaagtacctaattagggtatacacaatatattccaactagtaattcatagaaaaactcaatgaaactaaacataccattaaagacctaaactttgagttcaaagctcaaacttgagcaaaagcaattccatacaccaaaaccagctgctagaagctgaaactaactcaaatgaaccctacaatttgaactacacaaaaaccaaacgctaacagcccctaattttcaaaatgatatactcaaccaaaacttaaaattcaacaactaagaaatagtgatgctagggcttgttggaaattattttac

SEQ ID NO: 107387 - DNA, 2097 bp, Cannabis sativa
  modified_base (2047)..(2053): a, c, t, g, unknown or other
ataacctttgaccaggtcaatttgtatggcaaagaaaccctctttgcctttcatcctgttgaacgagtggataattttttgcacaatcacattgttaatcctggatgttccttcccgacacgaaggcagcttgggttggacaaatgagggaaggtaaaaaaggtttgattctatttgcaatgattttagaaatgaccttataagtcacattacaaagagaaataggcctgaaatgattaattcttgtcgggttctggaccttggggatgagaactatattcgtcacattgatacccttatgcatattaccagtcacaaaaatccaaaaccgcttcacagaaatcatctcccatagaactccaatagtgtttgaagaagataactgacataccatcaggacccagagccttatgattacccatggtaaaaagagtttttctaatttcatcatgagaagggcacttgagcatctcctcctggtcttctaatgataatctttcatgaaaatactatctgcaattgatatcctgactatcatctgacccagtgaaaattcctttaaagaaatcaacaaactcctgtccaattaactctcggttagataactaaacaccttccttattcaggatactttcaatggcatttctccttcctctaatagcagccgagagaaaaaataatttggaacatatatatcaccttccttaatccacaaaatcctggccctttgtttccagtagaggtcttttctacgggattcgtttaaaaagtgccagataagacactcagtattccaatcacgggagccagcaggtaaactctgaataaagttaagctttttctcaagctcatttatgactgtgccaagtttaccatattgggttctattccaatgaagaaggggcacccgagtcgctcccaatttcttgaaaatgcaagcgggagcccaagagtgaaaaatagattgccaggcatgatcaaccactaacttacttctctcatcccttgcccatccttcttcaaacttaaaacatcttttaaatctagtatccagaccgcgtgtgagaagacacagaggtctatgatcataattagtcgtctgggaagatttaagaacagccctaggaaacaagttaagccagacgccattaataagacctttgtcaagagcagatttgacatggttcctaccagagcggtggttatcccatgtcatcctatcctcctaaataggcatattaataaggcctcgagaatcaaccagattagaaatgattgggataaactgatcccttccagaggacccttcacgctcggaatcacttagcacaaagtttgtatcacccagaatcaaccaaggaccaccaaacttatccccagttttcatgaaattggcccaaaagtttttcttgggatgaaaataaggagggtcgtacacacaggatagaagccaaggatgggaagggggttcgagtaaaccaagccagaaatatgattacgggaactagcaatatactcaaaactaaagccatccttccaagtcaagataatgccaccagcagcaccaataggttgaacataaatattaaaataaaagtggagtgatttaagagtacgtactagagtagcatcaacttttagttcggttaggaagacaaaatctgaagagtgcgatctgatcagggacttcagctcccaaactatatagaggtctgtcgtaaccctctgcagttccaaccaatgcctctcatggctcctgtggaaaagatgagacattctcctccaccggggtacaagggtgaaccaacacactcaaatcagaatcttcaatcaaaaaagtgccaaccatcagattctttataacaccttcaatgcgactcggtgaaaaagatatatcatcagagggttcttcaatggcaatcttagaagcattatcctgttccgtggagtcccacgagaaatcatgaacaacctcagggtgcattcagagcaattttggaggtcttgagtataaagaagttgttggaaattattttaccacgatctnnnnnnnactcacaagtatgttgtttaaccaccctaaatatgaactttcta

SEQ ID NO: 107388 - DNA, 808 bp, Cannabis sativa
tatatttaatgaaaaaagtagattgaattgtgttgtataagagttaagaaatgcacgtgaagatatagaggtatgtcgagccatttggtgttaaattaataaacaaacaaaaagagccaattctaataatgaaccttattgattctttcacgcatcccacaagatttgcttcttcgaataataataataataagaagaagatgatgatatatatatacgtatatatatatacattatgcatggctatcaatgacacttttcattattgtgtccaacaattatgatacatatagtattggtccatagcttcttgtttttatcatgacagttaaaataggctcttttatttattagatatttttcgatattatacaatcgatcttctacattattattattatgattatggaatcaaagtaaattatttaaggatctaaataaatatgatcaaatatttagtttcgatattcgatatatattttgagagattttgtttgtttatttttgtacttagttgcatgttgaaataaaatcaatgcgttgtcatttataaaccagaccaggcacgcgtgcatttgataataataataatgataataatctttttcttttaataaagattaatattaaatattaattaatcttaattactttgggagctgtgttttttatgaaaaataatagtatgtatcgtttgaaaattaaattatattttgcatggaaatataaaattaagttttattgtacttccattcaaaaaaaaaagttttattgtactaaatttacgcataatttatgtttgtgcaca

SEQ ID NO: 107389 - DNA, 1177 bp, Cannabis sativa
tcacggggtacagtacacccccttagttctaactataagtttattttttttacaaatgaatttatttaactattttaagacatcttgtaaaatttactgaatattgaacaatttgtaattctaaaagtagggttctgatgcgtgtcgtatgtcgtatcaaatttactattattttaattccaatacttccaattattttagtataaatgtaagtaagggtcgatcccacaaggactatgtttattcaattattcaaaaattagtgacaagaattcgaagaattagaaaagagagttttgatgattaaaataaaataacataaataaaaataaaaaatgaattaaatgtgataatacgatatgagataaatagttaaaggttattctgcaccctcaataatcattcttaacttctattaatgaatgtaatttcaattttccaatcaaactattaattatctcgcaaataaagttgaagaagaaattatccctgtcatgtacttgtggcaccatgcaaagacacatgtcgattctttgatagtgcctatgattttgttcctctcattggggcttaaaccctttcataagcggatcactttggttgggtcttcatcacaaatgcttactttcttaatctcttccataagttctaatacggtttcggagccgatgcaaggatccaatttatcttgtccttcgggcaagatttctttcttggtctttttgagcataaaaatggcttgttgcacaaccacattatagaattttcttacttctctttggtttccacgaacatttctaactcttgttgcttgagtagggaaattgaggcataagtgcctaatggaggtattggatccaaagtccaccaaagccgattgtctcaagattgcattgtaggtcatgagtcagtctactacaacaaaggtgcaatacttgaacgtactttgggggtgtccgggcacaaagatacaaggattcgtacctttcccataggaactaaagtggtcccattgaatcccatggagttgtgaaccgctcgtggaaagatctagataaagtgagtccaatggaaataaaagcatctttaaaaaggaggttcactggacttccattgtctaccaggatctaggggacaatcttattggcaatagaagtttcaattaccaaagggttgt

SEQ ID NO: 107390 - DNA, 1950 bp, Cannabis sativa
aaaaaaaaaaaactattttaaagtataaaaataaaaaggcccctatttataaaccatatacattagaatacataatttagtagaggacaaaaatactaaatattctatatataaataataaaatattatgtattatattctatacatataattttacactaaaaaataaacaaaacaccaaaaaaattatagcactaaaaattagaaatgttgtagctacatttagttatgtattattcattagttaagtgtgcgtttggtaacacttttttaatcagttttttattttttcaattagaaaagtgaaaatattttccaaaaatatgttccataaaactattttcactttttaaattttggaaacactttcaaatttttttaaacaattttttttcttaatcaatattttagactttgaccccaacctggaccttgggacccaagctcaggcctcggccccagtcccgaactcggatcacaactccaaccttagacctgacttaaataaaatcaaaaaataaaaatgaaaatgaaggttattgaacacacttttattttctatttttaaaattaaaaaataaaagtggttaaagaatagatttttattttttaaaacaaaacttttaaaacacaaatttactttcatttttgtgattaaaaaattaaaaacaagtattactaaatgcccccaaattttttgaacaataatagctcgtctattgaacgggtgttttaatcacttttttagctcttaattatatttttaaatttgtagctattttacattagtgattgtgagtgctcttatattggtattgttagtaagaccatcttcaatggatggtgtataatttggttaaatttggcctaaaacataccataaagctatatttggctcaattttatatttgtgctccaatgcaaaaggtgtaaattaattataaaagttagggaaaatggcggcaaaacccccaaaactttcattttggtttcacttaaccctcaaaacccaaatttggacggtaaaacccccaatattcgggttctgttagcaatttaacacttccgtctaaatttaactgttaattgtcatggtagattgtccacgtggacataatgtacacgtggcacaatattattggcccacgtaaataaattatttaaaaaaatttaaaaaataaaatattttttttaaaagaaaaacattaattaaaattttttaaaaaatcattaaatatatataaaaaaattctttttgtttctttttcttccgacttttcttcttcttcattcttttccaaatcatatcaccaccaccgaaaccaccttcaaactatcaccaccacccaccgccaccaccatcgcaaccaccatatcttatagaacaaacaaacaaatatacacaccacatttatcacgatatcacatctaaatctcacaaaatcaaacaaaaactcaaattaaattcaaaaacaaaaatatcagatcccaaaaaaatcaccacccctgaaatcacagaaacccgttactatcattactttttttttttcatatctgaatcagaacctttaaaatacaaaacaaataaaaacacaaaccagatctgaaattgtttacctccatggggtccgaaggtggctggatcagaaacgagcaactccgactccgactctgactccaacaagattaatgcctaagctcgcctgtaaatgctcggccggagttgggcggagagctcatgagagagagagaaagaacgagggagagagagtgcaaaagagattgaaacaacaagagagaaatagagtgatggctgagagagagagggggcggattgagtgagatggctgagagagagagggggatcgagagagatggtgggttgctgcctacctgcaagagagagaaagagaagagggtatttgcaataaagaaaagaaaaaaaaaaga

SEQ ID NO: 107391 - DNA, 1935 bp, Cannabis sativa
ttgccatgtttctttatttgtgttcaaatatggaataatcagcggatatataaagaaaaacaaatgatcattaagatatagataaaaataataattacaaaattttaatattattttttatgataatattacatgatatatgcttgcacccgtaaacttggctttaattaggggatccaatgcaaagaaattattttttttttcttttttttcttttttttttcttaaagaaaagcctgatcacgggccaaggacgcgaattcactgaaaattggcatcaaccatatataagcatgattctaatagtaatacaattaggataattcgatcactaaataatactatatatgccagataaattaagtatacttaattattagcataagtgtgaaaaaccatattaataccttttaaataatcaaacagttaatattaattatttaagaaagtaatttaatttaaaataaaactctatgaaaataatataaattagaagtcaataattaatattattcgttgaaaatgacaaataatattttatgttatcatttccaatacaaaattgaatcaaatatataaaatataaggcaattcgatcgatcggtcgggtcagtgaaatataatatatggtcaaaataaacgtgtcaaaattaattcatgcaccaactgtcacatgcatatgcatgcatgtatttaaatattgagtctacaaactacgtgtcaaatggattcaaaattatctaaatataagaaaattttatatttcaaccataatttattatattcaaactaataacagaaaagatctatctgatgaatacatacttgaacaattcattctctatctataacagaaagttgttttgatagctgaaaatgaatcttacttcttatctcaaatttaatttgcttaacaatgaaagcactacacactttgataccaaaatacttgcattggttcctacatccccaaatgtcataaacggcagcagctactattgctgcataaatctagcatttacatcttcacattttattcatctggatccacttcaaaatgtcttgcactgtagtcatgactactaaaaaattggccaaactcggcaccctgatcttaacggttctgcgtgtaactgccgagatagataccaatctcggcagttacacacgaaaccaccgacattggtgaatttttaaaaaaaaaattaaaaaaaaaaaattcgggacccgatctcaatgggccacctgtaaattaactatcaagatagggtactaaagttttatggacccttcgaagcttgatgtaaaaatgtatatgtaaaaatgtataatactgagaatagaggcaaatttttgtctgaacgcttaggcgtagtagacaaaaggatgctcttatgagtactaggggtgttcataaaataactgattcaatctaatccgcacgatccaatccaatccaatctgcaaagtgcggatatcctcacttgtgcggatttgattggattgaaaaatttaaaatccgcacttgtgcagattagatgttgattgacatgtaaaagtaaccaatccaatccaatccacacatatttataaaaagttaaaaacctatatatacaaataacattttgatgtaaagaaaataataatttaaaagtctaatacatataatacaattatattgtaaaacttaataaattaaatatatattctattcttatatatttttttaacatacaatttaaaataaaaataaatattttttatacataatttttttttctttgaatttattatttgttattttatttattttaatgggttattagagacataaaatgactataattattttattttgttgctagatatgtgaaaaaaaaatattttttttcataaatattaaaaaataataaatccaaagtaaccgatccaatc

SEQ ID NO: 107392 - DNA, 640 bp, Cannabis sativa
acacgtggcactcaattacccaaaactaaattaataaaaaaaaatgaaaagtcccttggtacaaagacacaattccaaaggaaagaagtatggatctttagtttcagtaattatccctacatgtatgttctatgtatatggatgagattgagtaccacctcctaatgtatgttctatgtatggggatgagataggatatctatcctatataggtatgttaagcgaccatccttaaggtgggtaaagtaactaaccccaaagtaagttagacagtgacctcccatctccccacaccccgaggatagtcatctacctgatggtggtagcttaatctatgggttaactcgtaatctcttacactcttatggtcctaatatcacatctcatttaatacaatacttgctctaagtaacaaaatcacatactactaagcactaaagacaacatgaggagcaagaggcgatgtcttgggagtaccaccccaaggtgagtactaccccttatagggttagtcagtcaggttgtaccctaggagcagggccggccagagggtggggcaggcggggccttggccccaggccccacaattttggaggccccgaaaaaaataaaaataatatataaatataaaaacaaataa

SEQ ID NO: 107393 - DNA, 1986 bp, Cannabis sativa
  modified_base (908)..(913): a, c, t, g, unknown or other
  modified_base (1941)..(1949): a, c, t, g, unknown or other
agagagagagagagagagaaatcccctgttaaaaatcacaaagttccactgtttttttcttctcaaacagaagtgatagactgacctcacgaaattccgattcaaattaagatgatgccaaaaaatctgcccagagaaagtctgaagtaggtgtaagtttgatgttaagcttcaagtcttattgttgattcaattcattacgctaaaagaaaaatgataaaagggagagagacgacttgaaaaagtcaagtttttttcccgggaaaatcagacataaacttgcaactggaaagtttgtaattaaagttcgtatcattttttttttttttttgtaaaagagaaaaaaaaaaattatcacacgcgttagtgagaagcgtgtttcccctggattttccgtgtaagaaaaagagtaaaagaaatacaggttttattactttaaaataataataaataaataatcatgttttagctttcattatcacttttaactttcttttttcttttctcactcactagtcacagcttttcaatttatttttcttattttgaaaaattctatcactcatttttcaaactattgtaacgacagtcatttatctatcaaattatttatatatatatgtaagagcattgctattaagtatcagtggtgtctagcacctttgtaatatatcttgttacaattagttagcgatattccctaaaagctattatattaaattatatgggagccaataattagttaaatcaatagcaatattaacatagaaaaatgttaggcgccactaataccctttaacatttatgacatcaattatatgtcatatataattaactcattcatttatttaaaaaaaaaaatactcattctttgtttaagaaatagttaacttatttctttaaaacgnnnnnntatatatatatatattttgtataacattgacttttagtaaagaataattagcaattttatcttttaaattttaaataatactgattttgtcccctaaaatatgcggtttgttaagaatttcctaacttttatatttatagaaattcagtctttctgttaggttctgtctcattattctgtttaaataatgacgtatctttgtaaattagtaattttgcctcctaaattttgatatcaatcatatcgtacccctcaaaataaaaatgagaaagatttaatattctttttagtaaatcttaaaaagtaatttaaatcataagaaaaaattattttgaatgattaacaaaattaaaaaataaattcaaaatttaaaactaactaagcgacttaaaaattatttattttttaataaaaaattcatttaaatattaaaaaaaatatattaaaattttaattttgtaaaaagtaaattttacaggaacaaacttgagtatattttgtttttctcaaaaatatagatttatttaagtaaacaaaccatttttttagtttaatttataactttttttttgaaataattttatatttttattgaatttttaattatttttctctgtttgttaagatataggtttataaatataaataagtttgattttttcttcaaaaaattttagtttatttaaattatttattaaattctcaataattttggtttgattttttaagatacgtgtgttaaataaaataaagtttgaatatatttttttagaaataatttaagtttttttaagtaaaattaatatttttttaattaatttaatattttattagattttttaaaatttttattatttttttttagaattaatataatattataattgcttttaaaaaaatattataatttttaaaaataatttatttttaaaaaaaaggaaacaaaattttgtattggtcaatgtttgggatataaaaatactaatttttaacggtaaaagaaacagaacctaacagaaggggcatannnnnnnnnctgttatattttaggagaaatttttaacaagccgtat

SEQ ID NO: 107394 - DNA, 731 bp, Cannabis sativa
tagtgatttgtctattttacttcaatgtgttagtacttcatattttagaagtgatgtaatttgtaacctctctccatctattttattgttctaatgtgaaaaatgctgttttattttccttaggtatatatgacgtacgtgcaggctttatatggtggtggaggttggccgctgactgtcttcctttcacctgatttaaaacccttcatgggtggaacatatttccctcctgaggataagtatggaagaccaggattcaagactatactaaggtgaaaaaaatggaatatagacactatatttcatgttatattattattacaaagtgttgctgagtttgtttatatgttaggatatattatatttggtcttctttcctcatattatgaatttcatgttttgttctttagaaaggtgaaggaagcatgggatactaaacgtgatacacttgttaagagtggagcctttgcgattgagcagctttcggaggcactatcagcagctgcaagttctaataaattgccggatggtcttccacaaaatgcattgcgtctatgtgctgaacaagtatgtttaatacaaatctgtaaccttggattgaagaccattgcctgagttgcttattcttttctcaattgtttgtggagttcaattagaagggctatagcaagatttttttctttttttttgaaaaaagagatgaaggtccagtgtccatgagggacctcctc

SEQ ID NO: 107395 - DNA, 545 bp, Cannabis sativa
aaaaaacgagcatttcccatgtcaaaagaaagaaggcgtatgtgaccaatgtagagaaaaaaaaacccaaacttatcgcgagctgaatatatttgacttagtttgcacaaaagatacaacttgagaaatctgaggagaaaactccttcatccacacttcactccccttcccctagcgatcagggagaaaggtttaatctatttgagtgattcgcgaggcagtacatatttagtatacatcaatcattcagtgtatttttcgaggagtacaatattaagatcaagctgttcagtgaaactgtgataaagatctaggtcataaaacaacagatattcatttcaaatgttggttgtaaaccgtttctacctatttgtagataaataaaatatggggaatgttcaagtttcataaaccgttgctaagataagatcaaacaattgttgtttaattcctataaatagcaataacacaagagaaaaagggagcgactaatttttcagacttaatacattctatacacaaaaaacctataaataaaaataact

SEQ ID NO: 107396 - DNA, 1240 bp, Cannabis sativa
aaatttaatgtaagcccaaataaaagtctaacaggttatggtaaggtttacaggtttcatatgattgagttgagtgaaccattgtaaccaatgattttattgtgctgaaaaaatgataaccaatagattgatagtagttattattatttatttacttgcaaaacttaaattctttgtttatgtgaacaaaattatgaagtatatatcatttacatctcaattcaccttgttgcaaaaattttggtacctcaatcaatgtagtaactagtttccaaactgtaattacttatagtcatatttttgtttgtgcagtgaagcaagggatgaaggattcaaggatctgtaaaagacttattggtcaacaagattaaacttctcaaagaaatgcgcaccaggcataaatattccccacaaatatcttttttttgcattgggtaagaccatcttctatttatataacaaattaaggtcaaataaggttttttttttttttttggtggggggaggaggcaagggaaaggtcaaataattctttaacgatcttctatgtgcattttttcccatactcattcaaaatttatcaaaagaaaaatcaagattaggtgtagcataatgaaatgtttatttaatttaagtaaaattaaaaaagacataaatctaactctaaaaattctattttcaatattgaatgactatctactacaacaagaagttgactttcaatatgttcatttattatatgatccaaataaaaaacaaaaatcaataatacaactatattaagagatactgtttccgaggagaaaatagttaattagaaataccacgtacgttttgatccatccatattctctagttcaataatatgtattagatataaatataataattatgttttaaaatgtgaaaatacttttggaaaaacaaatgatacacgtggttaatgagcctcaaatcactttcgttagctgaaaaataaaggtgtgtaggaccaattaatctaacaactcaataattataatatatatgacccatatttattataaatattgtagattcgttatatgtataaaattgcaagaaaaatgtccaaatgcatgcatacaaatctatatatttatatatgagcattgctattagtcaccagtggtgtctagcatcttctcaacatgtcgtcgcgtagcgattgactagcgatactccctaaaagctattatattgaattatatgggacccgata

SEQ ID NO: 107397 - DNA, 844 bp, Cannabis sativa
actttcaccaaaacctaaactaaactcaagaaaaatcaaaggaaaagtagtaagatcatacctccacttggctagcttctagagttaatgatttgcccaagaatttgatgaaatggaatgaacttttccctggttttcagcttcttctagggctcggcagaaggaaaggaaaagagagactatggttgacttgtgtttgtttttgtttcctaagttatccttaaatagattaatgtttaaaaccttaatgttaatataaataaaccttatttatttaattctaactccagccataaattttaaataagacaaggttatagcttaacaccaaaatgactaatttgtcctttttataacccttaaaccttaaatcaaccctagggtatcttggtcatttcttagctaaccccgctcaactaacaacttaaaattctacaccagtccagaataattccaatacaatacaacttaattaccgtgacattttgatcatttaactagtttccacagtcgccgggcccgaaaatacttcattttagaaatggttggtatcctcgatacccaaataattcaaacaaaataaaatccccgtaattaataaattacgctttagttaataaattcaccctaactattctaagtaagatcataatcttactcaaaactcaaatacccaaaataattacatatttcataaaatatgtctaattaaatatcattttattttttaggatattacacagatagagctgtctattttaaagatgaatttgattcaagtcaagggccaagagaaattgtattcagggaagaacgtatttatgtccctgtacctattgcttcc

SEQ ID NO: 107398 - DNA, 862 bp, Cannabis sativa
tgtgagtagatctaagatcctgctaaaataatttccaacacgaacatgcataaaaaaagatactaaaaagaaggcaattaaacagcaggattcctaggctctttgtaccggtcaactggatctaagggggccagaggatcatctgtctggatggaaggagcctcaacactctggtcggtgggagaagcggaagtggtcgcctcagggttctcattagtcgcttgagtagtgcagtagtcgggaaacatgtctttggaagtaccgaggtattcaaagtttgccttgggattggccttccaaaaggcatataaaatctcgagaccagttgtctctatggcatccactttcttcccgagcttctccacctcggatttctggctcttaaccttagcctcaagtgcctcttcctaagtattcttgtccttggcctcatcctccaacctgtaattttcttccagtttcgtcagtacatactctgttttgaatttattataagaacatttagaagtaactgatactatatatttctatctagacccaatgatcaagaatttaggccttatatgtgccctgtttaagacaataacagagtctctattgacaaaattagagaaaaattacagttttacaaacattggatacttatggcactaaaaataaatattgagtttatgccgcctacaaacataaaactttaggtacttatgccgctatttacccattataataaaataaagtaatggagaagtgagacttgaaataaaaaaaaaaaataagaactaaaattagtttaataaaattgtatattaaatatgtacataaatatttttttttttttggggaagaacatcgttttgttcat

SEQ ID NO: 107399 - DNA, 1456 bp, Cannabis sativa
aaaatagtatatgggataatttttttttttttttttttaataatttagtaattaaaaaatattattagcgacaggattcgccgctaataattctaaatttgaatgggcaggaattttcacgattgtttttgagattattattagcgggtgacattaacagcgggtcctgttactaataatggaaaatattattttaaaaattttgaattttattattggcgaaccctatttttcgccgccaggccccttattagcggcgaacaccatcagtcactaataatttcgctgctaataccttttattgttgtagtgattgattgtgttcatctgcatctcaacccaacaaataaaatccatctcctactaaattagtaggaaactaaagcagtaaaaaaaagaactttagatatttctccattgcataagatagtgcatagctgaaatgctcctttcaatttttatttcagagccattttaaatcgacaaaaatagtttaaaattgacgggtattctccattataggcatcaattttaaacactcacttaattttattggaagaactccaactaggttttgtgggttattaatttcttttgtaaagctttgtgtgcacacaattggactttagggatattgtataccatcaaccactcacgttttacatcaatatagttttaaaaactttaagggctcgtttggaaagctgtgttaggtcatatatattttattatattatattgaattggattatacaacatatttttatataatactatatgtaaaactttaatttatactaaaatattatatatatatttatttttgatccaaatcggtatttttaataactaatcatttggttaaaaacaatagaacgtgcttcagaggaacaatcctccaactaaagcacacgacctggagagaaacaagaatttctagctaagcggggagctagcttgtttgcagatcgtttgacaaaacgcaattcaatattttctaaagataaaaataacgcacgaacatcatgcacaaagagaccaaaagaagatgacatagagatttcactttgaatagcttgtatgcataccaatctgattctaaaattacttgtccccaattatgatgatcaatccaacttaacgcttccttgataccaaccatcttagcaactttcagtttgaaccctcgaaacaatcgaaacaagaagtcatcccaaaaacaatcgaaacaagaaactaaaaccaacagaccgaacccaatctcaaactagaaaacttagactctcaaaccataaaaccataaacaatctcaaaccaaaaaatttagactctcaagccagaaaacttagacactcaagccagaaaacaatggcaaaaccataacaaactcaaaccaataacaagaaccgataaacaggaaccaatctcaaacaatcacatgtcacaaaagacaaga

SEQ ID NO: 107400 - DNA, 1528 bp, Cannabis sativa
aaaacatgatcgcacaaatgccaaggggaaccacataacatttttctacctctgatataatcagcaatggcatgctgagcagttatcaaagaaagatattttttctttgcaacaaatttttcatacaaagcatgaatggttttgaagaataagcaatcggtggttgtgaacttaaccttcggttcctttgcatactttctttttttacgtagatagtaaaaaatgatatccaaatgttaaagaataaaaaaattagacatgtcgaaaattcagaaaacgaagtatatatcaataactcaaaaacaaccaaaaaccatcatgaagaaaactatctactgacatttttttaaaaaaaaataaaaaataaaataataaacttaccgaattagttaaacattggccaggaagcttgtggaaccacatcttggttgcaacatcttccacgccaaaacgaaaagggggaacaatcgtatcctttcccttcaagtaaaccttgtccttgtcatggctaagagataaaaaaaacataaatagaataaaataaacaaaaaacacaacaaaagtgctaaaatgaaacacttactaatctttctttgatcgccgacctttaccaagccacaagtcaaaaacattctcgtctttatggtctacatcttctctaattttatcatcaagaggacacaaaccaaccacatacttaacaactccataaccagaaccatctttagaactagaaatggaagagtcaaactccataaacagagatgtcaacgctatgggtttcttagatttcctcttgtcaagaagaggagttttttcatcaggaattgggttatcttcaacaagttgaatattagaatcaacagagagacctgttgtacccatctaagattatttttttcaaaaaaaaaaaaagtcagtggtaacatcaaaattgtcgagcaactaaaaaacaaccttaacacaaccataccttaacacaaacaacacgatgatccgtaagctcaacatttttcagaaactgtaacctggttaccagaatcaccaccaattccccctgaagacatctgctgatatatcttataacaaagaattagagtaaatcttaataataacaaccattatacaaccaaaaaacaacacaaaatcaacattaccataatctcaactgctttcacaccggactgaacagctgcctcaacatatatttgagtagattcctcattgaaatcaacaaaattcttggtataaaaaaaatacaagaaaaaaaaaatacagaaaaaaaatatagttatttttttaatagtgttaaacaactgagaaaaaactacaaaacaactaaaaaacaaaataaaaaacataaaaaataaaataaaaagaccaacaataattgcaaacaccataatctataaacatagccatcaaaataacataagaaatacaaataaatagtctgaatattagttgcaaattaaaacagaaaaaaaaactacataataagaaaggacataacaacaacataaaatta

SEQ ID NO: 107401 - DNA, 1355 bp, Cannabis sativa
aagctgtaattcagattttattaccgtgataatcagcgtgattgaaatatttatgctacctgtaggtttgaaagtgagaggaattatgatttgcatgctcatagggtgtatggtattgttaagtttgttcaataccatcaataggaaaataccctcactggttttgaagggtatatcgaaagtattgtcaaagaattctatgccaatttgactaatgatttgcatgatgagaactctaatttttttggtaaagtctctattcgagggcattggttttcatttattgtcaaggacatttttgtgactttgcaattacccaaaggtgtgtccaatgctgtcatgtctatggatcgtcatttgatgctcactgaattcagtggtgcacgagttgaatgaaaatctgggcggagtctttgaattacacatctcacttatgctcatgcatccctcatgcggtttgcacttagcaattggcttcccaattccaacaaaaccgtggtgtctcaagatttggcatcttttctctttcgtatcacctcgggggcatccattgatctggcttcttcaatcttggaccagattgtttcatttcggagaggtaaaaagcgtactcataagcttgtgtttcctaacttaatctataaaattttgtcctcttagaaagatgtggcctactctcatgaaacacttgagcctccccttactggcaccatcttccaaccctcagagtattttgatggagcttttcccaagcgtcctaaagctggtgctggtgcaagttcgagttgtgctcctacagatgtccaagaggtcaagcatgaggttcaacaggtgaacaattgtcttgctgccatggaggaggttcagcaagagatgtccaagcagctgtcctcattgatcaagctctatggtgcataagttctctttcatttttatgtttttgttagacatattttcatatttacatgttttttgtctttggcctttagataaataaaaaggaggagtaatagttggtttttaatttcttgtttctcaactctggaccctttttccagggggagttgtgtttggtacttgtgattaactttggattaaaagttaattagcttgttatcttagttatttcggttttcgattgtgttaaaaaaaatattttgattatctaaagtgccaaatagggagattgtaaagtcatttttttggcaagttagatgccaacatattttttattttatggtgagatttgtttgctttcataatcgattttttcacatttattattcagttttcattgctcttttctatgttaggaaagattaattttcagctggacttttcttgtatggaaactt

SEQ ID NO: 107402 - DNA, 1216 bp, Cannabis sativa
aggctttgcagactggacaatcatgtccttcaagtcattacacttagttatcataatgtaggatatatgctaagtgttccagtaacccattcgcctcgttgatacttcttcacatacagcaaggtagatgcctcggtatgcgttgttcatagctccctcgatattacaccttctgaggcaagatggtttctcgtcaatacatgaattgatagtttgtatatccttttctttcttaacgttgtacaacgagtgagttataaacatactctacttattctatatttcgtgagttattgcattttgcatttaatgacacaattatcattaaatctgttggttcatatccccacaagattgacacgtgtcactttctgaagtacaaccaaattttgggtataacacattaatttaaacccaatctttttttttttttgggtaatacccccttattttcaatttttttgtaattttgatgcatatattaaatttggctgttaaataccatttagaattgccactgtgtacatatgtatagacatgacacgttttcaatcgcccaaactattttaataatttatttgttataaaaataaaaataaaatatttttttgaacttgtgagacaacaaaactaaccctactccctcatctagactcccgcgtcattgcctcccttcactaacaaccaaaatggaggccaccactgtcgtgtttccttctggcaaagcgttccagcactagtaaagcccaatttgtagcaataacattctctcactctaacttctctttcatgaaatgacattctccattcactgtcgagccacgtggatcgcaaatttaaaatctctccccccaaaattcatgactagtattcctctaaccttcttgtattttttcatcattctctttatgttacccctttcattctctcttgctctctcgcatttggttttaaggttgcaaagatggagtcttcttcttcattacccaagaggtcgcgcgtgtctcaggttcgcaaagtctagttttctgtgacgggatgaagagcgcatgaggaagatgagggattaaaggtggtgtgatggagagagagtgagaaaggttgggctcttggggagacgaaaaatgcgatggtcgatcgttggtgacggaggcggcgacagtatgcctgggtttgttcagagaatgtgaaacagcaggtgagagagagagagaga

SEQ ID NO: 107403 - DNA, 1046 bp, Cannabis sativa
cgacttggccatcgccacgattagtaatcatgcatctccattcatcatcctagtatgtttcttcaattattattatatatatattaacctaattaaatgcttattaactttattataattttaatatgttatttgtttctatttattttaattattaagaagagagtactcgagttatccagaattaatggtggtgaaaggggatatatattgagcaaatggctaataatatatatatattgtgaattagctaaaacgcccaaattaattttaatttgtcgttatatatataatcagcagcttctttcttttttcttcataattaggtactaattatattgctttgtaagtgttgctcctgcattccctttcattatatgtaaatgatcaacaatatttggcagaattaatattctcagaatcgatcatatatatttgttacctcatgtatgtgtatactaatgtgtacatgacatctatctatataaatatatatatatatccatgttctgagctttttaattctttttctctcactttacaattaaattagtctttttctccgaagaaaaatgttaccacttttataataaatagtatattagcgactaattatacactttatgataaagtagttgatccgtactgctatgtatacattaattaattatccatatatcatatatagatatacatatgcatgttgtatatatagttctttagttgacgagtaaaaagcaaattattatctgagtgcagttctatctacttctacgtacgcggcgaatatatacatgtacatacatgttattataggtagcttgatgaagaaattataagcgtgaaacaatatatctataatctgtaatctataatctataactataattaaaatgataatatttatgggcttatactaattgaattaccaaaatagcttttattaattataaaattacaaaaaagaaaacattcatttagcaaatatatacatatatttttattcaagggtaaatagtggtataagtacctaaaattttatgttt

SEQ ID NO: 107404 - DNA, 1636 bp, Cannabis sativa
  modified_base (1479)..(1481): a, c, t, g, unknown or other
ctccaatcgacacctaagatggcagttttctaattccacgattggtatgtatctggttgggtcgtaagcgccatcctcatcaacctggttagggagtggacgattgtttctcatccaatttccgtcaagcaaggggccccaatattgggtcttcttggggcttgcattctgttcattcgatgacttgatagatccctaaggactcaatggttcttttccggggcaatgatttattccttcatgagggttgttatctttggtgtcatctattacttttatgtcagaaggcttttttctgagctttttcacagaggctctaattgaaaacaccaaaatgttaacgcaaatttgcattaaccaaatttgagcctcgcggtaatattgcaacacaaaaaaaataaaagctatagaaaaataaaatatgaacttagggttttttacgtggttttgcaattagaaatctgcatagttcatgagtcaatcttatccagatttctgagtattttttcagggcctctttcatatgagttttttcgtccctcctctggatcgtgtctgccactatttataattacatagtggatagtgatttacaaaagtttgcaataatcgttacatcaattattacgttaaatcaggggatttgattacaaatcaagctatataaatgaggtttttaaacaactatgaatatcccgcttttattgggccgagatgagcgcatgatcaaatatatacggtaagccttatctcatagggatgcctcgccgagaatggagccaagttaactttgattgcgagcagatgcttgtcatttggcttctcgagactaatattgtttaaatctgataactatattttctagggtcgagatgatcttcctcgcatgcatagaatcttctagcgagataaacgcctcgttgtctgttatcttgactcgtcaaactatctatactcagtttgtatattgtataatatacgctaagtgtttttagtgttgtcgtttctctttcatgcagcgtggttgaggcctcttcatgcacgcgtgcacccacatagcttctcgtcaatacataagttagcagttcgtacgtttctgtctcgcaaaaggccatccaggcggccgagttataaacataccctgcgaattatatttccaacgagttgttccatgctaagtgtacttttcgtttgcatgtttgagttcttcgttcttcccaactcgacacgtgtcttcatgtgatgtgcttaccaaatttcttgtataacagaatatatctcgttagctaagtgtttttctaaaattaattttaaaataattcaatgaaaaataaattcatatattttaaaattaattattttgctaattaaattttaattaggttagactaatgtaattaacctaatacaattatttaaataagtcaaatgggccttcacatttggggtggttcgtgtgagggagggctgggttcagtnnntcgtacccactactaatggccccctaactcttacacaaggcctagaggagaggaaattatcttatgtgaaattttattttagcaacctagtctacttaattaattaaaacttaaatgggcttcctatatgcatctaagccgaaaagcaaacatat

SEQ ID NO: 107405 - DNA, 524 bp, Cannabis sativa
tagtagtcttatattccacatcaatttcactcacatacttattttgcagattgtggtattcttttcaacatgtgatgctgtagattttcactacacactgttgagtgagttccaattctcacgggcagaagcagaagtcaaacagaagtttctcacgtgtaataccttgcggctacacgggaatatgaagcaggaggatcgaacagccacatttcaggcattcaagacagacaaatcggctctctttttgtgcacagatgttgctgctagagggctagattttccacaagtaaaatgtatcatacagtatgattctcctggtgatgctacagaatatgtacataggtaatcttacttatttctaaaatatgacttttgtctcctgtttttttttttttttctttcagcaataaatgtcaagaattttttgtattagatttctgttggtttattagtttcatatgacctgtcattgtttaaagtatgtgcttagatgtccttgagcccacatgctcatatgatat

SEQ ID NO: 107406 - DNA, 1322 bp, Cannabis sativa
cagatttgatattcatgttgatacttatattgaagatattaacttcttactagggccggtaattttactaaaaaatctgtgggtaacatatacccgatgtagattgtagatgtgtaggatacgaagatagggggtgtgtccttccaagttatttgctcgattatatatttttaattattatatatgtaattgacatttaaaaaaataattaaaaaattataagtttattttttttaataaatagtgtaattttactattaatgatcccacattaatattgtttgctttaagactttacggttttgtttgtggatactttttcaaatgctttatactaatagagtaggtggaacactcgtacttaaaataactcttgcttattctttcgatgtgagatttaagttgataccctataagaaccaacaaaataaattaaaatcatgttacactatataagactaaaatactgaaaattatgtcacacagacaagactaaaatacttaaaataatgtttatagagacaaaactaaaatactgaaaactatgctagtagcaacaattaagttgcaatagcaaacacacaaccccgatcaagctgcacttatgctgagggaaggccgatggacctgcctggagaaaaaagacaacctcctgtaactataaatttaagaacgagaaactctaattttttaatttagttattttttttgcacatcatttttatgttaattagtatacaaatataatatcatttactatctctaatactatattattattattattattttgatcaagaaaaaaaaacttcattaatcaacagagtaaaatacatcagatagcaagagcaaacacagcccttacaactcagccaagaccaacaagacacctacctattttgtaatctcagtatgtagtctctctcctgcttagacaagtttttcctatttacaagttgtaatctatacttagcagaattttttacaccatcaactaaactaccaacagaactagaataattactgaaaatacatctattcctgttgagccaaatgttgtagattacatccgccaaaacagtaatgttgagccgatgtggcctagcttgacctgtcaaaattacccaatcataccatccattgttatctgtcggccaagccctgaatcccaaccacgaaaaagttgtatccaggactttttgagacaacagacatctgaagaagagatgttcatgggattcctccttctcctcacaaaccggacaaaggttcgaattaagcactatatgaaatcgaggtaatttatctctggtaagaaggtg

SEQ ID NO: 107407 - DNA, 1298 bp, Cannabis sativa
ttaaatctaatggatggatattttatcaaattttccttaagaaagagagttatttgtggcgaaacctccttatctttttctggtggtaaaaccttcttatgtttaattttctttggaaatttgaggtgctagttcgatatcaccgttaaagaacaaacgtgattattattgtatatgcttcaaagttttactttcacgtatatacaagtgtacacagtggttatttaagttgtatttaacggtgatatttaactgacgcttcaaatttgtgaagaaaagtaaatttaaaggtcttttgcattaaaaaaaaagagttaaatgtataaaaattaaaatataacagagtattaacaaaaagttgtaagtcataaataaaacatgaaaatctaaatgaaattgacaaaaataataattgtgaaattattgtttgaagatattttcatgtacattatcataattgggtagggaatccattattggtagggttttatgacacattattagaaactcaataggattaccgttccatgtatgagggaatttgtaatttccttcattgtttgattcaatgaacttattagatataagtagtaagtagagtacttaaatatataattgtctaaagattaatggatataaaatgagacatagaactttagttcattacgggagatttattctgtctcgaggactatttactatgtattttctttgggagacaggaaaaatcccttaaaataaaatttcatatccataaatctctaaaaaattatatatttataagttctacatactacttacaaattactaagagcatcaatgtcaataggttttggcatcaagtttaagtgccattgcattaaaatattgattttagtgtaaataataattatggcagtgatgctaagttttagcaccagtgcaaaatgtccctaaaaaatgagtaaattttatgtactaaaaataatagtgtgtggctatagtgacaacatttagggctatttagtattagaattacgatcctagtgtaacattatctttcacttcaaagaaaaataaaggttcaaaaaaatcacaaccaaatatagtatattccataagtttcttcatgcatcataataattatagttttattgatcactaatattgtaactttttttattaggccctcttacacctacagaatgataactcttatacacaagtaccaatcacacacttcttgggaaaacttcccatcttgaaattataccccaggtcaagcacgcttaaccgtggagttctttcgtgatgggcta

SEQ ID NO: 107408 - DNA, 511 bp, Cannabis sativa
tgcaaaaatacgagtgatgggttgagaaatttgacattttggtggtttcgaggaggttaagctcgtggatttagagggttttagagtggttgagcttgtggattttgagagtttcgaggtggttgagctctcgtagattttagggcttcagggtggagacgacaagacttagagaaagagagaccagcagagaagatgacgaccagggcttgtgattgaggttttgggtctgagttcgacggcagggttttgagtcgaggttcattgccaaagagtgagagagaggcttttttaaaatgtaaaagtatatataattttttttttcaaaaaatgtaaaaatatttttgggaacaaaaaatattgagagtatagatatctctaattaggtggtatattaaaatattgtgctttaaaattagggaaaaaaatagaaaaatacaaaaaaggaaaaaaaattacaaaaatactttgggccggcccattaaatatttatacagtccacatacaaata

SEQ ID NO: 107409 - DNA, 718 bp, Cannabis sativa
gtatttttgtaattttttttccttttttgtatttttttatttttttcccataaatatatgtacgaaacaataacctaataatttaggatacatatataaaaaaaaaaaaaaaaagaatctgatctgacaatcatagattttttttttttaaatacctttatttaattaatgaaaatacttaattagctgcgtccattatttacccattacaaccacattctttattattggagtactgaaaatatcccagatatatcatcatcacatcagttggattgatgccttaaaacgactgatattatataaatatggataaaatcaaataatgaatatttttttctttgataagtcaattaatgaataaattgattcttaattttttcctacagaacaataaagaatacatcaaatctattacgtgccacaaaaatcttttgactactgttttcaataaaattttaatcacaaaaaatagtataaattaaatcagaattaatgagatacattaggttgagtttgatcgatcataaagattgccctaaaataaaacgcaaatagtgtgattaattggcaaatacatacaaagggatcccaatttcaaaccaactaaactacctagctagtgatgtaaaccatactatattttcaactatcaaataatgtttttttttaatggactatcaaataatgttataaagctcttttccttttttttttt

SEQ ID NO: 107410 - DNA, 739 bp, Cannabis sativa
gatcatgagcaagattgggaagaaaggggactttggtttccatgaaaggtgtgctgaatatgaaactaaaccacttgagctatgcggatgatgtacttttattttgtagaggtgactttaagagcatttatctcttgatgcaagggctaaaattgttttctaattcctctagtttaacaccaaccaatacaaaatctgcagtgtattttagtggaatggatgaaaagagattaaaagagtcttggatatgactggatttactagacaggaagagcccttcaattacctcggggtgccaatctgtgcaagaaaaattgcagcaggggattgtatcagccttgctaagaaaattacaaagaaaattagagtatggtctaccagaaatttgtcctttgcgggaagattagtgttggttaactcggttctccttacaatacatatgtattggagtcaagtcatgattctccctaagaaagtgattaaagaaatagaaggagtatgtaggagttttctttggacagggaaaagagtaaagattggggctggatcagttgcgtgggaaagcttatgcaaaccgaaaaaagaaggaggcttaggcttgctgaatgttgctcaatggaatactgcagcaatgtttaagcatgtttgggcagtggcaaacaagaaggaaaatctttgggtgaaatgggttcattgcgtatacatcaaacaccataactggtgggagtataaagtccca
